United States Patent Application Publication US 2017/0114356 A1 - sequence listing, part 42

SEQ ID NO: 56172 - DNA, 1612 bp, Zea Mays
aggggtcttctcgaccgaggcatccttgggagggtcagcgggagcaatgttcctcaccaaacaggctcctaaggatttccttcaaatcattgattttgacaaggatacaataatgaaggttcttaatcgagccattgaggttaaggcattgataaagtctggagacaagagcttccaaccgttcaaagggaaaacaatggtcatgatttttgccaagccatcaatgaggacccgtgtttcatttgagacaggattctttttacttggtgggcatgctatttatttgggtccagatgatatccagatgggcaagcgtggcctgtttgacaaggccgcaaagctacaacgcccaagaagattgaaaggggaaaatgcgcagtactcgatctacttatcctgcaagaagcaacttcaatgataagaacaagcttggggaaggcgggtttagtaccgtgtacaagttgtacagggaaaggtcacagatagaaataaaataccggtgaagaacttgtcccggtgtagtatacaaagactggaccagctgcacaatgagatgcaagtatcggtcaatcttcaacacgagaagcttgtcagactattggggttctgcatgcaccgggacgagatgatgctcgactatgcacatatgaagaacggaagccttgacaggtttctatttgactaagcaatgatagtagatattgttgatctgtcaatgatgatgatgaggtggttgtcacagaagaacacaatattgatagaaatggtgtttatgcgaaggcattttcttacttgacaagtgacaatgacattcttgaaagagagcatatttcttacgaacaaggagattctattcaaggcacatcatttcttaaacaagggttcattatagatgatggacaagctgaagttgcccagtgcatggtaacattagagatgcaaaatcttggatcagatggtggatgttatgcttctcaatgcacagagatattgcggtgcaaatacttagaggagatggtggacggagtgatgctgcccactccacaggaacactactgatacgagaacttaaaacaaatggtggacaacatgatgcggtccagtgcatatcaagtctacatgtgcaaaagcttagagaaaatcaaatcaagctttatgggtcctcgtccttcctagaatctattgtagatgacacaagaggtgattttactcactacacaatagactgcaatggcataaagctcagtgcaccacaacattgctaagacaggagtttcaagctgcacgtgatagcatgcaagaggttatggtgagaaattcagttgaagctaccacatccttgacaagtacacaacaagggagacacatgagaactggattattcaatgtgtcaactgtgacaccatttccccggcaattttgatcttgccacgtcaaggtcttctccgagtgagtgaattcacattgatagagattgggcatttcgtggacctagaggacaaatcacatccaaaatttgttgatgtggctcctatcaagtgcaccgtgttcccctcttcaagaatcaagagtttgatgctgccgccaaagagatcaccaaggcattaacaac

SEQ ID NO: 56173 - DNA, 1423 bp, Zea Mays
gtggcgcgccaggtgctgtcgggcatcgcctacctccaccgccgccacatcgtgcaccgcgacatcaagccctccaacctgctccgcgacatcaagccctccaacctgctcatcgactccgggcgccgcgtcaagatcgccgacttcggcgtgggccgcatcctgaaccagaccatggacccctgcaactcctccgtgggcaccatcgcctacatgagccccgagcgcatcaacaccgacctcaacgacggcgcctacgacggctacgccggcgacatctggagcttcggcctcagcatcctcgagttctacctgggccgcttcccgctcggcgagaacctggggaagcagggcgactgggccgcgctcatgttcgccatctgctactccgactcgccgcaggcgccgtgcaacgcctcgccggacttcaagaacttcatcagcctctgcctacagaagaacccggtgaaccgtccgtccgcgatgcggctgctgcagcacccgttcgtggcccagccgcagccgcagcccctggccgccccgccgtcatgatggctcgccgaaatccacaattcatgaccgatttgattgattgattgcttcccgtcgtggtacaactgaaggcggcgggcggattgatctctcaccttgtcgcctgacctttggggtggatggatggttggttgcatgattggttgtggatggccatgagatgcggtacctagagacgttcctcctaatcctagctaggcatgcaagtggctcaggacaagccgctaacccgcagggctgaccgcacctcgccgcaacgacccgcatccgcataccccgacggcgtactggagctcggaaaggcgcgcacatggcgttccgcggattatggcgccgccttgtatttccctgtccgatcgttgaagcagcagcagagggatcgagttgatgcagagcagcagaagacgagagccacgccgccgccgcagaagtgtcatcgtcggcgccgtttgtctccaactccttgcaggaaaggaagaggaatgcggaggcataggtcacggtcggtcggtgccatggccgaggcggggatgaagcgcagcttgattggtgtcccatgttccatgtgcaaccacctgatagcacgcggcacttgcatccacattgctagcccattatgggaattggtaattgaggcctcctccacagcaatcatcaccgcatcatcatccatcgttgctgaatgctgctgtcgtctcagcacttctttttctcccccctttcatcctttcaatgttcatgttcttccaagtcatcatataaactgggttgttagttaaaaccattgcgtttcatcgttctgcaatactacatgccagtcactctcattggactggaagcggagtagctggtggtggtgaactggtgatcc

SEQ ID NO: 56174 - DNA, 1665 bp, Zea Mays
ccaaattcctcctctcgcagataactgtggcagtcagtcaagcagcaggtcccgagcggtggcggcggcgaccacgtgcgcggcggcgatggtgaggactgaggagctatcccgtatagaggggctgtgcctgtgcgcgaagtgagccacatagcggcggcgagcacgttcgaagcccacgaaaaatggcctcccgcctcttaaccagatcagcggcgtcgcgcctcgtttcccacctccaccgcaagacgccaggcattactccctgcctcctcacccgtggccctgccttggcgtccctcttggggcccactgatggcctcccccacgccgctgactccactctgctccgcgttccgatgcggtggctctcctctccgtcctcggaggcggtggcggaggctccgatgaccgcggacggcctgactgtagactcaatcgccgacaaggggtggacgattcttcccgaagccgagagcgactggcgcagccatgccgcggccgtcgcacagtcagtcaaggtcatcaaaaagcgcctcaagtggggatggatacttgagagaacgaagcaattggctgtggtgttggagaagccagacctctgggaagacccagtttttgctgggagggttagccgtgagcagggtgagctcatgggcaagattaagtcagtgaaccaatttgagcaggaattgattgaacacattgagatgctacggcttgcacgtgaagaaaacgataatgaacttgagatggaaagcatgaaggctttagctgatatgagaagaagtgcaaaggagaaagaacttaatgcgttactttctggagacaatgactcttgttcttgcttcattgaggttcaggcaggggctggcggcactgagagcatggactgggctgcaatggtcatgaacatgtataggtcatgggcccagcgacgaggatataaaatcactgtggtagaagagatgtctggtgaagtagcaggaatcaagagggccactatcaaagttgatggtgaatatgcatttggatatgccaaagctgaagtaggagttcatagattagtgcgaatttctccatttgacagtggaaagcggcggcacacttcctttgcggctgttgctgtaatacctattcttggggataccactagccggtaccagatcaaagattctgatcttaggatagaacgtttccgatctggtggccctggtggtcagcatgccaacactacagagagtgccattcgaattgtgcacattccgactggtataagtgcaacatctcaaaatgaaagatcacagcacatgaacaaggcatcagcaatggcagtgctccaatctcgtcttgatcagcttgagattgcccgccaggcacagatgaatgcagagcacacacaatcactcaacgaaatcagctggggcaaccaaataagatcttatgttctccatccataccgtatggtcaaagatctccggacgaactatgaagtatctgacccggattcagttctagaaggagatctagacgatttcatcttgaactatttgtcttcgtcactggatgaagctgatattacagctgcagcactctaaacagacaagcgaacatagttgtcccgtgtcagatgtgtactgctgcagatgaatgacaatccagata

SEQ ID NO: 56175 - DNA, 1978 bp, Zea Mays
caagcagcaggtcccgagcggtggcggcggcgaccacgtgcgcggcggcgatggtgaggactgaggagctatcccgtatagaggggctgtgcctgtgcgcgaagtgagccacatagcggcggcgagcacgttcgaagcccacgaaaaatggcctcccgcctcttaaccagatcagcggcgtcgcgcctcgtttcccacctccaccgcaagacgccaggcattactccctgcctcctcacccgtggccctgccttggcgtccctcttggggcccactgatggcctcccccacgccgctgactccactctgctccgcgttccgatgcggtggctctcctctccgtcctcggaggcggtggcggaggctccgatgaccgcggacggcctgactgtagactcaatcgccgacaaggggtggacgattcttcccgaagccgagagcgactggcgcagccatgccgcggccgtcgcacagtcagtcaaggtcatcaaaaagcgcctcaagtggggatggatacttgagagaacgaagcaattggctgtggtgttggagaagccagacctctgggaagacccagtttttgctgggagggttagccgtgagcagggtgagctcatgggcaagattaagtcagtgaaccaatttgagcaggaattgattgaacacattgagatgctacggcttgcacgtgaagaaaacgataatgaacttgagatgcatgaaggctttagctgatatgagaagaagtgcaaaggagaaagaacttaatgcgttactttctggagacaatgactcttgttcttgcttcattgaggttcaggcaggggctggcggcactgagagcatggactgggctgcaatggtcatgaacatgtataggtcatgggcccagcgacgaggatataaaatcactgtggtagaagagatgtctggtgaagtagcaggaatcaagagggccactatcaaagttgatggtgaatatgcatttggatatgccaaagctgaagtaggagttcatagattagtgcgaatttctccatttgacagtggaaagcggcggcacacttcctttgcggctgttgctgtaatacctattcttggggataccactagccggtaccagatcaaagattctgatcttaggatagaacgtttccgatctggtggccctggtggtcagcatgccaacactacagagagtgccattcgaattgtgcacattccgactggtataagtgcaacatctcaaaatgaaagatcacagcacatgaacaaggcatcagcaatggcagtgctccaatctcgtcttgatcagcttgagattgcccgccaggcacagatgaatgcagagcacacacaatcactcaacgaaatcagctggggcaaccaaataagatcttatgttctccatccataccgtatggtcaaagatctccggacgaactatgaagtatctgacccggattcagttctagaaggagatctagacgatttcatcttgaactatttgtcttcgtcactggatgaagctgatgtaagtacctgaacaaagaaccatgctcgccatttttcatgagctacctgccaaatcacttggctttgaaacaaaccaactgagacactgctgaagcgctagcagctggaggtgctgctccagtcttttctttggtagccaatacaagtcgaggtcaaatgatgagaatttaaggtacgggatagtagtaggttgcaagtgcaaaaaccagagttagttgcacaggatagagtttatagtgtaacagacctggcaatattgtgaaaaatatttgcctgatattggagacggggttactttttctgtactgcatttgccgtttgtgatcgacgtataaacagtcatccctaattatctagtcaatctagctcctcttttttactgtagtgacagtgttgcacccaggaaagctgaggtggtctacaataattgaccattttctcc

SEQ ID NO: 56176 - DNA, 1451 bp, Zea Mays
ctcaatataacttgcgcaggcagagatcccaagcgtccgattttggatgcctgtggctgctgtcactcctaggagggtgcaaacccaacattcactacttattacatgagatgactacttactctagataggcagaataatgcatcatgatattaatggctggcaaactgtaattcagatgccagaaggagaaatagaagagttgccatatgcacttaagaaagtagaacctgtagaccggttggagatcagccaggagaacggtacagagttatccgaaaaggcttctttctataaaggagtattctacaactaccttagcattgggatggatgctcaggttgcatatggcttccatcatcttcgtgatgaaaagccatatcttgcacaaggaccagttgcaaataagttgatttatgctggatatagctgcactcaggggtggttttgtacaccttgcacagcgagtccacagctaagggggcttaagaacattttgcgactttccattaaaaaggccaattgttcagagtgggagcaagtgaaaatgccttcaagcgttagatccctagttgtgttaaatttatacaattatggcagtggaaggcatccatggggtgatctaagacctgagtatctcgaaaagaaaggctttgttgaagcccattcagatgatggcttgcttgaaatatttggtctgaaggaaggttggcatgcttcatttgtcatggccgagcttatcaaagcaaagcacattgcccaggctgcggctatcaagttcgaaatgaggggtggcgagtggaaccgagcatatgttcagatggacggagagccgtggaaacaaccgctgctacaggagcactcaaccatcgtggaaataaacaaagttccgtatcattctctcatgataaacggggagtaatgagatttttactccgtcaaccagatcgttaggatcgtgtacagttcaggagcagcgggcactagatccttagaactgggtcggacggactgcagcgaggatggcatgcatgttcgttggccttttgtcgtgctatggtcgaagccatggccggagcgtgatgtggcaccatgcattgttgtattcgtaccataatatgtgcgttgttgtatcctaagttctttttgaaggaaacatgattgatttgtttgtattgtaacgttgtgtcattgcaaaagaataacctggtgtaaaactgtaaaatgtgacagtctgccgtttgcacagccctgtagcattttttttttgttcttgttaactttttttttatgaaagcattaactgatttgacttgtcagagttttctattaggaatgccagggagcaatttccctctaccaacttgtacgtagaaactaggaagtactagtgtggtagtaatttatgaggccgttgatcctggcatctccaccgatacagagtgtggcgc

SEQ ID NO: 56177 - DNA, 1680 bp, Zea Mays
aatctatggaatctgataagcgtgtgcattacccttgacaggtctttgatctttccgttgtgaagccttcagattttgttcaccatggtttgagttgtttggagaggttagctgaccaaggcgataaccgtgcgaaggctgttcgtgagaaaatgaggattgtggttgctgggggtgatggtacagttggttgggtgcttggatgtctctcagatctttataagatgaaaagggaaccggttccacctacaggaatcattccacttggtacaggaaatgatcttgctagatcgtttggatggggtggctcttttccctttggttggcgctcagctgtaaagcgttatctcagcaaagcttccagatctcccatttgccgtcttgacagctggcaaactgtaattcagatgccagaaggagaaatagaagagttgccatatgcacttaagaaagtagaacctgtagaccggttggagatcagccaggagaacggtacagagttatccgaaaaggcttctttctataaaggagtattctacaactaccttagcattgggatggatgctcaggttgcatatggcttccatcatcttcgtgatgaaaagccatatcttgcacaaggaccagttgcaaataagttgatttatgctggatatagctgcactcaggggtggttttgtacaccttgcacagcgagtccacagctaagggggcttaagaacattttgcgactttccattaaaaaggccaattgttcagagtgggagcaagtgaaaatgccttcaagcgttagatccctagttgtgttaaatttatacaattatggcagtggaaggcatccatggggtgatctaagacctgagtatctcgaaaagaaaggctttgttgaagcccattcagatgatggcttgcttgaaatatttggtctgaaggaaggttggcatgcttcatttgtcatggccgagcttatcaaagcaaagcacattgcccaggctgcggctatcaagttcgaaatgaggggtggcgagtggaaccgagcatatgttcagatggacggagagccgtggaaacaaccgctgctacaggagcactcaaccatcgtggaaataaacaaagttccgtatcattctctcatgataaacggggagtaatgagatttttactccgtcaaccagatcgttaggatcgtgtacagttcaggagcagcgggcactagatccttagaactgggtcggacggactgcagcgaggatggcatgcatgttcgttggccttttgtcgtgctatggtcgaagccatggccggagcgtgatgtggcaccatgcattgttgtattcgtaccataatatgtgcgttgttgtatcctaagttctttttgaaggaaacatgattgatttgtttgtattgtaacgttgtgtcattgcaaaagaataacctggtgtaaaactgtaaaatgtgacagtctgccgtttgcacagccctgtagcattttttttttgttcttgttaactttttttttatgaaagcattaactgatttgacttgtcagagttttctattaggaatgccagggagcaatttccctctaccaacttgtacgtagaaactaggaagtactagtgtggtagtaatttatgaggccgttgatcctggcatctccaccgatacagagtgtggcgc

SEQ ID NO: 56178 - DNA, 2337 bp, Zea Mays
gccgacggacgcggctgccggcctggcgctggcgagagccgcaggaaagagaagagaaagaaagagcgcaggcaggctgcgggcatcggcagtcggcaccagtcaaagccaccgttttgattccccttccgttagtaaaacctctgcctcgccgacgcccaccaataaagtccacagccatttcattttcttctttccccaattcccgtccatcagctcgcagtcgcaccagcgaccagagcagcagaccaagcaagcgcgagggagagaagagacgaagaagaaaagaaaagccggagctctgccgagcttagtccgcggaggcggcgaccggcgacgcgtaaccatggagcgggcggaggaggcgcagcccgccgccgagcggagggcgccctcgacggcgccgtcggcgcgggtgtcgatctgggagtcggtacgcgcgtgcggggtgtgggggaaggagctggacaaggccgagctgcggaggcaggtcgtcatgccacgctacctgcgccgggccgtcgcggccgccgtcaaggccaaggacgaggccgccggcgtggcggtggcggcggcggccgcggaggaccgcgcgggggaggacgccgacggcccggcggtggcgcccgtggtggtgttcgtcaactcgcgcagcggcgggcgccacgggcccgagctcaaggtgcggctgcacgagctcatcaccgaggagcaggtctttgatctttccgttgtgaagccttcagattttgttcaccatggtttgagttgtttggagaggttagctgaccaaggcgataaccgtgcgaaggctgttcgtgagaaaatgaggattgtggttgctgggggtgatggtacagttggttgggtgcttggatgtctctcagatctttataagatgaaaagggaaccggttccacctacaggaatcattccacttggtacaggaaatgatcttgctagatcgtttggatggctgtaaagcgttatctcagcaaagcttccagatctcccatttgccgtcttgacagctggcaaactgtaattcagatgccagaaggagaaatagaagagttgccatatgcacttaagaaagtagaacctgtagaccggttggagatcagccaggagaacggtacagagttatccgaaaaggcttctttctataaaggagtattctacaactaccttagcattgggatggatgctcaggttgcatatggcttccatcatcttcgtgatgaaaagccatatcttgcacaaggaccagttgcaaataagttgatttatgctggatatagctgcactcaggggtggttttgtacaccttgcacagcgagtccacagctaagggggcttaagaacattttgcgactttccattaaaaaggccaattgttcagagtgggagcaagtgaaaatgccttcaagcgttagatccctagttgtgttaaatttatacaattatggcagtggaaggcatccatggggtgatctaagacctgagtatctcgaaaagaaaggctttgttgaagcccattcagatgatggcttgcttgaaatatttggtctgaaggaaggttggcatgcttcatttgtcatggccgagcttatcaaagcaaagcacattgcccaggctgcggctatcaagttcgaaatgaggggtggcgagtggaaccgagcatatgttcagatggacggagagccgtggaaacaaccgctgctacaggagcactcaaccatcgtggaaataaacaaagttccgtatcattctctcatgataaacggggagtaatgagatttttactccgtcaaccagggttgcattcatagatcgttaggatcgtgtacagttcaggagcagcgggcactagatccttagaactgggtcggacggactgcagcgaggatggcatgcatgttcgttggccttttgtcgtgctatggtcgaagccatggccggagcgtgatgtggcaccatgcattgttgtattcgtaccataatatgtgcgttgttgtatcctaagttctttttgaaggaaacatgattgatttgtttgtattgtaacgttgtgtcattgcaaaagaataacctggtgtaaaactgtaaaatgtgacagtctgccgtttgcacagccctgtagcattttttttttgttcttgttaactttttttttatgaaagcattaactgatttgacttgtcagagttttctattaggaatgccagggagcaatttccctctaccaacttgtacgtagaaactaggaagtactagtgtggtagtaatttatgaggccgttgatcctggcatctccaccgatacagagtgtggcgc

SEQ ID NO: 56179 - DNA, 2380 bp, Zea Mays
ccaaattccagacgccgacggacgcggctgccggcctggcgctggcgagagccgcaggaaagagaagagaaagaaagagcgcaggcaggctgcgggcatcggcagtcggcaccagtcaaagccaccgttttgattccccttccgttagtaaaacctctgcctcgccgacgcccaccaataaagtccacagccatttcattttcttctttccccaattcccgtccatcagctcgcagtcgcaccagcgaccagagcagcagaccaagcaagcgcgagggagagaagagacgaagaagaaaagaaaagccggagctctgccgagcttagtccgcggaggcggcgaccggcgacgcgtaaccatggagcgggcggaggaggcgcagcccgccgccgagcggagggcgccctcgacggcgccgtcggcgcgggtgtcgatctgggagtcggtacgcgcgtgcggggtgtgggggaaggagctggacaaggccgagctgcggaggcaggtcgtcatgccacgctacctgcgccgggccgtcgcggccgccgtcaaggccaaggacgaggccgccggcgtggcggtggcggcggcggccgcggaggaccgcgcgggggaggacgccgacggcccggcggtggcgcccgtggtggtgttcgtcaactcgcgcagcggcgggcgccacgggcccgagctcaaggtgcggctgcacgagctcatcaccgaggagcaggtctttgatctttccgttgtgaagccttcagattttgttcaccatggtttgagttgtttggagaggttagctgaccaaggcgataaccgtgcgaaggctgttcgtgagaaaatgaggattgtgttcttcctggcaggttgctgggggtgatggtacagttggttgggtgcttggatgtctctcagatctttataagatgaaaagggaaccggttccacctacaggaatcattccacttggtacaggaaatgatcttgctagatcgtttggatggggtggctcttttccctttggttggcgctcagctgtaaagcgttatctcagcaaagcttccagatctcccatttgccgtcttgacagctggcaaactgtaattcagatgccagaaggagaaatagaagagttgccatatgcacttaagaaagtagaacctgtagaccggttggagatcagccaggagaacggtacagagttatccgaaaaggcttctttctataaaggagtattctacaactaccttagcattgggatggatgctcaggttgcatatggcttccatcatcttcgtgatgaaaagccatatcttgcacaaggaccagttgcaaataagttgatttatgctggatatagctgcactcaggggtggttttgtacaccttgcacagcgagtccacagctaagggggcttaagaacattttgcgactttccattaaaaaggccaattgttcagagtgggagcaagtgaaaatgccttcaagcgttagatccctagttgtgttaaatttatacaattatggcagtggaaggcatccatggggtgatctaagacctgagtatctcgaaaagaaaggctttgttgaagcccattcagatgatggcttgcttgaaatatttggtctgaaggaaggttggcatgcttcatttgtcatggccgagcttatcaaagcaaagcacattgcccaggctgcggctatcaagttcgaaatgaggggtggcgagtggaaccgagcatatgttcagatggacggagagccgtggaaacaaccgctgctacaggagcactcaaccatcgtggaaataaacaaagttccgtatcattctctcatgataaacggggagtaatgagatttttactccgtcaaccagatcgttaggatcgtgtacagttcaggagcagcgggcactagatccttagaactgggtcggacggactgcagcgaggatggcatgcatgttcgttggccttttgtcgtgctatggtcgaagccatggccggagcgtgatgtggcaccatgcattgttgtattcgtaccataatatgtgcgttgttgtatcctaagttctttttgaaggaaacatgattgatttgtttgtattgtaacgttgtgtcattgcaaaagaataacctggtgtaaaactgtaaaatgtgacagtctgccgtttgcacagccctgtagcattttttttttgttcttgttaactttttttttatgaaagcattaactgatttgacttgtcagagttttctattaggaatgccagggagcaatttccctctaccaacttgtacgtagaaactaggaagtactagtgtggtagtaatttatgaggccgttgatcctggcatctccaccgatacagagtgtggcgc

SEQ ID NO: 56180 - DNA, 1124 bp, Zea Mays
gcttaggccgctggccgttgggaaggtctttgatctttccgttgtgaagccttcagattttgttcaccatggtttgagttgtttggagaggttagctgaccaaggcgataaccgtgcgaaggctgttcgtgagaaaatgaggattgtggttgctgggggtgatggtacagttggttgggtgcttggatgtctctcagatctttataagatgaaaagggaaccggttccacctacaggaatcattccacttggtacaggaaatgatcttgctagatcgtttggatggggtggctcttttccctttggttggcgctcagctgtaaagcgttatctcagcaaagcttccagatctcccatttgccgtcttgacagctggcaaactgtaattcagatgccagaaggagaaatagaagagttgccatatgcacttaagaaagtagaacctgtagaccggttggagatcagccaggagaacggtacagagttatccgaaaaggcttctttctataaaggagtattctacaactaccttagcattgggatggatgctcaggttgcatatggcttccatcatcttcgtgatgaaaagccatatcttgcacaaggaccagttgcaaataagttgatttatgctggatatagctgcactcaggggtggttttgtacaccttgcacagcgagtccacagctaagggggcttaagaacattttgcgactttccattaaaaaggccaattgttcagagtgggagcaagtgaaaatgccttcaagcgttagatccctagttgtgttaaatttatacaattatggcagtggaaggcatccatggggtgatctaagacctgagtatctcgaaaagaaaggctttgttgaagcccattcagatgatggcttgcttgaaatatttggtctgaaggaaggttggcatgcttcatttgtcatggccgagcttatcaaagcaaagcacattgcccaggctgcggctatcaagttcgaaatgaggggtggcgagtggaaccgagcatatgttcagatggacggagagccgtggaaacaaccgctgctacaggagcactcaaccatcgtggaaataaacaaagcaccatgtccttgttggcatatca

SEQ ID NO: 56181 - DNA, 931 bp, Zea Mays
gagaaaccttacccgtcctgtccaccactctcatagcaaagaccaagaccatatccttccacttgctatggcggcggcggcggcgacggcgaccacgacctctccggcgagggcttcgtggcggcctacggttcccgcgacctcggcatcggcagcaggagtctgcttccgtgttggagcgaagcgctttccagggctccgaacggcaagcacctgtcggcaccgacaccgaggcagaacaaggctcacaacagctcacgtcaagagcggggaagccgaggggcgtccaagcacggaggagagcgcaactggcatcggcggcccggacgaggactccttgcggcgcgagctcgaaaccgcgatcgaggaggaggactacgcgcgcgccgcggcgctccgggacgagctgcgcgtgctccaggaggactgccgggccgcggtgctggcggcgaacgcgcggttctacgccgcgttcaaggacggcgacctggcggcgatgcgccgggcctgggccaggggcgaccacgtctacgtggtgcacccgtcggcggggaggatctccgggtacgagatggtgatgcagagctgggagatggtgtgcgacgccggctacgagttcccgctgcaggtggacctgcaggacgtggaggtgcgcgtgcggggcggcgtcggctacgtcacctgcctggagatggtcaggaccaaggggagcagcagctggggcaagcagctggccaccaatgtgttcgaggaggtggacggcgagtggctcatgtgcgtccaccatgcctcgcacttcgatgagtgaaatcgctttgcaattcgatcgatcgatgagcggaaataattttggtcggccgtcagtacagaaacatatggattcagatttcggaaatgtgatctctctctctctcacacacacacacacaca

SEQ ID NO: 56182 - DNA, 3523 bp, Zea Mays
caccactccacgaccaaactagcccacgacaccagctgctgagctgaccagcacgtacacctcccgcctccaacctataacaccaccgctgccgcgacgtggcatcagccgcccgtcgataactaaccgcgcagcggcggacgacgagagcacaggcatgagagcctacgcggcgaccccggccgccgtggccacgctgccgtcggccgcgccgccgctcacacccgacgccgctgccgtgctgtcccgcgccgcggccgacgcgtccaggcgccgccacgcgcacaccacgccgctccacgcggcggccgcgctgctgtccggccccgcgccgctgctccgtgacgcctgcgtcgcgggcctcgcgtccccgcacccgctccgctgccgcgctctcgacctctgcttctccgtcgccctcgaccgcctccccacgtccacggagctccagcaccacgaaggcggcgccttccaccacgcatccgccgcgcctccgctctccaacgcgctcgccgcggcgctcaagcgcgcctacgcgcaccaccgccgcatcgggagcggcggcgtcgagaccgacgaccaccgcgtcggggtgccgcacctcgtgctcgccatcctcgacgacccgtccgtggcgcgcgtcatgcgcgaggcgtccttctcaagcacggccgtcaaggccgccatgctcaggtccctctccgacccggcggcacccgacgccgccgcgtacgtcagcgccagggtcatgcaccggcaggcctcccaccgggaggaggaggtggccaaggtggtggaagtgctgaagagggccaagaagcgcaacccggtgctggtcggcgacacggtggacgtggacgccgtggtgcaagaggtggtcacgctgatacagaggcagcggctcggcaacgcgcgcgtcatctccttccccaaggagttcggcgacctggtcgacatggacagggcgcggctcaccgccaaggtcaaggagctcggcgaagcggtgagatccgcatcggccagcgccggcgtcgtggtcaacctcggcaacctgcagtggctcgtcgaggaaagatgcgcggctcctcggggcgagcaacaacaagagaagaggagggacgtggtgctcgacacggcgcgagccgccgtggccgagatggcgcgcgttctgaacctgtccggcgaaggggagcaccgcgtgtgggtgatcggcacggctacgtgtgcaacgtacctgaaatgccaggtgtatcacccggcgctggagagcgagtgggacctccaggccgtgcccatcacgcccaggcctccaccgccgccgccgccgccgcttgggctctcgccgaggggcatcctgagtagctctgtggaggtgctgtcaacggcgatgacgtccccaatgcaacgggcaccgagcctttgcagcgcttgcgcagagggctacgagcgcgagcgcgccgagatggcttcatccgagcgtgctccctgtccggccgagcagccgatgtcgcagtggctgcagatcggcacgccgagcagcggacgcccggccgaccgcgcgcaggagaaggcgcgggaggctgacgagctgcgacgccggtggcgcgaccggtgcgcgcagctgcactcgcatggccggccgccgctggtcacttgctcagagtggaacggggccagcattcttgccagcatgcaggcggcgccgccggtggtaccggtacggccattggtgcagcgtagggttgccgtggacacggatctcgcgcttgggctggcggcggccaggccggcgtgtgaaacggacgacaagctgctcgtgagacggctcacggaagcggtgagatggcagcccgaggctgctgccgctgtggccagtacgatcgcgaaggccaggtccagcgaatccaggcggcgccgcactacggccggtgtcgacgcgtggatcgtctttgctgggcctgacgtggccgggaagaggagcatggccgaggcgctgtccaagtccgtgttcggcacgggggccgtcaccctgcgcctcggctggccccaagccggcgatgacggcggcgagtccgtcgtgtcgtgccgcggccagacggcgctggaccgcatggcggaggcgatacgggcgaacccgttccgcgtcgtcgtgctggacggcgtcgaccacgcggacagcgtcgtccacgcctccatcctacgcgcggtcgagtcgggccggctctcggactcgcacggccgcgacgtcgccctcggcaacaacatattcgtcgtgatttcgcaatggtcgccgccgttgccagagccggagcacctgaggaagtcgcaagaagccgaaccctttcttcctgactcgcaatggaacctggagcacgggatgaccgccggcgggaagaagcgcaggccggagcagcagctcgaaggagaccggcgcacaaaggcgcgcaaacactcggcacgggagccgcttcccctggacttgaacctgtccatgtccgatgaccataccgacgccgtagacgacagcggcggcgagggatcacggaactcgtccagtgacctgaccgtggagcacgagcaggagtacgtgcagcccgctcactccggcagatgctcggcggcgccactgaccgtgtccgaactcatcaaagctgtggacggagtggtcgtgttcaagccaccggtgagcttggagccactgaagcggagcgtctccgacttggtggtgccggcggcgaagttgggggaaatcacggtcggcgggtggcctgttcacgtcgacgacggcttgctgggcaggctagccgcccgggcagctggagcggcggcggcgggcacgcccatggaggcgtggacgaccggcgaggtgctgtgccctagcagcatgcggcagttcaaacgtagcttgagcagcaacgacgttgacggggcgacggtggaaggcagccgccggagaaaggacggcgagatgttcccgatgccggtgacggtcgacggcaactgattatgaagctgcgcacactccgacgacggcttccatctttattcgctggtcatcaagatatgatcaagcacggtgtacattagtacattcatgtaaattttccagcaatcggtttttttgttttcggtcggagaggagtaacgatcataaaactaaactagctagagacaggacaagggactaggcaggcactagtagtagctagctcctttcccccattttgcctttattacgtgctatttcacggagacgggagatcatgacgaattcttcggttgcttggcggcaatctaccatgattcacttgtgccgcctgcatgcacgcagctcaacatggaattaagcaggtgatcctaccaaggatcgaacattactacatttccaagaatgatgctggccatgcgtactaccgtgttacacacacagcatggccagtaattgacactaatcattatttaatcataaagtgcacctcctcgacgttgttacacaacatatatggcgtgcatgatgcatgaa

SEQ ID NO: 56183 - DNA, 2380 bp, Zea Mays
gcatacaacgtttggcttattcgaggaaacaactgatacttacacaatcgctgcatcaccgagctttggttacttgggcccttctacaagcaaatactcactcctcgatcttggtcgtagcggtctgggttctgacctgaagttgcctctattgtcggacaaggctgacggaaagcaagattctgtcaaaaccctgccgaaaacccttggttcaataagagatgagagggtctcatttcaattgcaacacacgggagaactctacattactcaagggtgcaatgtgacgcaaacagtcttcaatgggattaatgtacttgcaggcgttggccttctttccaccccgtttacaattcatgaagctggatggactggccttgcagttctagtatgttttgcgattgtttgctgttatactgggattcttctgaaacattgttttgagagcaaagatggtatctcaagttatccagacatcggagaggctgcatttggaagaattggccgtctgttgatatctgtaagttttggtgtctttagatgaaaggggtagcttaggagttaggactatctttcaatagtatgtagacatgtctgtgcacttatcatactcacatgcctccatctaaagtagtctgttgatctgcacctaaccttcacttccgtatctgaatgtttgcggtttggcaaaaatagacacctactcaaactctccactctccttttctcttttttgaaatgctaacacctgttcattatgcaaatcacatgaatgaatctaagattttacaatcaataattggcacctcaaggttagaaaaattcgcatccctctttgtttttgtttcatgcaagagatcttttctaaccttaattatgataagtgtaggaaagaaaaactaactgatggttatttttcgtgcagattattttatataccgagctatatacatattgtgtggaattcattattttggagggtgataacctcacaacaatttttcctaaagctggaattgattggtttggcattcatgttgatgggaagcattttttcggagtgttaactgctattttagtgttgccaacagtatggctgcgagatcttcgagtgctctcttacctttcagcgggtggtgtgattgcaactcttctcgtattcctgtccgttggtttagtcggtgctaccgatggtataggcttccattcaactgggaaggtagtaaactggagtggcatgccctttgccattggtatttatggattttgctactctgggcattcagtatttccaaatatctaccagtcaatgtccgatcgctctaagttccctaaggcactgttcatatgttttgcaatttgtacagctatgtatggatcttttgctgtcattggctttctcatgtttggagagaacacattatcccaaatcactttaaaccttccaaagcattcgattgcctcaaaagttgcactatggaccacggtgatcaaccctttcaccaaatatgccttgctgttaaacccactagctcgaagtttagaagagttgcgtcctgaaggttttttgaacgaaacatcatgctctattatactgaggactgcccttgttgcgtcaactgtatgcattgcctttcttctgccgttctttggtcttgtgatggctctcattggatctcttcttagtatacttgtggcggtcataatgccagccctgtgcttcctgaagatcgcacaaaacaaagcaacctgtccacaggtgatcgcgagcgtcggtatcgtaatactgggcgtcgtcagcgccgcgctggggacctactcgtccgtgaaaaagatcgcagaaaactactaggctcttgggacagtttctctccgcagaggctactaccacacggttccacgtacgtccggccggagctggggaatggtcagggtttacgtacacgatctcaaagttttgctagaactaccgaaattccctgtagattattactgttatgattcggaccacaatagtctacttatacaaacaaaaaaaaagaactgcatcatcacgtcacttggaataatgtaatcatgccctcctttttttagccgaggtccctaccatctcgctgtactgtagcaggttgctgtgctggcgactgttccctatacaataaggctctgctttgtgcaattgccaattgaggtatctgtagataagctctctatctgggctttttggggacgatggatcggatctgaaagcttgaaaggtgcccattcctccggcgctccctccctcctcgtaggtgggctgggttgggcctttattatgtctcctgtatcctggaagaccgacctggttttgttatttgctgggtagacgtggacttag

SEQ ID NO: 56184 - DNA, 2850 bp, Zea Mays
cgagtagcagagtctggccgccttgtcgcgacgcgacgcgcgatcccatcccttcccatccagcgcggctccaatcctgtcgcggccattaaaagcttccctcccctgcctctctgctccgctcgtctcttctggaaccgtccctcgctcgtcatctttccgccttcgctacgcaattcctgtccacgctgcgggccagttgtgacgaccgcgaagctcgtcagagaaagaagagaggccggcaggcgggcggcgatcggagatggcgccagagaagccccggaaggagcaggaggaggaggaggatgagttgatgctggaggatggaggcatcgaggagagcccgcgccgcagcttcgaggactgcggtgattccgacgaggaggacgatgacaacgatgaggagcgggacggcgacggcgtcggttcgccgcgctccttccagtcccacaagtggccgcagagctacagggaaacaactgatacttacacaatcgctgcatcaccgagctttggttacttgggcccttctacaagcaaatactcactcctcgatcttggtcgtagcggtctgggttctgacctgaagttgcctctattgtcggacaaggctgacggaaagcaagattctgtcaaaaccctgccgaaaacccttggttcaataagagatgagagggtctcatttcaattgcaacacacgggagaactctacattactcaagggtgcaatgtgacgcaaacagtcttcaatgggattaatgtacttgcaggcgttggccttctttccaccccgtttacaattcatgaagctggatggactggccttgcagttctagtatgttttgcgattgtttgctgttatactgggattcttctgaaacattgttttgagagcaaagatggtatctcaagttatccagacatcggagaggctgcatttggaagaattggccgtctgttgatatctgtaagttttggtgtctttagatgaaaggggtagcttaggagttaggactatctttcaatagtatgtagacatgtctgtgcacttatcatactcacatgcctccatctaaagtagtctgttgatctgcacctaaccttcacttccgtatctgaatgtttgcggtttggcaaaaatagacacctactcaaactctccactctccttttctcttttttgaaatgctaacacctgttcattatgcaaatcacatgaatgaatctaagattttacaatcaataattggcacctcaaggttagaaaaattcgcatccctctttgtttttgtttcatgcaagagatcttttctaaccttaattatgataagtgtaggaaagaaaaactaactgatggttatttttcgtgcagattattttatataccgagctatatacatattgtgtggaattcattattttggagggtgataacctcacaacaatttttcctaaagctggaattgattggtttggcattcatgttgatgggaagcattttttcggagtgttaactgctattttagtgttgccaacagtatggctgcgagatcttcgagtgctctcttacctttcagcgggtggtgtgattgcaactcttctcgtattcctgtccgttggtttagtcggtgctaccgatggtataggcttccattcaactgggaaggtagtaaactggagtggcatgccctttgccattggtatttatggattttgctactctgggcattcagtatttccaaatatctaccagtcaatgtccgatcgctctaagttccctaaggcactgttcatatgttttgcaatttgtacagctatgtatggatcttttgctgtcattggctttctcatgtttggagagaacacattatcccaaatcactttaaaccttccaaagcattcgattgcctcaaaagttgcactatggaccacgtattgtttttgtacgtttttcaggtgatcaaccctttcaccaaatatgccttgctgttaaacccactagctcgaagtttagaagagttgcgtcctgaaggttttttgaacgaaacatcatgctctattatactgaggactgcccttgttgcgtcaactgtatgcattgcctttcttctgccgttctttggtcttgtgatggctctcattggatctcttcttagtatacttgtggcggtcataatgccagccctgtgcttcctgaagatcgcacaaaacaaagcaacctgtccacaggtgatcgcgagcgtcggtatcgtaatactgggcgtcgtcagcgccgcgctggggacctactcgtccgtgaaaaagatcgcagaaaactactaggctcttgggacagtttctctccgcagaggctactaccacacggttccacgtacgtccggccggagctggggaatggtcagggtttacgtacacgatctcaaagttttgctagaactaccgaaattccctgtagattattactgttatgattcggaccacaatagtctacttatacaaacaaaaaaaaagaactgcatcatcacgtcacttggaataatgtaatcatgccctcctttttttagccgaggtccctaccatctcgctgtactgtagcaggttgctgtgctggcgactgttccctatacaataaggctctgctttgtgcaattgccaattgaggtatctgtagataagctctctatctgggctttttggggacgatggatcggatctgaaagcttgaaaggtgcccattcctccggcgctccctccctcctcgtaggtgggctgggttgggcctttattatgtctcctgtatcctggaagaccgacctggttttgttatttgctgggtagacgtggacttag

SEQ ID NO: 56185 - DNA, 2872 bp, Zea Mays
gccggatggcgtccctcgtggcccaccccgcttccttccgaggtccgagtagcagagtctggccgccttgtcgcgacgcgacgcgcgatcccatcccttcccatccagcgcggctccaatcctgtcgcggccattaaaagcttccctcccctgcctctctgctccgctcgtctcttctggaaccgtccctcgctcgtcatctttccgccttcgctacgcaattcctgtccacgctgcgggccagttgtgacgaccgcgaagctcgtcagagaaagaagagaggccggcaggcgggcggcgatcggagatggcgccagagaagccccggaaggagcaggaggaggaggaggatgagttgatgctggaggatggaggcatcgaggagagcccgcgccgcagcttcgaggactgcggtgattccgacgaggaggacgatgacaacgatgaggagcgggacggcgacggcgtcggttcgccgcgctccttccagtcccacaagtggccgcagagctacagggaaacaactgatacttacacaatcgctgcatcaccgagctttggttacttgggcccttctacaagcaaatactcactcctcgatcttggtcgtagcggtctgggttctgacctgaagttgcctctattgtcggacaaggctgacggaaagcaagattctgtcaaaaccctgccgaaaacccttggttcaataagagatgagagggtctcatttcaattgcaacacacgggagaactctacattactcaagggtgcaatgtgacgcaaacagtcttcaatgggattaatgtacttgcaggcgttggccttctttccaccccgtttacaattcatgaagctggatggactggccttgcagttctagtatgttttgcgattgtttgctgttatactgggattcttctgaaacattgttttgagagcaaagatggtatctcaagttatccagacatcggagaggctgcatttggaagaattggccgtctgttgatatctgtaagttttggtgtctttagatgaaaggggtagcttaggagttaggactatctttcaatagtatgtagacatgtctgtgcacttatcatactcacatgcctccatctaaagtagtctgttgatctgcacctaaccttcacttccgtatctgaatgtttgcggtttggcaaaaatagacacctactcaaactctccactctccttttctcttttttgaaatgctaacacctgttcattatgcaaatcacatgaatgaatctaagattttacaatcaataattggcacctcaaggttagaaaaattcgcatccctctttgtttttgtttcatgcaagagatcttttctaaccttaattatgataagtgtaggaaagaaaaactaactgatggttatttttcgtgcagattattttatataccgagctatatacatattgtgtggaattcattattttggagggtgataacctcacaacaatttttcctaaagctggaattgattggtttggcattcatgttgatgggaagcattttttcggagtgttaactgctattttagtgttgccaacagtatggctgcgagatcttcgagtgctctcttacctttcagcgggtggtgtgattgcaactcttctcgtattcctgtccgttggtttagtcggtgctaccgatggtataggcttccattcaactgggaaggtagtaaactggagtggcatgccctttgccattggtatttatggattttgctactctgggcattcagtatttccaaatatctaccagtcaatgtccgatcgctctaagttccctaaggcactgttcatatgttttgcaatttgtacagctatgtatggatcttttgctgtcattggctttctcatgtttggagagaacacattatcccaaatcactttaaaccttccaaagcattcgattgcctcaaaagttgcactatggaccacggtgatcaaccctttcaccaaatatgccttgctgttaaacccactagctcgaagtttagaagagttgcgtcctgaaggttttttgaacgaaacatcatgctctattatactgaggactgcccttgttgcgtcaactgtatgcattgcctttcttctgccgttctttggtcttgtgatggctctcattggatctcttcttagtatacttgtggcggtcataatgccagccctgtgcttcctgaagatcgcacaaaacaaagcaacctgtccacaggtgatcgcgagcgtcggtatcgtaatactgggcgtcgtcagcgccgcgctggggacctactcgtccgtgaaaaagatcgcagaaaactactaggctcttgggacagtttctctccgcagaggctactaccacacggttccacgtacgtccggccggagctggggaatggtcagggtttacgtacacgatctcaaagttttgctagaactaccgaaattccctgtagattattactgttatgattcggaccacaatagtctacttatacaaacaaaaaaaaagaactgcatcatcacgtcacttggaataatgtaatcatgccctcctttttttagccgaggtccctaccatctcgctgtactgtagcaggttgctgtgctggcgactgttccctatacaataaggctctgctttgtgcaattgccaattgaggtatctgtagataagctctctatctgggctttttggggacgatggatcggatctgaaagcttgaaaggtgcccattcctccggcgctccctccctcctcgtaggtgggctgggttgggcctttattatgtctcctgtatcctggaagaccgacctggttttgttatttgctgggtagacgtggacttag

SEQ ID NO: 56186 - DNA, 2504 bp, Zea Mays
atctcgcctgacacacaagcagccccatatatggcccggtctcctacccagacaacccgtccgtctctcgttctctccttcctatcggctccacacctccacgcaactggaagcttcgctgcaatctgccctactcctcttccgccgcctccaacaccgcagacgcagctgccgcgggcgggagcttggacgtgctacgctgctctcatctcgtttccgcgcaggaattgttctcaatggcccgcgtgtatgttggcaacttggattcacgggtgacttctggggaactcgaagatgagttccgcgtgtttggagttctgcgaagtgtttggattgcacgtaaaccacctggctttgcatttattgattttgacgacaggagggatgcggaggatgctattcgtgatctagatggtaagaatggatggagagttgaactatctcgtaattccagtggtcgtggtggtcgtgatcggtatggtggatctgagtcgaagtgctatgaatgtggtgagactgggcactttgcacgtgaatgtcgtctgcgcattggctctggaggtctaggcagtggaagacgtcgcagtcgcagccgcagtcgcagtcgcagtcgcagcaggagcaggagcagaagccgcagccctagataccgcaggagtccaagctatagtagaaggagctatagccctcgttatcgctctccaaggcgccgtagtccttcgccagctcgcgcgcgcagctatagcaggtcaccatagtacaactgcaacgagtaatggtggcaggtactggtgtagcaggagctaggcctgaagcccgtgcctgatacttcttggtgtgagaacttagtccttggtttggctgtcaggaacaaatttggaactgtcgtcaactgcatgacttcagttcaggcatgttctgcttaaacgactcggccaactacggctctcagttagtcttcatggttttgttcctccattcttggcacgtccttatctgcaaacaaatgtcaacgttccattactagctgccttcgatgtttcatcatgaaattcttcaccgaagatgctacttcatcacaaattagtaacatcctttcccctcatatagttgataaggtttgagtgtactgagcactaacaaatgcagctcgcgaaagtaagaccgtttttcgtcatagaacaagacagctattttaattgcagcactcgtgtgaaaatagatctactctgcatggtggggattggggcgattgaagtgtggccttcagctgcacctagttgggcatcccaggaacctagtcaggctcactacagcaagaggcgcatcctttgactaaacatgttggttttatttcttgtggtttgattcttcacttctgttcattgtgttctgccttcactgcaccctattggtagtggtcgaacaatgcttctgtctgtggtaagttattcttggtacaatggctcttctttaccccctgatcagtgtatgttggactttctgatagagttagcaccaattgtagtataaatatgttctttttttctctggaaggtaattgtaattctatctgaatactcagatttgaggtataatctgctcttgtcaaatgattttttaaagatcattctagtttcacctgtagctttcttccttttattacttactttaggcaatgctggactcccgcatgtttgcaatattgctttcttattgcttggcattcatgctgcgttttaaggtcacttactcatggaaagaagaatggttcctgttgctcttacattgcatttgcgttctgtagaggatgtggtgcaccagtgtaattagctcggttaatctggtgtggcttgagtaaatttatggaaattactttttgagccagatcctcgtccacttatttttgatgtgttttccttcgaaacatttgaggcaacactatattgtcgtcgtgtctgtttctgtctttggagtcgatgtgtcacgtatgtttgtttttctgtggtgtcttctatacggcgtgcgttctcggctacttctcttaggttgtggctactggctagctataggacggagtgccgtttgaaatagaagacggtgcgtcacatctgatgtttaaatgtcaattactagtattaaatactaattataaagaggcaatgctccatgcctggaattcttatgtgaagtatgcctagggaatggatgagcttcatgtgtatttagtcagtagtaattctgatctgcagttgtttttgcatttcctaagtgattctagatctaaaatgtcttctgtcttttgctttgttcgcctctattcccagccacaatcaaagaatggcatcaatagttttggtggtcttgaagcaacccttgttgacttacttgatataatgtatataatgggcttgaaagatggatttcagaaagctagaataagcagtgaaactgaagagaagcgacataccacaagtatactgagaagagacccaatgagagcc

SEQ ID NO: 56187 - DNA, 2519 bp, Zea Mays
atctcgcctgacacacaagcagccccatatatggcccggtctcctacccagacaacccgtccgtctctcgttctctccttcctatcggctccacacctccacgcaactggaagcttcgctgcaatctgccctactcctcttccgccgcctccaacaccgcagacgcagctgccgcgggcgggagcttggacgtgctacgctgctctcatctcgtttccgcgcaggaattgttctcaatggcccgcgtgtatgttggcaacttggattcacgggtgacttctggggaactcgaagatgagttccgcgtgtttggagttctgcgaagtgtttggattgcacgtaaaccacctggctttgcatttattgattttgacgacaggagggatgcggaggatgctattcgtgatctagatggtaagaatggatggagagttgaactatctcgtaattccagtggtcgtggtggtcgtgatcggtatggtggatctgagtcgaagtgctatgaatgtggtgagactgggcactttgcacgtgaatgtcgtctgcgcattggctctggaggtctaggcagtggaagacgtcgcagtcgcagccgcagtcgcagtcgcagtcgcagcaggagcaggagcagaagccgcagccctagataccgcaggagtccaagctatagtagaaggagctatagccctcgttatcgctctccaaggcgccgtagtccttcgccagctcgcgcgcgcagctatagcaggtcaccatagtacaactgcaacgatgctgttatgcacaggtaatggtggcaggtactggtgtagcaggagctaggcctgaagcccgtgcctgatacttcttggtgtgagaacttagtccttggtttggctgtcaggaacaaatttggaactgtcgtcaactgcatgacttcagttcaggcatgttctgcttaaacgactcggccaactacggctctcagttagtcttcatggttttgttcctccattcttggcacgtccttatctgcaaacaaatgtcaacgttccattactagctgccttcgatgtttcatcatgaaattcttcaccgaagatgctacttcatcacaaattagtaacatcctttcccctcatatagttgataaggtttgagtgtactgagcactaacaaatgcagctcgcgaaagtaagaccgtttttcgtcatagaacaagacagctattttaattgcagcactcgtgtgaaaatagatctactctgcatggtggggattggggcgattgaagtgtggccttcagctgcacctagttgggcatcccaggaacctagtcaggctcactacagcaagaggcgcatcctttgactaaacatgttggttttatttcttgtggtttgattcttcacttctgttcattgtgttctgccttcactgcaccctattggtagtggtcgaacaatgcttctgtctgtggtaagttattcttggtacaatggctcttctttaccccctgatcagtgtatgttggactttctgatagagttagcaccaattgtagtataaatatgttctttttttctctggaaggtaattgtaattctatctgaatactcagatttgaggtataatctgctcttgtcaaatgattttttaaagatcattctagtttcacctgtagctttcttccttttattacttactttaggcaatgctggactcccgcatgtttgcaatattgctttcttattgcttggcattcatgctgcgttttaaggtcacttactcatggaaagaagaatggttcctgttgctcttacattgcatttgcgttctgtagaggatgtggtgcaccagtgtaattagctcggttaatctggtgtggcttgagtaaatttatggaaattactttttgagccagatcctcgtccacttatttttgatgtgttttccttcgaaacatttgaggcaacactatattgtcgtcgtgtctgtttctgtctttggagtcgatgtgtcacgtatgtttgtttttctgtggtgtcttctatacggcgtgcgttctcggctacttctcttaggttgtggctactggctagctataggacggagtgccgtttgaaatagaagacggtgcgtcacatctgatgtttaaatgtcaattactagtattaaatactaattataaagaggcaatgctccatgcctggaattcttatgtgaagtatgcctagggaatggatgagcttcatgtgtatttagtcagtagtaattctgatctgcagttgtttttgcatttcctaagtgattctagatctaaaatgtcttctgtcttttgctttgttcgcctctattcccagccacaatcaaagaatggcatcaatagttttggtggtcttgaagcaacccttgttgacttacttgatataatgtatataatgggcttgaaagatggatttcagaaagctagaataagcagtgaaactgaagagaagcgacataccacaagtatactgagaagagacccaatgagagcc

SEQ ID NO: 56188 - DNA, 1376 bp, Zea Mays
atctcgcctgacacacaagcagccccatatatggcccggtctcctacccagacaacccgtccgtctctcgttctctccttcctatcggctccacacctccacgcaactggaagcttcgctgcaatctgccctactcctcttccgccgcctccaacaccgcagacgcagctgccgcgggcgggagcttggacgtgctacgctgctctcatctcgtttccgcgcaggaattgttctcaatggcccgcgtgtatgttggcaacttggattcacgggtgacttctggggaactcgaagatgagttccgcgtgtttggagttctgcgaagtgtttggattgcacgtaaaccacctggctttgcatttattgattttgacgacaggagggatgcggaggatgctattcgtgatctagatggtaagaatggatggagagttgaactatctcgtaattccagtggtcgtggtggtcgtgatcggtatggtggatctgagtcgaagtgctatgaatgtggtgagactgggcactttgcacgtgaatgtcgtctgcgcattggctctggaggtctaggcagtggaagacgtcgcagtcgcagccgcagtcgcagtcgcagtcgcagcaggagcaggagcagaagccgcagccctagataccgcaggagtccaagctatagtagaaggagctatagccctcgttatcgctctccaaggcgccgtagtccttcgccagctcgcgcgcgcagctatagcaggtcaccatagtacaactgcaacgagtaatggtggcaggtactggtgtagcaggagctaggcctgaagcccgtgcctgatacttcttggtgtgagaacttagtccttggtttggctgtcaggaacaaatttggaactgtcgtcaactgcatgacttcagttcaggtttaaaaccttatctagcttaattgtgattgccttgattatgccattatagaacttaatatttggatgtattatgcgactaagacatattacctttcttctctgttgaaaaggcatgttctgcttaaacgactcggccaactacggctctcagttagtcttcatggttttgttcctccattcttggcacgtccttatctgcaaacaaatgtcaacgttccattactagctgccttcgatgtttcatcatgaaattcttcaccgaagatgctacttcatcacaaattaccacaatcaaagaatggcatcaatagttttggtggtcttgaagcaacccttgttgacttacttgatataatgtatataatgggcttgaaagatggatttcagaaagctagaataagcagtgaaactgaagagaagcgacataccacaagtatactgagaagagacccaatgagagcc

SEQ ID NO: 56189 - DNA, 1522 bp, Zea Mays
atctcgcctgacacacaagcagccccatatatggcccggtctcctacccagacaacccgtccgtctctcgttctctccttcctatcggctccacacctccacgcaactggaagcttcgctgcaatctgccctactcctcttccgccgcctccaacaccgcagacgcagctgccgcgggcgggagcttggacgtgctacgctgctctcatctcgtttccgcgcaggaattgttctcaatggcccgcgtgtatgttggcaacttggattcacgggtgacttctggggaactcgaagatgagttccgcgtgtttggagttctgcgaagtgtttggattgcacgtaaaccacctggctttgcatttattgattttgacgacaggagggatgcggaggatgctattcgtgatctagatggtaagaatggatggagagttgaactatctcgtaattccagtggtcgtggtggtcgtgatcggtatggtggatctgagtcgaagtgctatgaatgtggtgagactgggcactttgcacgtgaatgtcgtctgcgcattggctctggaggtctaggcagtggaagacgtcgcagtcgcagccgcagtcgcagtcgcagtcgcagcaggagcaggagcagaagccgcagccctagataccgcaggagtccaagctatagtagaaggagctatagccctcgttatcgctctccaaggcgccgtagtccttcgccagctcgcgcgcgcagctatagcaggtcaccatagtacaactgcaacgagtaatggtggcaggtactggtgtagcaggagctaggcctgaagcccgtgcctgatacttcttggtgtgagaacttagtccttggtttggctgtcaggaacaaatttggaactgtcgtcaactgcatgacttcagttcaggtttaaaaccttatctagcttaattgtgattgccttgattatgccattatagaacttaatatttggatgtattatgcgactaagacatattacctttcttctctgttgaaaaggcatgttctgcttaaacgactcggccaactacggctctcagttagtcttcatggttttgttcctccattcttggcacgtccttatctgcaaacaaatgtcaacgttccattactagctgccttcgatgtttcatcatgaaattcttcaccgaagatgctacttcatcacaaattagtaacatcctttcccctcatatagttgataaggtttgagtgtactgagcactaacaaatgcagctcgcgaaagtaagaccgtttttcgtcatagaacaagacagctattttaattgcagcactcgtgtgaaaatagatctactctgcatggtggggattggggcgattgaagtgtggccttcagctgcacctagttgggcatcccaggaacctagtcaggctcactacagcaagaggcgcatcctttgactaaacatataagcagtgaaactgaagagaagcgacataccacaagtatactgagaagagacccaatgagagcc

SEQ ID NO: 56190 - DNA, 1731 bp, Zea Mays
tatctctattgctaatgggtaatggtggcaggtactggtgtagcaggagctaggcctgaagcccgtgcctgatacttcttggtgtgagaacttagtccttggtttggctgtcaggaacaaatttggaactgtcgtcaactgcatgacttcagttcaggcatgttctgcttaaacgactcggccaactacggctctcagttagtcttcatggttttgttcctccattcttggcacgtccttatctgcaaacaaatgtcaacgttccattactagctgccttcgatgtttcatcatgaaattcttcaccgaagatgctacttcatcacaaattagtaacatcctttcccctcatatagttgataaggtttgagtgtactgagcactaacaaatgcagctcgcgaaagtaagaccgtttttcgtcatagaacaagacagctattttaattgcagcactcgtgtgaaaatagatctactctgcatggtggggattggggcgattgaagtgtggccttcagctgcacctagttgggcatcccaggaacctagtcaggctcactacagcaagaggcgcatcctttgactaaacatgttggttttatttcttgtggtttgattcttcacttctgttcattgtgttctgccttcactgcaccctattggtagtggtcgaacaatgcttctgtctgtggtaagttattcttggtacaatggctcttctttaccccctgatcagtgtatgttggactttctgatagagttagcaccaattgtagtataaatatgttctttttttctctggaaggtaattgtaattctatctgaatactcagatttgaggtataatctgctcttgtcaaatgattttttaaagatcattctagtttcacctgtagctttcttccttttattacttactttaggcaatgctggactcccgcatgtttgcaatattgctttcttattgcttggcattcatgctgcgttttaaggtcacttactcatggaaagaagaatggttcctgttgctcttacattgcatttgcgttctgtagaggatgtggtgcaccagtgtaattagctcggttaatctggtgtggcttgagtaaatttatggaaattactttttgagccagatcctcgtccacttatttttgatgtgttttccttcgaaacatttgaggcaacactatattgtcgtcgtgtctgtttctgtctttggagtcgatgtgtcacgtatgtttgtttttctgtggtgtcttctatacggcgtgcgttctcggctacttctcttaggttgtggctactggctagctataggacggagtgccgtttgaaatagaagacggtgcgtcacatctgatgtttaaatgtcaattactagtattaaatactaattataaagaggcaatgctccatgcctggaattcttatgtgaagtatgcctagggaatggatgagcttcatgtgtatttagtcagtagtaattctgatctgcagttgtttttgcatttcctaagtgattctagatctaaaatgtcttctgtcttttgctttgttcgcctctattcccagccacaatcaaagaatggcatcaatagttttggtggtcttgaagcaacccttgttgacttacttgatataatgtatataatgggcttgaaagatggatttcagaaagctagagctattctcggcaacgacggttgtgcaaacagtttttaagtgcaagc

SEQ ID NO: 56191 - DNA, 1680 bp, Zea Mays
atctcgcctgacacacaagcagccccatatatggcccggtctcctacccagacaacccgtccgtctctcgttctctccttcctatcggctccacacctccacgcaactggaagcttcgctgcaatctgccctactcctcttccgccgcctccaacaccgcagacgcagctgccgcgggcgggagcttggacgtgctacgctgctctcatctcgtttccgcgcagttcaggaattgttctcaatggcccgcgtgtatgttggcaacttggattcacgggtgacttctggggaactcgaagatgagttccgcgtgtttggagttctgcgaagtgtttggattgcacgtaaaccacctggctttgcatttattgattttgacgacaggagggatgcggaggatgctattcgtgatctagatggtaagaatggatggagagttgaactatctcgtaattccagtggtcgtggtggtcgtgatcggtatggtggatctgagtcgaagtgctatgaatgtggtgagactgggcactttgcacgtgaatgtcgtctgcgcattggctctggaggtctaggcagtggaagacgtcgcagtcgcagccgcagtcgcagtcgcagtcgcagcaggagcaggagcagaagccgcagccctagataccgcaggagtccaagctatagtagaaggagctatagccctcgttatcgctctccaaggcgccgtagtccttcgccagctcgcgcgcgcagctatagcaggtcaccatagtacaactgcaacgagtaatggtggcaggtactggtgtagcaggagctaggcctgaagcccgtgcctgatacttcttggtgtgagaacttagtccttggtttggctgtcaggaacaaatttggaactgtcgtcaactgcatgacttcagttcaggcatgttctgcttaaacgactcggccaactacggctctcagttagtcttcatggttttgttcctccattcttggcacgtccttatctgcaaacaaatgtcaacgttccattactagctgccttcgatgtttcatcatgaaattcttcaccgaagatgctacttcatcacaaattagtaacatcctttcccctcatatagttgataaggtttgagtgtactgagcactaacaaatgcagctcgcgaaagtaagaccgtttttcgtcatagaacaagacagctattttaattgcagcactcgtgtgaaaatagatctactctgcatggtggggattggggcgattgaagtgtggccttcagctgcacctagttgggcatcccaggaacctagtcaggctcactacagcaagaggcgcatcctttgactaaacatgttggttttatttcttgtggtttgattcttcacttctgttcattgtgttctgccttcactgcaccctattggtagtggtcgaacaatgcttctgtctgtggtaagttattcttggtacaatggctcttctttaccccctgatcagtgtatgttggactttctgatagagttagcaccaattgtagtataaatatgttctttttttctctggaaggtaattgtaattctatctgaatactcagatttgaggtataatctgctcttgtcaaatgattttttaaagatcattctagtttcacctgtagctttcttccttttattacttactttag

SEQ ID NO: 56192 - DNA, 2151 bp, Zea Mays
cttctcacacaaagcttcccttccctctccccttccaacctgcacagcaactgcaagtacttggagagccaggactagtccactagtgctctttcttttgttgcgtcgccatccactccaccacaccaccacctgcccccgaccaccgaaaaaaggtccaagaattcgaggacacctcctcctcttcctcctccacgatggccatgccaagatccttccccaaatcgtagcctttgtttgttcccccaaaaggaaggatttcattccttcccgttccatcgttccgatttgccgtcaagcaaatgcgaagcgtctcccctgtgatcttctttcaccttggcgagctgtgcgactgactggttgatccaggctgtatatacatagggttaattaatgagcggcgccaattcttcgttgccgatgcctccgccgccgccgccaccggcgcccgctgcgtcggcgctcgacaacgtggaggccaagataagccccagcatcgtcttcgtcgtggccatcctggcgatcgtcttcttcgtctgcggcctgctgcacctgctggtgcgccacctgctgcggctgcggcgccggcgccgccgcgcgcgggaggacgcggacagcgtcacggcgttccagggccagctgcagcagctcttccacctgcacgacgccggcgtggaccaggccttcatcgacgcgctcccggtcttcctctaccgcaacgtcgtcggggccgcgccgggcggcaaggacccgttcgactgcgccgtgtgcctgtgcgagttcgcgcccgacgaccagctccgcctgctgcccaagtgcagccacgcgttccacctcgagtgcatcgacacgtggctgctgtcccactccacctgcccgctctgccgccggagcctcctcgccgacctctcgcccacgtgcagccccgtcgtgatggtgctcgagtccgagagcgcccgcgacatggccgcgtccgctgctcgggccaccgacgccgagcccagcgccgggcccggggccacgctgccgcgggaccaaggagcggacgaggtggtcgaggtgaagctggggaagttcatgtgcgtcgaaggcagcaccgccaacgccaacgccaaggcggcggacggagcaggcaccagcggcgacggcgacgtcgacgtcgacgccagtgccaaggaaggtctcggtctcgggcagagacggtgccactccatggggtcctacgagtacgtcatggacgaccacgcctcgctccgcgtggcgatcaagccgcccaagaagaagccgggagctgcggcagcgtgtcgtcgctggcggaggagaggccgtccttcgcgcggaggaccctgctctgggtcgtcggaggccggcagcagagccgagtcgggagctgttcgtgatcagcagcgcacggttgctcgaagattaaaaaaaagaaagcagagaaattcttttgtgctctttcggcagattggtagtagcgagtagcggttgcaatagctagagatttgcagaacccgaaagctctgaaaaattctttctttcttcctgcttcgtttgaaaacaagtggcaatggcgagcagcggtgaactggacaaatgacgaacatctgcaggtcctaaaccgcaactaacaacagcttctgaaacagctagtgggcgttgctgctcagagattcagaaaccaacagtctgaaacagcttctgaaagaggatcgcgatgggagtccgtgttgcctgctctgcgcgcatggagaaaggcggtttggttggatcgccgcctgccctgctggttcgctggctcgcgcctcgcggtgacgggcatgtgagcgctgcgtgctgcgcgcaccggccaccagtgcgccatggcgtgctcctttgtttgctcctgcttgtaattggaattctggcagggtggctttctccttttcagaagcggcaacgcgggcgtggagtcgagtttaggaaggtggcatgcatcttaacctgacctgtaaaggagggttcggctatcaacaaaagattctctcctctgctcctctgactgctctagtcgagtatatacattttgatacgcagggtcctggatttcttctcttttttttcctggatcaaataattcaaatgtagtgcaagtagaacacactggtg

SEQ ID NO: 56193 - DNA, 991 bp, Zea Mays
actccaactctattcatgtgcctagggaccaaccgagttgactcaggaggccaaatgaagaaagtttagtgcatgacatgcagttctaaggatccaaaaacacaaggctggggatagcttttgaagaactacactacagtgaccttatggtcatcttccatgttgttacagtgtgagatatcgggcctttgataatttcttttggccagtctgctttcaggaccaggcgggctgcagtaggtatctattctacataattattatttttcagttcattcttcaacgagtttgttgtctctggcatttacaattttctgaagcaatccagcatcgcacaagatcaaagcgctctgagaaggtaaagaaccattatctatcattcagccatgcatcgcttgacgaaggtaccggtttttttggcaaggatagtaagtactgatgcactttaggaatggaaaagatattatgctcacggttgctttcaaacttatatatgtcgacttcagaatttcacatacctacaaaagattagaaataaatatttaacatatgtgtgtacttcttaaaaaacactattgaaattaacaccatgtatttatttgtttattaattggaaccaactactgttacagatgaagataaggtgtacttttaataactgtttcaagcatgttaccgagacttaaacttagaaattcatataccctagggcaagctgatatgttcactcattgttttttttttgcaacgcgttatttttttcattgagactaatattttattgctttggtgcatatatatatatatactttaagtgtgtgcatatatatatacattgttgttatgtactccatccgtttctttttatttgtcgtcgagtagtttaaatttgtactaacggacgacatatattaaggaacggagggagtattgaccaaaggctcgcgcttgcgcgagtcagttactagttccaattataacccacgctacg

SEQ ID NO: 56194 - DNA, 1219 bp, Zea Mays
gtcagactaagctcgaccaaagcgactgtggtctgcgggtacggtcctccctggctccctccatccgcctctctccccgcgcgcacctttgccttggggttcagtgctcgcctcgcatatcgcctcactgccacccatgtcttggagaaagcacaattcacatcgtcgagctcctccggcactaagtagcatctctggatgaactgcggtcatactttcatgctcgtgccaccacagatcctatggcacccagggaccaaccgagttgactcaggaggccaaatgaagaaagtttagtgcatgacatgcagttctaaggatccaaaaacacaaggctggggatagcttttgaagaactacactacagtgaccttatggtcatcttccatgttgttacagtgtgagatatcgggcctttgataatttcttttggccagtctgctttcaggaccaggcgggctgcagtaggtatctattctacataattattatttttcagttcattcttcaacgagtttgttgtctctggcatttacaattttctgaagcaatccagcatcgcacaagatcaaagcgctctgagaaggtaaagaaccattatctatcattcagccatgcatcgcttgacgaaggtaccggtttttttggcaaggatagtaagtactgatgcactttaggaatggaaaagatattatgctcacggttgctttcaaacttatatatgtcgacttcagaatttcacatacctacaaaagattagaaataaatatttaacatatgtgtgtacttcttaaaaaacactattgaaattaacaccatgtatttatttgtttattaattggaaccaactactgttacagatgaagataaggtgtacttttaataactgtttcaagcatgttaccgagacttaaacttagaaattcatataccctagggcaagctgatatgttcactcattgttttttttttgcaacgcgttatttttttcattgagactaatattttattgctttggtgcatatatatatatatactttaagtgtgtgcatatatatatacattgttgttatgtactccatccgtttctttttatttgtcgtcgagtagtttaaatttgtactaacggacgacatatattaaggaacggagggagtattgaccaaaggctcgcgcttgcgcgagtcagttactagttccaattataacccacgctacg

SEQ ID NO: 56195 - DNA, 1004 bp, Zea Mays
gtcagactaagctcgaccaaagcgactgtggtctgcggggaccaaccgagttgactcaggaggccaaatgaagaaagtttagtgcatgacatgcagttctaaggatccaaaaacacaaggctggggatagcttttgaagaactacactacagtgaccttatggtcatcttccatgttgttacagtgtgagatatcgggcctttgataatttcttttggccagtctgctttcaggaccaggcgggctgcagtaggtatctattctacataattattatttttcagttcattcttcaacgagtttgttgtctctggcatttacaattttctgaagcaatccagcatcgcacaagatcaaagcgctctgagaaggtaaagaaccattatctatcattcagccatgcatcgcttgacgaaggtaccggtttttttggcaaggatagtaagtactgatgcactttaggaatggaaaagatattatgctcacggttgctttcaaacttatatatgtcgacttcagaatttcacatacctacaaaagattagaaataaatatttaacatatgtgtgtacttcttaaaaaacactattgaaattaacaccatgtatttatttgtttattaattggaaccaactactgttacagatgaagataaggtgtacttttaataactgtttcaagcatgttaccgagacttaaacttagaaattcatataccctagggcaagctgatatgttcactcattgttttttttttgcaacgcgttatttttttcattgagactaatattttattgctttggtgcatatatatatatatactttaagtgtgtgcatatatatatacattgttgttatgtactccatccgtttctttttatttgtcgtcgagtagtttaaatttgtactaacggacgacatatattaaggaacggagggagtattgaccaaaggctcgcgcttgcgcgagtcagttactagttccaattataacccacgctacg

SEQ ID NO: 56196 - DNA, 1854 bp, Zea Mays
aaaaggtcttgggggattcaacattgtggaaatgctatttggcacaaacctacttgccattgtcggaaccggtgaacagcctgcaatgtctcctcgtcgtttgtgcctgttcaataccaaaacaggagcatcaaagagagatctgaactttaagacttcaattttggctgttcggttaagtaggaagaggcttgttgttgtattgcaggataggacttttgtttatgatctaaatagcactactatattggacgaaattgaaacggtacccaatacaaaaggtctatgcgcatttgctcctaattctgaagagtgttatttggctctcccagcaagcacatccaaaggatctgctttagtatacaaagcatcaaaaccggaattaatatgccagatagatgctcatctggctccgttagctgcaatggttttttctttgaacggcatgtacctggcaacggcttctgaaaagggtaccatgattagggtgcatcttgttgcacaagcaaccaagtcacatagctttcggcgaggaacatacccatcgacaatctattcactggcatttagtccctctgttgatctgcctgacgttcttgttgccacaagttcatcaggatctttgcacatgtttttccttgatgcttccaggaacgcaaggagacaagcaaatacattgttcagctcagtgattcctggatctgtaactgatgctttggatccagctaatcatcatgttattcacaatgttgtcactgcagacatcaagagttgtctagcagtacacagtgttgaaaattcccaaaattcttccaaatttccctcgctgaagactgttatttacattgtaacacacaatggatacttccgagagtatctgatcggcacaaccaagtcaaatgaatcttcatggttgttggagcgtgaatttaatctcctggatgcttattcgggtagtcccaagcagaacgagctgcacatagactgacttgtaatgctcgctcctctgaccggaacctgagcatctccaacagaagttctatatttgagtccttaaaattaaaatatgacctgatttaaagtgtttagggctataaaactgtttgtaactccaacaattgagttctatatcatattattaggaaataaatcatgttatttaggaaataaaagattaaaaatagtgtagaaaatgaagatatggctctagtagatggggtactatatttaagacccgggagactgagccctataactgtttgatgagtttttataaaataggacccctgttggagtatgttggagtatgtttctggtgttagggtcctatatttcaaaataggatcctatttaggactcttgttggagatgctctataggtgattatatcttgggccttgacttaaccggtcattgggactaacttcaactgtacatagtatagaggtgttcatcactggtgggaatctacatgttgcggctcgtggcgcgtgtaaattatcatacaagtggacagcaagtttggtgcaatgcataaaaagctttcctaattttgagtacgtttcactttgagccagttaccccacccacccagaaaaaaacacccttcatcacttttgatcattttgatcactttgaacaagtgtgtaattgttttaccgttgtaacaaaaacaagtcttgtcttcttgctaattacgcttcatcagattgtctttagtgaggactcccttccataggtaccacaagaagattttatttttgagggtacttttaactttttaactttcataaccgttttttatatttgggatccgtgtccttatcatggtttcatatagagatttcaccaaga

SEQ ID NO: 56197 - DNA, 2671 bp, Zea Mays
acgattccatacaggacctcacctccctactcgcgtagtcatcgtcgtcgtcgtcctcgtcctcccgacgtctggtggtatcggacttgcgtggcgtggaggtccttccgaacttgggatcgatttgcttgtcagcgccgaaccctagctttgcttcgacggcacccacctacggtacgcccgcggccccaagcagtcaggcgacaccgaataatttggttacagagacgagcgggtgcgccggcgagagggcccgattctcaccgcgccggcgatggcgagcagctcgtctccgtcacaggtcatctgcgcctccttcaatcaggacaacagcatgttttctgtcgggaccaaggatgggttcaagatctttgacgctcgtaatgggaggctctgctacgaaaagagtcttgggggattcaacattgtggaaatgctatttggcacaaacctacttgccattgtcggaaccggtgaacagcctgcaatgtctcctcgtcgtttgtgcctgttcaataccaaaacaggagcatcaaagagagatctgaactttaagacttcaattttggctgttcggttaagtaggaagaggttagctactacttcaatatatttagggaacatatcaggtgcatatgagcctttggtgcacatattatccacgactatcaatcttagatctaacgtttttccacacctcctttgttgtcctatatattttgcaaagaacatcctccatcacttcccctctactccgtgcacgaaggggtatgtgtgggaggacgttggatctaaaatggatggtcacgatttaatatgtgcatcaggtgcatcaaaatcacatgtgcacttgatatgtcagtttctgttgtggcttatacttatgttttgttaattgatgcatgcaatctagtcccagtcaggatccacaaatattgtgctgtagtgctcactttagttgatgtgttgatgtgttcttttgaatagagtagtaaccacattatgtgcaggcttgttgttgtattgcaggataggacttttgtttatgatctaaatagcactactatattggacgaaattgaaacggtacccaatacaaaaggtctatgcgcatttgctcctaattctgaagagtgttatttggctctcccagcaagcacatccaaaggatctgctttagtatacaaagcatcaaaaccggaattaatatgccagatgctcatctggctccgttagctgcaatggttttttctttgaacggcatgtacctggcaacggcttctgaaaagggtaccatgattagggtgcatcttgttgcacaagcaaccaagtcacatagctttcggcgaggaacatacccatcgacaatctattcactggcatttagtccctctgttgatctgcctgacgttcttgttgccacaagttcatcaggatctttgcacatgtttttccttgatgcttccaggaacgcaaggagacaagcaaatacattgttcagctcagtgattcctggatctgtaactgatgctttggatccagctaatcatcatgttattcacaatgttgtcactgcagacatcaagagttgtctagcagtacacagtgttgaaaattcccaaaattcttccaaatttccctcgctgaagactgttatttacattgtaacacacaatggatacttccgagagtatctgatcggcacaaccaagtcaaatgaatcttcatggttgttggagcgtgaatttaatctcctggatgcttattcgggtagtcccaagcagaacgagctgcacatagactgacttgtaatgctcgctcctctgaccggaacctgagcatctccaacagaagttctatatttgagtccttaaaattaaaatatgacctgatttaaagtgtttagggctataaaactgtttgtaactccaacaattgagttctatatcatattattaggaaataaatcatgttatttaggaaataaaagattaaaaatagtgtagaaaatgaagatatggctctagtagatggggtactatatttaagacccgggagactgagccctataactgtttgatgagtttttataaaataggacccctgttggagtatgttggagtatgtttctggtgttagggtcctatatttcaaaataggatcctatttaggactcttgttggagatgctctataggtgattatatcttgggccttgacttaaccggtcattgggactaacttcaactgtacatagtatagaggtgttcatcactggtgggaatctacatgttgcggctcgtggcgcgtgtaaattatcatacaagtggacagcaagtttggtgcaatgcataaaaagctttcctaattttgagtacgtttcactttgagccagttaccccacccacccagaaaaaaacacccttcatcacttttgatcattttgatcactttgaacaagtgtgtaattgttttaccgttgtaacaaaaacaagtcttgtcttcttgctaattacgcttcatcagattgtctttagtgaggactcccttccataggtaccacaagaagattttatttttgagggtacttttaactttttaactttcataaccgttttttatatttgggatccgtgtccttatcatggtttcatatagagatttcaccaaga

SEQ ID NO: 56198 - DNA, 2246 bp, Zea Mays
gtcatgtcaagtccaacaatccattgccgtcttttttgccccggcccccgggaaataaacgaacacgattccatacaggacctcacctccctactcgcgtagtcatcgtcgtcgtcgtcctcgtcctcccgacgtctggtggtatcggacttgcgtggcgtggaggtccttccgaacttgggatcgatttgcttgtcagcgccgaaccctagctttgcttcgacggcacccacctacggtacgcccgcggccccaagcagtcaggcgacaccgaataatttggttacagagacgagcgggtgcgccggcgagagggcccgattctcaccgcgccggcgatggcgagcagctcgtctccgtcacaggtcatctgcgcctccttcaatcaggacaacaggtcttgggggattcaacattgtggaaatgctatttggcacaaacctacttgccattgtcggaaccggtgaacagcctgcaatgtctcctcgtcgtttgtgcctgttcaataccaaaacaggagcatcaaagagagatctgaactttaagacttcaattttggctgttcggttaagtaggaagaggcttgttgttgtattgcaggataggacttttgtttatgatctaaatagcactactatattggacgaaattgaaacggtacccaatacaaaaggtctatgcgcatttgctcctaattctgaagagtgttatttggctctcccagcaagcacatccaaaggatctgctttagtatacaaagcatcaaaaccggaattaatatgccagatagatgctcatctggctccgttagctgcaatggttttttctttgaacggcatgtacctggcaacggcttctgaaaagggtaccatgattagggtgcatcttgttgcacaagcaaccaagtcacatagctttcggcgaggaacatacccatcgacaatctattcactggcatttagtccctctgttgatctgcctgacgttcttgttgccacaagttcatcaggatctttgcacatgtttttccttgatgcttccaggaacgcaaggagacaagcaaatacattgttcagctcagtgattcctggatctgtaactgatgctttggatccagctaatcatcatgttattcacaatgttgtcactgcagacatcaagagttgtctagcagtacacagtgttgaaaattcccaaaattcttccaaatttccctcgctgaagactgttatttacattgtaacacacaatggatacttccgagagtatctgatcggcacaaccaagtcaaatgaatcttcatggttgttggagcgtgaatttaatctcctggatgcttattcgggtagtcccaagcagaacgagctgcacatagactgacttgtaatgctcgctcctctgaccggaacctgagcatctccaacagaagttctatatttgagtccttaaaattaaaatatgacctgatttaaagtgtttagggctataaaactgtttgtaactccaacaattgagttctatatcatattattaggaaataaatcatgttatttaggaaataaaagattaaaaatagtgtagaaaatgaagatatggctctagtagatggggtactatatttaagacccgggagactgagccctataactgtttgatgagtttttataaaataggacccctgttggagtatgttggagtatgtttctggtgttagggtcctatatttcaaaataggatcctatttaggactcttgttggagatgctctataggtgattatatcttgggccttgacttaaccggtcattgggactaacttcaactgtacatagtatagaggtgttcatcactggtgggaatctacatgttgcggctcgtggcgcgtgtaaattatcatacaagtggacagcaagtttggtgcaatgcataaaaagctttcctaattttgagtacgtttcactttgagccagttaccccacccacccagaaaaaaacacccttcatcacttttgatcattttgatcactttgaacaagtgtgtaattgttttaccgttgtaacaaaaacaagtcttgtcttcttgctaattacgcttcatcagattgtctttagtgaggactcccttccataggtaccacaagaagattttatttttgagggtacttttaactttttaactttcataaccgttttttatatttgggatccgtgtccttatcatggtttcatatagagatttcaccaaga

SEQ ID NO: 56199 - DNA, 2794 bp, Zea Mays
cgctggcccaaaagccaggccgggttggacccacgcacatgtcatgtcaagtccaacaatccattgccgtcttttttgccccggcccccgggaaataaacgaacacgattccatacaggacctcacctccctactcgcgtagtcatcgtcgtcgtcgtcctcgtcctcccgacgtctggtggtatcggacttgcgtggcgtggaggtccttccgaacttgggatcgatttgcttgtcagcgccgaaccctagctttgcttcgacggcacccacctacggtacgcccgcggccccaagcagtcaggcgacaccgaataatttggttacagagacgagcgggtgcgccggcgagagggcccgattctcaccgcgccggcgatggcgagcagctcgtctccgtcacaggtcatctgcgcctccttcaatcaggacaacagcatgttttctgtcgggaccaaggatgggttcaagatctttgacgctcgtaatgggaggctctgctacgaaaagagtcttgggggattcaacattgtggaaatgctatttggcacaaacctacttgccattgtcggaaccggtgaacagcctgcaatgtctcctcgtcgtttgtgcctgttcaataccaaaacaggagcatcaaagagagatctgaactttaagacttcaattttggctgttcggttaagtaggaagaggttagctactacttcaatatatttagggaacatatcaggtgcatatgagcctttggtgcacatattatccacgactatcaatcttagatctaacgtttttccacacctcctttgttgtcctatatattttgcaaagaacatcctccatcacttcccctctactccgtgcacgaaggggtatgtgtgggaggacgttggatctaaaatggatggtcacgatttaatatgtgcatcaggtgcatcaaaatcacatgtgcacttgatatgtcagtttctgttgtggcttatacttatgttttgttaattgatgcatgcaatctagtcccagtcaggatccacaaatattgtgctgtagtgctcactttagttgatgtgttgatgtgttcttttgaatagagtagtaaccacattatgtgcaggcttgttgttgtattgcaggataggacttttgtttatgatctaaatagcactactatattggacgaaattgaaacggtacccaatacaaaaggtctatgcgcatttgctcctaattctgaagagtgttatttggctctcccagcaagcacatccaaaggatctgctttagtatacaaagcatcaaaaccggaattaatatgccagatagatgctcatctggctccgttagctgcaatggttttttctttgaacggcatgtacctggcaacggcttctgaaaagggtaccatgattagggtgcatcttgttgcacaagcaaccaagtcacatagctttcggcgaggaacatacccatcgacaatctattcactggcatttagtccctctgttgatctgcctgacgttcttgttgccacaagttcatcaggatctttgcacatgtttttccttgatgcttccaggaacgcaaggagacaagcaaatacattgttcagctcagtgattcctggatctgtaactgatgctttggatccagctaatcatcatgttattcacaatgttgtcactgcagacatcaagaggtccattcattattgttgtctagcagtacacagtgttgaaaattcccaaaattcttccaaatttccctcgctgaagactgttatttacattgtaacacacaatggatacttccgagagtatctgatcggcacaaccaagtcaaatgaatcttcatggttgttggagcgtgaatttaatctcctggatgcttattcgggtagtcccaagcagaacgagctgcacatagactgacttgtaatgctcgctcctctgaccggaacctgagcatctccaacagaagttctatatttgagtccttaaaattaaaatatgacctgatttaaagtgtttagggctataaaactgtttgtaactccaacaattgagttctatatcatattattaggaaataaatcatgttatttaggaaataaaagattaaaaatagtgtagaaaatgaagatatggctctagtagatggggtactatatttaagacccgggagactgagccctataactgtttgatgagtttttataaaataggacccctgttggagtatgttggagtatgtttctggtgttagggtcctatatttcaaaataggatcctatttaggactcttgttggagatgctctataggtgattatatcttgggccttgacttaaccggtcattgggactaacttcaactgtacatagtatagaggtgttcatcactggtgggaatctacatgttgcggctcgtggcgcgtgtaaattatcatacaagtggacagcaagtttggtgcaatgcataaaaagctttcctaattttgagtacgtttcactttgagccagttaccccacccacccagaaaaaaacacccttcatcacttttgatcattttgatcactttgaacaagtgtgtaattgttttaccgttgtaacaaaaacaagtcttgtcttcttgctaattacgcttcatcagattgtctttagtgaggactcccttccataggtaccacaagaagattttatttttgagggtacttttaactttttaactttcataaccgttttttatatttgggatccgtgtccttatcatggtttcatatagagatttcaccaaga

SEQ ID NO: 56200 - DNA, 2568 bp, Zea Mays
ctgaatttggatattggatacggtgacaatttaaggaggtaaaatttactatctttgtttccttattcataaccactggttccgtgggcctgcaactgtgctttttaaaattttgggcctcactatgtcgggccgcgctggcccaaaagccaggccgggttggacccacgcacatgtcatgtcaagtccaacaatccattgccgtcttttttgccccggcccccgggaaataaacgaacacgattccatacaggacctcacctccctactcgcgtagtcatcgtcgtcgtcgtcctcgtcctcccgacgtctggtggtatcggacttgcgtggcgtggaggtccttccgaacttgggatcgatttgcttgtcagcgccgaaccctagctttgcttcgacggcacccacctacggtacgcccgcggccccaagcagtcaggcgacaccgaataatttggttacagagacgagcgggtgcgccggcgagagggcccgattctcaccgcgccggcgatggcgagcagctcgtctccgtcacaggtcatctgcgcctccttcaatcaggacaacagcatgttttctgtcgggaccaaggatgggttcaagatctttgacgctcgtaatgggaggctctgctacgaaaagagtcttgggggattcaacattgtggaaatgctatttggcacaaacctacttgccattgtcggaaccggtgaacagcctgcaatgtctcctcgtcgtttgtgcctgttcaataccaaaacaggagcatcaaagagagatctgaactttaagacttcaattttggctgttcggttaagtaggaagaggttagctactacttcaatatatttagggaacatatcaggtgcatatgagcctttggtgcacatattatccacgactatcaatcttagatctaacgtttttccacacctcctttgttgtcctatatattttgcaaagaacatcctccatcacttcccctctactccgtgcacgaaggggtatgtgtgggaggacgttggatctaaaatggatggtcacgatttaatatgtgcatcaggtgcatcaaaatcacatgtgcacttgatatgtcagtttctgttgtggcttatacttatgttttgttaattgatgcatgcaatctagtcccagtcaggatccacaaatattgtgctgtagtgctcactttagttgatgtgttgatgtgttcttttgaatagagtagtaaccacattatgtgcaggcttgttgttgtattgcaggataggacttttgtttatgatctaaatagcactactatattggacgaaattgaaacggtacccaatacaaaaggtctatgcgcatttgctcctaattctgaagagtgttatttggctctcccagcaagcacatccaaaggatctgctttagtatacaaagcatcaaaaccggaattaatatgccagatagatgctcatctggctccgttagctgcaatggttttttctttgaacggcatgtacctggcaacggcttctgaaaagggtaccatgattagggtgcatcttgttgcacaagcaaccaagtcacatagctttcggcgaggaacatacccatcgacaatctattcactggcatttagtccctctgttgatctgcctgacgttcttgttgccacaagttcatcaggatctttgcacatgtttttccttgatgcttccaggaacgcaaggagacaagcaaatacattgttcagctcagtgattcctggatctgtaactgatgctttggatccagctaatcatcatgttattcacaatgttgtcactgcagacatcaagagttgtctagcagtacacagtgttgaaaattcccaaaattcttccaaatttccctcgctgaagtaagaacagcaaaaccgtcatctgttcatgagttttttccttttccttttgttgtggaaacaccaactgctgtacatgtctaaattatccatgcaatgttttacaggactgttatttacattgtaacacacaatggatacttccgagagtatctgatcggcacaaccaagtcaaatgaatcttcatggttgttggagcgtgaatttaatctcctggatgcttattcgggtagtcccaagcagaacgagctgcacatagactgacttaggtgttcatcactggtgggaatctacatgttgcggctcgtggcgcgtgtaaattatcatacaagtggacagcaagtttggtgcaatgcataaaaagctttcctaattttgagtacgtttcactttgagccagttaccccacccacccagaaaaaaacacccttcatcacttttgatcattttgatcactttgaacaagtgtgtaattgttttaccgttgtaacaaaaacaagtcttgtcttcttgctaattacgcttcatcagattgtctttagtgaggactcccttccataggtaccacaagaagattttatttttgagggtacttttaactttttaactttcataaccgttttttatatttgggatccgtgtccttatcatggtttcatatagagatttcaccaaga

SEQ ID NO: 56201 - DNA, 3134 bp, Zea Mays
agcatttagtcttattatactttctccaaggaaatgcatgtaaccttttagctgcatggaaatgcatgtaaacattttttttcttgttcttatccgatcacatgcatggaaatgcatgtaaccttttatctgcgatacgatacacgagggagaggaacagagcgcatgacagacgatagatgaaaagagcataaattggtgctttataggaatagagtacctgaatttggatattggatacggtgacaatttaaggaggtaaaatttactatctttgtttccttattcataaccactggttccgtgggcctgcaactgtgctttttaaaattttgggcctcactatgtcgggccgcgctggcccaaaagccaggccgggttggacccacgcacatgtcatgtcaagtccaacaatccattgccgtcttttttgccccggcccccgggaaataaacgaacacgattccatacaggacctcacctccctactcgcgtagtcatcgtcgtcgtcgtcctcgtcctcccgacgtctggtggtatcggacttgcgtggcgtggaggtccttccgaacttgggatcgatttgcttgtcagcgccgaaccctagctttgcttcgacggcacccacctacggtacgcccgcggccccaagcagtcaggcgacaccgaataatttggttacagagacgagcgggtgcgccggcgagagggcccgattctcaccgcgccggcgatggcgagcagctcgtctccgtcacaggtcatctgcgcctccttcaatcaggacaacagcatgttttctgtcgggaccaaggatgggttcaagatctttgacgctcgtaatgggaggctctgctacgaaaagagtcttgggggattcaacattgtggaaatgctatttggcacaaacctacttgccattgtcggaaccggtgaacagcctgcaatgtctcctcgtcgtttgtgcctgttcaataccaaaacaggagcatcaaagagagatctgaactttaagacttcaattttggctgttcggttaagtaggaagaggttagctactacttcaatatatttagggaacatatcaggtgcatatgagcctttggtgcacatattatccacgactatcaatcttagatctaacgtttttccacacctcctttgttgtcctatatattttgcaaagaacatcctccatcacttcccctctactccgtgcacgaaggggtatgtgtgggaggacgttggatctaaaatggatggtcacgatttaatatgtgcatcaggtgcatcaaaatcacatgtgcacttgatatgtcagtttctgttgtggcttatacttatgttttgttaattgatgcatgcaatctagtcccagtcaggatccacaaatattgtgctgtagtgctcactttagttgatgtgttgatgtgttcttttgaatagagtagtaaccacattatgtgcaggcttgttgttgtattgcaggataggacttttgtttatgatctaaatagcactactatattggacgaaattgaaacggtacccaatacaaaaggtctatgcgcatttgctcctaattctgaagagtgttatttggctctcccagcaagcacatccaaaggatctgctttagtatacaaagcatcaaaaccggaattaatatgccagatagatgctcatctggctccgttagctgcaatggttttttctttgaacggcatgtacctggcaacggcttctgaaaagggtaccatgattagggtgcatcttgttgcacaagcaaccaagtcacatagctttcggcgaggaacatacccatcgacaatctattcactggcatttagtccctctgttgatctgcctgacgttcttgttgccacaagttcatcaggatctttgcacatgtttttccttgatgcttccaggaacgcaaggagacaagcaaatacattgttcagctcagtgattcctggatctgtaactgatgctttggatccagctaatcatcatgttattcacaatgttgtcactgcagacatcaagagttgtctagcagtacacagtgttgaaaattcccaaaattcttccaaatttccctcgctgaagactgttatttacattgtaacacacaatggatacttccgagagtatctgatcggcacaaccaagtcaaatgaatcttcatggttgttggagcgtgaatttaatctcctggatgcttattcgggtagtcccaagcagaacgagctgcacatagactgacttgtaatgctcgctcctctgaccggaacctgagcatctccaacagaagttctatatttgagtccttaaaattaaaatatgacctgatttaaagtgtttagggctataaaactgtttgtaactccaacaattgagttctatatcatattattaggaaataaatcatgttatttaggaaataaaagattaaaaatagtgtagaaaatgaagatatggctctagtagatggggtactatatttaagacccgggagactgagccctataactgtttgatgagtttttataaaataggacccctgttggagtatgttggagtatgtttctggtgttagggtcctatatttcaaaataggatcctatttaggactcttgttggagatgctctataggtgattatatcttgggccttgacttaaccggtcattgggactaacttcaactgtacatagtatagaggtgttcatcactggtgggaatctacatgttgcggctcgtggcgcgtgtaaattatcatacaagtggacagcaagtttggtgcaatgcataaaaagctttcctaattttgagtacgtttcactttgagccagttaccccacccacccagaaaaaaacacccttcatcacttttgatcattttgatcactttgaacaagtgtgtaattgttttaccgttgtaacaaaaacaagtcttgtcttcttgctaattacgcttcatcagattgtctttagtgaggactcccttccataggtaccacaagaagattttatttttgagggtacttttaactttttaactttcataaccgttttttatatttgggatccgtgtccttatcatggtttcatatagagatttcaccaaga

SEQ ID NO: 56202 - DNA, 2696 bp, Zea Mays
agcatttagtcttattatactttctccaaggaaatgcatgtaaccttttagctgcatggaaatgcatgtaaacattttttttcttgttcttatccgatcacatgcatggaaatgcatgtaaccttttatctgcgatacgatacacgagggagaggaacagagcgcatgacagacgatagatgaaaagagcataaattggtgctttataggaatagagtacctgaatttggatattggatacggtgacaatttaaggaggtaaaatttactatctttgtttccttattcataaccactggttccgtgggcctgcaactgtgctttttaaaattttgggcctcactatgtcgggccgcgctggcccaaaagccaggccgggttggacccacgcacatgtcatgtcaagtccaacaatccattgccgtcttttttgccccggcccccgggaaataaacgaacacgattccatacaggacctcacctccctactcgcgtagtcatcgtcgtcgtcgtcctcgtcctcccgacgtctggtggtatcggacttgcgtggcgtggaggtccttccgaacttgggatcgatttgcttgtcagcgccgaaccctagctttgcttcgacggcacccacctacggtacgcccgcggccccaagcagtcaggcgacaccgaataatttggttacagagacgagcgggtgcgccggcgagagggcccgattctcaccgcgccggcgatggcgagcagctcgtctccgtcacaggtcatctgcgcctccttcaatcaggacaacagcatgttttctgtcgggaccaaggatgggttcaagatctttgacgctcgtaatgggaggctctgctacgaaaagagtcttgggggattcaacattgtggaaatgctatttggcacaaacctacttgccattgtcggaaccggtgaacagcctgcaatgtctcctcgtcgtttgtgcctgttcaataccaaaacaggagcatcaaagagagatctgaactttaagacttcaattttggctgttcggttaagtaggaagaggataggacttttgtttatgatctaaatagcactactatattggacgaaattgaaacggtacccaatacaaaaggtctatgcgcatttgctcctaattctgaagagtgttatttggctctcccagcaagcacatccaaaggatctgctttagtatacaaagcatcaaaaccggaattaatatgccagatagatgctcatctggctccgttagctgcaatggttttttctttgaacggcatgtacctggcaacggcttctgaaaagggtaccatgattagggtgcatcttgttgcacaagcaaccaagtcacatagctttcggcgaggaacatacccatcgacaatctattcactggcatttagtccctctgttgatctgcctgacgttcttgttgccacaagttcatcaggatctttgcacatgtttttccttgatgcttccaggaacgcaaggagacaagcaaatacattgttcagctcagtgattcctggatctgtaactgatgctttggatccagctaatcatcatgttattcacaatgttgtcactgcagacatcaagagttgtctagcagtacacagtgttgaaaattcccaaaattcttccaaatttccctcgctgaagactgttatttacattgtaacacacaatggatacttccgagagtatctgatcggcacaaccaagtcaaatgaatcttcatggttgttggagcgtgaatttaatctcctggatgcttattcgggtagtcccaagcagaacgagctgcacatagactgacttgtaatgctcgctcctctgaccggaacctgagcatctccaacagaagttctatatttgagtccttaaaattaaaatatgacctgatttaaagtgtttagggctataaaactgtttgtaactccaacaattgagttctatatcatattattaggaaataaatcatgttatttaggaaataaaagattaaaaatagtgtagaaaatgaagatatggctctagtagatggggtactatatttaagacccgggagactgagccctataactgtttgatgagtttttataaaataggacccctgttggagtatgttggagtatgtttctggtgttagggtcctatatttcaaaataggatcctatttaggactcttgttggagatgctctataggtgattatatcttgggccttgacttaaccggtcattgggactaacttcaactgtacatagtatagaggtgttcatcactggtgggaatctacatgttgcggctcgtggcgcgtgtaaattatcatacaagtggacagcaagtttggtgcaatgcataaaaagctttcctaattttgagtacgtttcactttgagccagttaccccacccacccagaaaaaaacacccttcatcacttttgatcattttgatcactttgaacaagtgtgtaattgttttaccgttgtaacaaaaacaagtcttgtcttcttgctaattacgcttcatcagattgtctttagtgaggactcccttccataggtaccacaagaagattttatttttgagggtacttttaactttttaactttcataaccgttttttatatttgggatccgtgtccttatcatggtttcatatagagatttcaccaaga

SEQ ID NO: 56203 - DNA, 2238 bp, Zea Mays
gtgctgcggtaagcgactccatcgagcagcagccgggtaaagcaaaagcgagcaggcaggcgagcttttgaacagtgcagagagcacatgcacagacagacaggcgggcagagggaggatcagagaaaacgacaggcggcttgtggcgcggcgcagtaaacaaatccacgcgggcaacgtttagattgcaggatgctgccgaactttttagagcctgcctgcctgatgcaatgcgatgcaatgcaaggactggacggccggcatgcacgcaccgctttagaccgagaggagatggtacgcgtgccggagccaggaggcgggagacgaggcgaggtgcgtgagggaggacgacgcagcgaggaagtgggagcagctagctgcagcagtgggtcttgggggattcaacattgtggaaatgctatttggcacaaacctacttgccattgtcggaaccggtgaacagcctgcaatgtctcctcgtcgtttgtgcctgttcaataccaaaacaggagcatcaaagagagatctgaactttaagacttcaattttggctgttcggttaagtaggaagaggcttgttgttgtattgcaggataggacttttgtttatgatctaaatagcactactatattggacgaaattgaaacggtacccaatacaaaaggtctatgcgcatttgctcctaattctgaagagtgttatttggctctcccagcaagcacatccaaaggatctgctttagtatacaaagcatcaaaaccggaattaatatgccagatagatgctcatctggctccgttagctgcaatggttttttctttgaacggcatgtacctggcaacggcttctgaaaagggtaccatgattagggtgcatcttgttgcacaagcaaccaagtcacatagctttcggcgaggaacatacccatcgacaatctattcactggcatttagtccctctgttgatctgcctgacgttcttgttgccacaagttcatcaggatctttgcacatgtttttccttgatgcttccaggaacgcaaggagacaagcaaatacattgttcagctcagtgattcctggatctgtaactgatgctttggatccagctaatcatcatgttattcacaatgttgtcactgcagacatcaagagttgtctagcagtacacagtgttgaaaattcccaaaattcttccaaatttccctcgctgaagactgttatttacattgtaacacacaatggatacttccgagagtatctgatcggcacaaccaagtcaaatgaatcttcatggttgttggagcgtgaatttaatctcctggatgcttattcgggtagtcccaagcagaacgagctgcacatagactgacttgtaatgctcgctcctctgaccggaacctgagcatctccaacagaagttctatatttgagtccttaaaattaaaatatgacctgatttaaagtgtttagggctataaaactgtttgtaactccaacaattgagttctatatcatattattaggaaataaatcatgttatttaggaaataaaagattaaaaatagtgtagaaaatgaagatatggctctagtagatggggtactatatttaagacccgggagactgagccctataactgtttgatgagtttttataaaataggacccctgttggagtatgttggagtatgtttctggtgttagggtcctatatttcaaaataggatcctatttaggactcttgttggagatgctctataggtgattatatcttgggccttgacttaaccggtcattgggactaacttcaactgtacatagtatagaggtgttcatcactggtgggaatctacatgttgcggctcgtggcgcgtgtaaattatcatacaagtggacagcaagtttggtgcaatgcataaaaagctttcctaattttgagtacgtttcactttgagccagttaccccacccacccagaaaaaaacacccttcatcacttttgatcattttgatcactttgaacaagtgtgtaattgttttaccgttgtaacaaaaacaagtcttgtcttcttgctaattacgcttcatcagattgtctttagtgaggactcccttccataggtaccacaagaagattttatttttgagggtacttttaactttttaactttcataaccgttttttatatttgggatccgtgtccttatcatggtttcatatagagatttcaccaaga

SEQ ID NO: 56204 - DNA, 1816 bp, Zea Mays
cccaaccaactccaccggcacgccgtccgcccctttccgtccgcccgtctcgtgcgtgcaaatccacctccaccccctccttccggctttccccatcttctctttctccgtcccctcccaacacgcgttccccaaattctcccaccctactagaaatccccatatccgcggcggcgccgtccatcggattcgatcctcctagcgagtcgactccatctgatcggcggagccggggcaccagccaccatgtgggcggcatcgtgcctggcgtcgtgctgcgcggcgtgcgcgtgcgaggcgtgccggacggcggtcggcagcatcggccgccgctccgcccgcatcgcctactgcggcctcttcgcgctctccctcttcgcatcctgggcgctccgcgaggtcgccgcgcccctcctccagtcgatcccatggattaaccacttccacaagacccccgaccgcgagtggttcgagaccgacgcggtgctcagggtcagcctcggcaacttcctcttcttcaccatcctcgccgtcatcatggccgggataaaggaccagaaggacccccgtgacaagatccaccacggcggatggatggccaagatcttctgctgggtcatcatcgtcttcctcatgttcttcgtgcccaacggggtcgtcagcttctatgaatctatatccaagtttggctctgggctgttccttctcgttcaggttgttctgctgttggattttgtgcacggatggaatgagaactgggtcgccaaggatgagcagtacatggctctgttggttgtctcggttgtctgttacattgccacgttctgtttctcgggtctcctatttcactggttcactccatctggacatgactgcggactcaacctgtttttcattgtcttcacgttgattcttgtttttgcgtttgctattgttgccctgcacccaaagatcaatggaagcttgttgcctgcatcagttattggtatgtactgtacatatctgtgctacagtggactctccagtgagccaagggattacgaatgcaatgggcttcacaatcactcaaaagctgtgtcaactggtagccttacattgggactccttaccacggtcctctctgtggtctattctgctgtccgcgctggctcctctgcaactgtgctctcgccaccagactcaccacgtgggaccgacaagccattgcttcccttcagcaaggcagacgaacaagaagataagaaggatgtgccgaggccggtgacatactcctactctttctttcacctcatcttctccctggccagcatgtactcggcaatgctcttgactggctggtcaacttcggttggtgagagcggaaagcttgtggatgttgggtggccatctgtctgggtcaggattgcaacccagtgggcgacggcaggtctgttcatatggtcgcttgttgcacccgtcctctttcccgacagggaattctaagttcaaccacggtaagcctggagcatcaaacgtgtctactgtggtagctaatatatcctatcaagtatgttgcctttaaaacatgctccgagtcggtgtttgcccactgttatcaagtttgtctacttaataacatgtgactttaggcattgtgccactatcttaacagtgaacgtgtgctgcttgtattgtgtatatactggagaattttaagaatgcttcgtgcgagcgtgttgtgtatcgattgcttggtggctgtgtctgcggacttaaatcttttgctatgttgattatcttctaattctgagtttgtgctgcagtagtaaaaaaacta

SEQ ID NO: 56205 - DNA, 1868 bp, Zea Mays
cgaagcgctgtggccttccaaggacaaggttgattgttgaacacccaacgctctcacctcaccttccatcacggattcacggtcacggtcgaggaggaagaaacggtacctcgccgccgacccctccaacgccgacctcctcgaggttcatgaggagcttcttgctgcgattaaggatgccgaggagggtcttctccatttgaagcgctctaggctactgaagcaagtagatgagatctttccagataaggaatcaatatcccaatcacccgaagttgctattgagtcattagatccagatgatgttgagccagaaccactggagtcacatgatttttcagttggatcaaagtgtagattccggcacaacaatgggcgctggtataatggatgcattataggctttgaaggttcaggcgatgcaaggatctcatttctgacacctacatctgaaaatatgtcgatatgcaagttcttcctacagcagcgatgtcgatttggtagtaactgccgcatgtctcatggtattgtaatgccttctaaagccttgaagcgattcactccaactaggtgggagcagtccttggtaggctccagcatactggcaacttctgggtataactctggcctttggaggagagcagagcttgagtcatgggatgataatctgaagattggccaagttgtttttcaagatgatgggagttctgcgagtctgccaagtgattctctttctgtctcggaatacgctgacatgagtgacgaagatgaaggaagcttaagtgacgaagaatctgagttcagtgacgatgctgatcaagaggacggaagtgttcatcagggtcttggccttttagaattcacaaattttagtggcattcagacagataccatgatcttcgcaaaatgggagcaccacaccaggggtgttgcctccaaaatgatggcaaaaatgggttaccgagaggggatggggcttggtgtgtctggccaaggcatgcttgatccaattccagttaaggtactacccccaaagcaatcacttgatcatgcacttgcttcaagcgaggctgacggaggcagtgggaaaaagcgcagtaggggtgggaaaaggaagcgtgagaagaagtttgcagaacaggccagggctgctaaagctgaagaagctgagagatctgtctttaattttatcaacagccatctagtaagccaagaaggttcgaccaccaaagttagaaagggttcatcagttgagaccaatggactcgctaagaaggaagacagaagatccttggttgcatacggtgaggaagtgaaggagctgaggattcgagttgagaaactggaagagatgaagaaccgtaactgcaaagacaaggcattctttgaagcagcttcaaggaaactggaagagactcggaaggcactcgctgatgctgaagctacccacgcttcagcgacgagtgcagttactagaaaggagaaagagaagaaatggttgaaattctgatgtcaatttcatgtgtgccaacgcttctctgtctgtgttctgacaagaacgtggcatgatgtatgcaacttacaattgttccccatgtcagctcttagccttctacacttgtatgtctatcaagttttagatctgttgtagaagcagtaacactaataattattcgaaggatgtggtatttagatgagttttcggctagtcatcacgtaatactatctctgaaccgccgatcatttggtactagtagacatttcatttgcattccgttatatccagatggatgaataatccgcctattctgctggatgcagctactttttttttgttcacatctgccatagcatcgtacagaacccat

SEQ ID NO: 56206 - DNA, 4294 bp, Zea Mays
catcacctagacgtccatatgaaattcattcactggatgaactgattgagatgtcacataaatattatgatgataccgcgctacccaaattggttgcagactttggctcacttgagctttcccctgttgatggaaggacattaacagattttatgcacactaggggcctccagatgcggtcactgggacgagtggttgagctttcggataagcttccacatatacagtccttgtgtatacatgagatggtagttcgagcatttaagcacatagttcgggctgttattgcagctgttgatgatataaatgatatggcagactcagttgcgtcatgtttaaatattttgttgggaccatttctggaggaaaacaatgacaaagattgtggtgaggatcataatctcaggaaaaggtggctggaggtctttttgataaagagatttggttggaagtggaaagatgaatattgtcttgatctaagaaaatatgccattctccgtggtctctgccataaggacttgagttaataacaaaagattatgacatggatatgccaaacccattcagaaagtcggatattatcagtgttgttcctatctacaagcatgttgcatgctcatcagctgatggccgcaccctgctggagtcatccaagactttcctggataaagggaaacttgaggatgctgttagctacggcacaaaagctcttgcaaaacttgttgctgtttgtggtccttatcatagaatgacggcaggagcatacagccttcttgcagtagtgctttatcatactggtgacttcaaccaggcaaccatctatcaacagaaggctttagatattaatgagagggaacttggacttgaccacccagatacaatgaaaagctatggagatcttgctgttttctactatcgcctgcaacatacagaactagcattaaagtatgtcaatcgtgccctatatcttttgcaccttacatgtggcccttctcatcctaacaccgctgcaacttatatcaatgttgcgatgatggaagaagggttgggcaatgtccatgttgcactccgttacctgcacgaagctctaaaatgtaaccaacggttgcttggcgctgatcacatacagactgcggcaagttatcatgctattgctattgctttgtctttaatggaagcgtactcattgagtgtccaacatgaaaagaccacgctaaggatacttcaagcaaagcttggatccgaggatcttcggacccaggatgcttctgcttggctggaatactttgaatccaaggcactagagcagcaggaagcagcacgaaatggtactccaaagcctgatgcttcaatagcaagcagaggacatctgagtgtatcagatcttttggattatatcaacccggatgatgagctcaaggctaaggaaatgcaaaggaaacaagtccgtgctaagatcaaaggtcgcactgggcaaaaccaatctgaacttgttgatgatgaagatcaaaggagtcctgcacctaacaatgataaaaatttattaaccgagaatggaaactctggagtaaaagagaatggaacctttgttgagcatgtgaaagatgaaatatcaagtgacactgcaatccacatacctcaagatggttttactgaagagtgcacatctgatgaggggtggcaagcggctgttccaaaggggcgatccacagggagccgcagaactggtgcaggcacgaggaggccaaatctggcaaaaattaatactagttcactaaacagtgagaatggaagatacaaaggaagaggtatatctaacttctcttcccctcgagtttcacctagtgaggctgcagtttctattggttctagacctcttgcaaagaaattggctaagagttcaagcttcaattccaaagcagttagcactgccgtctcatcgaatactggtgagaattctttcaatctcaactccaagccagcaagccctgccattgccacagctgctgccaaggtgataccatccacaacaccaagtgctagtcaaacagtaaggaagtcactttcatacaaggaggtagcaatagctgcaccagggactcttgccaaagcatcgagtgatgtacacacagaagaaaaagatacaggtgaccaaggtgcaagtcctgaaagttctaattctaagtctccaaaagaaatcaatggtcacccttctggggagaaagatggggcaatagaagtgtcgccacaggatgatacttcacaggtatctaaatcacctgatggaggtaaacctgagcaaactgatgttttgattggttcaaatcaaccagatacagtacataaaaaatcctcagatccagcagagacatctgtagcaaaggacatagatcttccggccccggtcatatcatctggaacacaaactgaggctgacaccccaaatgatgaagcaccaactgcaattgaggcaaatgattcttcctccaatgacgatgaaagagattcaggagcagatacaccagaacaactgtctagtggaggtgaaaatgagaaatcttcactatctgagagtgaaaagaatgatacaccaagagaaggtgctaaagagacaacaagtaaactttctgctgctgcggctccattcaatccatccagcgtaccagcttttggttcaatggctgtcccaggtttcagagaacatggagggctattgccatcaccagccaatgtgccccctatgctgtccattcctctccgcaagcaccctcaccaatctgcaactgcaagggtaccttatggtccacgtctggctggaggctacaatagatcagggcaccgaggacttcgtaagaagcctgtgttgacaagtggtgaagcccctacagaaacaaacacgtctggccccaggattatgaaccctaacgccccagagtttgttccaggtcaatctcggagtcctaatgggcatccagcatctccaaatggtcctttagcatctccaggtggtattccatcttcaccacaggaccttctatcctctccagatagtaccttggagtcaccagtaactgcatccccacaagtttctgaatgtagccagattagtcctgaaggagatgttgagggtgtgggtgtaaagcagaacatggatgacacgaaccacccagaaagtaaagatggtgaagtggagcctgagcaaaccaaagctcctgaaggtacagaagaaggcgcagcggtaaaagatgctgctgaagagttgattgcagccgagcagcccaaatcctgggctgactacagcgatggagaggttgaggtcgttgaggttgcaagctaatgaaaatacgaccttctcagatagccaacacagagtggaatttttatttctcgaacagatgagcatttctccttctcaatagatggtgcatttttttacagtgcgggcttctcccgctgtattttctgctaaagaaaagatgctgcttttttggggatagactgaattgccttccagtggcattcaatgacctttgggacttgaaattttgaagactttccagaatgtgtcagcctttgggatttggcatttcttcatctatttttttgctgcgaagaattttggggaataagagcacctcaaagtatcagcaggggagatacggcgttaacatttcatcatttccccatcttgctcctgatttcccccccttggtgaatgtactgtcgacttaacgtctttcatagttatttctttgttacaataaatagactttttgaaccatgtataaaatataaagcaagagattttatctttccacacttgcggttaatccgagcttgtatagcatcgaaaattcgagatcgaactaaagaaagcttcctattgaatttcgcttttaacactagctctgttggctcatttagatgattcctatgattcctgtggttgtcacctaacttgatctgtgataaaaatcaactggacttggagcttgtctgtggataaatccataaatgatacaatgataaatggtactccattcctatttatatttcatttgacttttttaccctaaagtttggctcgtcttattcaaaaaatttcataattattattaaacattaccgcgatatcgtttgccatataacatactttagtgattttttttatttttttcttaaaattttgaataagacaagttaaaattttgaataagacaagacaatcaaatttgatataaaaaagttaaataagttatatattaggagaaatggagtatgggtctgcgtttag

SEQ ID NO: 56207 - DNA, 6167 bp, Zea Mays
ggcacacatgcttttgaagaagggtagcggagcgcaaggctgagggcatatcaacggacaggatcctcgacatccggaagctcctggccgtccacgtggacacctgccacctcaccagcttctccctgtcccacgaggtccgtgggggccagctcaaggacacggtggagatcgccgccctcaagccctgccacctcaccatcgtcgaagaggactacacggaggagctcgccgtcgcgcacgtgcgtcgcctgctcgacatcgtcgcctgcaccaccgtgttcggggcgaagaagcccgagccgaagcccgatgcggcggatgccgcggccgagtccgccaaagccggctcgccctcgcccggtaagacggcgcccggcggcggcgaggagcccatgtacccgccgccgaagctggagcagttctacgatttcttcaccttctcgcacctcacgccgccgctgcactacattcggaggtcgtcccgcccattcgttgatgacaagagagaagacgacttcttccagatcgatgtgcgagtttgtaacgggaaacccgtgacgattgtggcatcccaagaaggattctaccctgcagggaagcgagcactcatcagccgctccctcgttggactgttgcagcagacaagccgtgcatttgatggagcctacaaggctctgatgaaggcatttgtcgagcacaacaagtttggaaatctaccttatgggttccgatcaaacacatgggtggctccccctgtcgttgccgactcaccatcagtgttcccacctctcccaaccgaagatgaaacctggggtggcagtggtggtggtcaaggaagagacggaaagcacgaccatagaccatgggtgaaagaatttgccattcttgctgcaatgccttgcaaaacagctgaggagaggcaaatcagagacagaaaggctttcctactccacagtttgtttgtggatgttgcagtcctcaaagctgttgcatctatccagcaactgatttccaaccatacaagtttacatgaaacagagaatggcaccatcggttcagttttgcacaccgagcaagtaggtgatatgaaaataatgatcacaaaggacaaaacagatgcaagctccaagctagatgtcaaattggatggaagtcaggctccagggatgtcttctgatgagcttgctcagagaaacttgttgaaaggcatcactgctgatgagagtgcaacagtacatgatacagccactcttggtgtggttattgtaaagcattgtgggtatacagctgttgtccaagttccagtagatactgaactgccagctgcttctgtagcacagcaggagatccacattgaagaccagcctgaaggaggtagcaatgctcttaatgtcaacagcttaaggatgctgcttcataagtcatgtgctcaagcacctggagttcaacggttgcagactagtgatcctcaagacaatgaggctactcaaacttttgtccggaagatattaacagacagcctgcagaagcttgaaaatgaggttccgatagtaacaagacctatcagatgggaacttggtgcttgttgggtacaacatctacagaacccaacttccgagaagacagagactaagaaaagtgacgagactaaggatgtccctacagtaaagggtctgggtaaacaatttggtcagttaaaggagataaaaaagaagacagatgacaagggtggaaaaggtacatatgtaaaaggaaacaattcacctaatacagataatgggcatacagacaacactgccagtgtaaaggatgataaggacattattcttcagagattgcttccggaagcagctttccaaagactgaaggaatcagaaactggacttcatgttaagtcactggatgaactgattgagatgtcacataaatattatgatgataccgcgctacccaaattggttgcagactttggctcacttgagctttcccctgttgatggaaggacattaacagattttatgcacactaggggcctccagatgcggtcactgggacgagtggttgagctttcggataagcttccacatatacagtccttgtgtatacatgagatggtagttcgagcatttaagcacatagttcgggctgttattgcagctgttgatgatataaatgatatggcagactcagttgcgtcatgtttaaatattttgttgggaccatttctggaggaaaacaatgacaaagattgtggtgaggatcataatctcaggaaaaggtggctggaggtctttttgataaagagatttggttggaagtggaaagatgaatattgtcttgatctaagaaaatatgccattctccgtggtctctgccataaggtaggacttgagttaataacaaaagattatgacatggatatgccaaacccattcagaaagtcggatattatcagtgttgttcctatctacaagcatgttgcatgctcatcagctgatggccgcaccctgctggagtcatccaagactttcctggataaagggaaacttgaggatgctgttagctacggcacaaaagctcttgcaaaacttgttgctgtttgtggtccttatcatagaatgacggcaggagcatacagccttcttgcagtagtgctttatcatactggtgacttcaaccaggcaaccatctatcaacagaaggctttagatattaatgagagggaacttggacttgaccacccagatacaatgaaaagctatggagatcttgctgttttctactatcgcctgcaacatacagaactagcattaaagtatgtcaatcgtgccctatatcttttgcaccttacatgtggcccttctcatcctaacaccgctgcaacttatatcaatgttgcgatgatggaagaagggttgggcaatgtccatgttgcactccgttacctgcacgaagctctaaaatgtaaccaacggttgcttggcgctgatcacatacagactgcggcaagttatcatgctattgctattgctttgtctttaatggaagcgtactcattgagtgtccaacatgaaaagaccacgctaaggatacttcaagcaaagcttggatccgaggatcttcggacccaggatgcttctgcttggctggaatactttgaatccaaggcactagagcagcaggaagcagcacgaaatggtactccaaagcctgatgcttcaatagcaagcagaggacatctgagtgtatcagatcttttggattatatcaacccggatgatgagctcaaggctaaggaaatgcaaaggaaacaagtccgtgctaagatcaaaggtcgcactgggcaaaaccaatctgaacttgttgatgatgaagatcaaaggagtcctgcacctaacaatgataaaaatttattaaccgagaatggaaactctggagtaaaagagaatggaacctttgttgagcatgtgaaagatgaaatatcaagtgacactgcaatccacatacctcaagatggttttactgaagagtgcacatctgatgaggggtggcaagcggctgttccaaaggggcgatccacagggagccgcagaactggtgcaggcacgaggaggccaaatctggcaaaaattaatactagttcactaaacagtgagaatggaagatacaaaggaagaggtatatctaacttctcttcccctcgagtttcacctagtgaggctgcagtttctattggttctagacctcttgcaaagaaattggctaagagttcaagcttcaattccaaagcagttagcactgccgtctcatcgaatactggtgagaattctttcaatctcaactccaagccagcaagccctgccattgccacagctgctgccaaggtgataccatccacaacaccaagtgctagtcaaacagtaaggaagtcactttcatacaaggaggtagcaatagctgcaccagggactcttgccaaagcatcgagtgatgtacacacagaagaaaaagatacaggtgaccaaggtgcaagtcctgaaagttctaattctaagtctccaaaagaaatcaatggtcacccttctggggagaaagatggggcaatagaagtgtcgccacaggatgatacttcacaggtatctaaatcacctgatggaggtaaacctgagcaaactgatgttttgattggttcaaatcaaccagatacagtacataaaaaatcctcagatccagcagagacatctgtagcaaaggacatagatcttccggccccggtcatatcatctggaacacaaactgaggctgacaccccaaatgatgaagcaccaactgcaattgaggcaaatgattcttcctccaatgacgatgaaagagattcaggagcagatacaccagaacaactgtctagtggaggtgaaaatgagaaatcttcactatctgagagtgaaaagaatgatacaccaagagaaggtgctaaagagacaacaagtaaactttctgctgctgcggctccattcaatccatccagcgtaccagcttttggttcaatggctgtcccaggtttcagagaacatggagggctattgccatcaccagccaatgtgccccctatgctgtccattcctctccgcaagcaccctcaccaatctgcaactgcaagggtaccttatggtccacgtctggctggaggctacaatagatcagggcaccgaggacttcgtaagaagcctgtgttgacaagtggtgaagcccctacagaaacaaacacgtctggccccaggattatgaaccctaacgccccagagtttgttccaggtcaatctcggagtcctaatgggcatccagcatctccaaatggtcctttagcatctccaggtggtattccatcttcaccacaggaccttctatcctctccagatagtaccttggagtcaccagtaactgcatccccacaagtttctgaatgtagccagattagtcctgaaggagatgttgagggtgtgggtgtaaagcagaacatggatgacacgaaccacccagaaagtaaagatggtgaagtggagcctgagcaaaccaaagctcctgaaggtacagaagaaggcgcagcggtaaaagatgctgctgaagagttgattgcagccgagcagcccaaatcctgggctgactacagcgatggagaggttgaggtcgttgaggttgcaagctaatgaaaatacgaccttctcagatagccaacacagagtggaatttttatttctcgaacagatgagcatttctccttctcaatagatggtgcatttttttacagtgcgggcttctcccgctgtattttctgctaaagaaaagatgctgcttttttggggatagactgaattgccttccagtggcattcaatgacctttgggacttgaaattttgaagactttccagaatgtgtcagcctttgggatttggcatttcttcatctatttttttgctgcgaagaattttggggaataagagcacctcaaagtatcagcaggggagatacggcgttaacatttcatcatttccccatcttgctcctgatttcccccccttggtgaatgtactgtcgacttaacgtctttcatagttatttctttgttacaataaatagactttttgaaccatgtataaaatataaagcaagagattttatctttccacacttgcggttaatccgagcttgtatagcatcgaaaattcgagatcgaactaaagaaagcttcctattgaatttcgcttttaacactagctctgttggctcatttagatgattcctatgattcctgtggttgtcacctaacttgatctgtgataaaaatcaactggacttggagcttgtctgtggataaatccataaatgatacaatgataaatggtactccattcctatttatatttcatttgacttttttaccctaaagtttggctcgtcttattcaaaaaatttcataattattattaaacattaccgcgatatcgtttgccatataacatactttagtgattttttttatttttttcttaaaattttgaataagacaagttaaaattttgaataagacaagacaatcaaatttgatataaaaaagttaaataagttatatattaggagaaatggagtatgggtctgcgtttag

SEQ ID NO: 56208 - DNA, 6949 bp, Zea Mays
atccccataaacaccttatcccctctctacctctctccactgcatgcctcgctatctcctcctcctcctcagcagcagctctgcaatgccaagggcgccttagccgagttcctcccgagtccagactggtggtggcgataaggttgtcgcgaggggttccgcgcgcggtgctgcgctgcccagagctcggttagcttcggggcggcggcagcccggcagccatggcgcccaaggcggggaaggccaagcccaaggccaggggcgacaggaagaagaaggaggagaaagtgctgcccaccgtgctggacgtcaccgttgagacgccggactacacgctgctcacgctcaagggcatatcaacggacaggatcctcgacatccggaagctcctggccgtccacgtggacacctgccacctcaccagcttctccctgtcccacgaggtccgtgggggccagctcaaggacacggtggagatcgccgccctcaagccctgccacctcaccatcgtcgaagaggactacacggaggagctcgccgtcgcgcacgtgcgtcgcctgctcgacatcgtcgcctgcaccaccgtgttcggggcgaagaagcccgagccgaagcccgatgcggcggatgccgcggccgagtccgccaaagccggctcgccctcgcccggtaagacggcgcccggcggcggcgaggagcccatgtacccgccgccgaagctggagcagttctacgatttcttcaccttctcgcacctcacgccgccgctgcactacattcggaggtcgtcccgcccattcgttgatgacaagagagaagacgacttcttccagatcgatgtgcgagtttgtaacgggaaacccgtgacgattgtggcatcccaagaaggattctaccctgcagggaagcgagcactcatcagccgctccctcgttggactgttgcagcagacaagccgtgcatttgatggagcctacaaggctctgatgaaggcatttgtcgagcacaacaagtttggaaatctaccttatgggttccgatcaaacacatgggtggctccccctgtcgttgccgactcaccatcagtgttcccacctctcccaaccgaagatgaaacctggggtggcagtggtggtggtcaaggaagagacggaaagcacgaccatagaccatgggtgaaagaatttgccattcttgctgcaatgccttgcaaaacagctgaggagaggcaaatcagagacagaaaggctttcctactccacagtttgtttgtggatgttgcagtcctcaaagctgttgcatctatccagcaactgatttccaaccatacaagtttacatgaaacagagaatggcaccatcggttcagttttgcacaccgagcaagtaggtgatatgaaaataatgatcacaaaggacaaaacagatgcaagctccaagctagatgtcaaattggatggaagtcaggctccagggatgtcttctgatgagcttgctcagagaaacttgttgaaaggcatcactgctgatgagagtgcaacagtacatgatacagccactcttggtgtggttattgtaaagcattgtgggtatacagctgttgtccaagttccagtagatactgaactgccagctgcttctgtagcacagcaggagatccacattgaagaccagcctgaaggaggtagcaatgctcttaatgtcaacagcttaaggatgctgcttcataagtcatgtgctcaagcacctggagttcaacggttgcagactagtgatcctcaagacaatgaggctactcaaacttttgtccggaagatattaacagacagcctgcagaagcttgaaaatgaggttccgatagtaacaagacctatcagatgggaacttggtgcttgttgggtacaacatctacagaacccaacttccgagaagacagagactaagaaaagtgacgagactaaggatgtccctacagtaaagggtctgggtaaacaatttggtcagttaaaggagataaaaaagaagacagatgacaagggtggaaaaggtacatatgtaaaaggaaacaattcacctaatacagataatgggcatacagacaacactgccagtgtaaaggatgataaggacattattcttcagagattgcttccggaagcagctttccaaagactgaaggaatcagaaactggacttcatgttaagtcactggatgaactgattgagatgtcacataaatattatgatgataccgcgctacccaaattggttgcagactttggctcacttgagctttcccctgttgatggaaggacattaacagattttatgcacactaggggcctccagatgcggtcactgggacgagtggttgagctttcggataagcttccacatatacagtccttgtgtatacatgagatggtagttcgagcatttaagcacatagttcgggctgttattgcagctgttgatgatataaatgatatggcagactcagttgcgtcatgtttaaatattttgttgggaccatttctggaggaaaacaatgacaaagattgtggtgaggatcataatctcaggaaaaggtggctggaggtctttttgataaagagatttggttggaagtggaaagatgaatattgtcttgatctaagaaaatatgccattctccgtggtctctgccataaggtaggacttgagttaataacaaaagattatgacatggatatgccaaacccattcagaaagtcggatattatcagtgttgttcctatctacaagcatgttgcatgctcatcagctgatggccgcaccctgctggagtcatccaagactttcctggataaagggaaacttgaggatgctgttagctacggcacaaaagtacgattcgttatattactattgcatccatatgtgaagaattcttgaactggtgcttctttcggtttccatcattctaatctgcacatgattgtgcaggctcttgcaaaacttgttgctgtttgtggtccttatcatagaatgacggcaggagcatacagccttcttgcagtagtgctttatcatactggtgacttcaaccaggtatattcttcttaggacttcatcactagctctcactagtagcattcactattccacaatatttgtcaattttacctgcataagatatgtctgcagaacaattaggtgctcatgaaattgcatctatcctagacatgttactgtgtttcaaattggaatcgtatttcattattttggttgagcttgtaagttgctttagctttgtcaatgctatgatattacatctctgagttacctgtagtacatatgcacttgtcaggtgtttaatttttttccacaacagcgtagttctatcctatgctgtgaaggcttaactttataaatgttgctgctctttcaaacaggcaaccatctatcaacagaaggctttagatattaatgagagggaacttggacttgaccacccagatacaatgaaaagctatggagatcttgctgttttctactatcgcctgcaacatacagaactagcattaaagtaagttcagagtcatctacttaagctgacatggtatgtcaatcgtgccctatatcttttgcaccttacatgtggcccttctcatcctaacaccgctgcaacttatatcaatgttgcgatgatggaagaagggttgggcaatgtccatgttgcactccgttacctgcacgaagctctaaaatgtaaccaacggttgcttggcgctgatcacatacagactgcggcaagttatcatgctattgctattgctttgtctttaatggaagcgtactcattgagtgtccaacatgaaaagaccacgctaaggatacttcaagcaaagcttggatccgaggatcttcggacccaggatgcttctgcttggctggaatactttgaatccaaggcactagagcagcaggaagcagcacgaaatggtactccaaagcctgatgcttcaatagcaagcagaggacatctgagtgtatcagatcttttggattatatcaacccggatgatgagctcaaggctaaggaaatgcaaaggaaacaagtccgtgctaagatcaaaggtcgcactgggcaaaaccaatctgaacttgttgatgatgaagatcaaaggagtcctgcacctaacaatgataaaaatttattaaccgagaatggaaactctggagtaaaagagaatggaacctttgttgagcatgtgaaagatgaaatatcaagtgacactgcaatccacatacctcaagatggttttactgaagagtgcacatctgatgaggggtggcaagcggctgttccaaaggggcgatccacagggagccgcagaactggtgcaggcacgaggaggccaaatctggcaaaaattaatactagttcactaaacagtgagaatggaagatacaaaggaagaggtatatctaacttctcttcccctcgagtttcacctagtgaggctgcagtttctattggttctagacctcttgcaaagaaattggctaagagttcaagcttcaattccaaagcagttagcactgccgtctcatcgaatactggtgagaattctttcaatctcaactccaagccagcaagccctgccattgccacagctgctgccaaggtgataccatccacaacaccaagtgctagtcaaacagtaaggaagtcactttcatacaaggaggtagcaatagctgcaccagggactcttgccaaagcatcgagtgatgtacacacagaagaaaaagatacaggtgaccaaggtgcaagtcctgaaagttctaattctaagtctccaaaagaaatcaatggtcacccttctggggagaaagatggggcaatagaagtgtcgccacaggatgatacttcacaggtatctaaatcacctgatggaggtaaacctgagcaaactgatgttttgattggttcaaatcaaccagatacagtacataaaaaatcctcagatccagcagagacatctgtagcaaaggacatagatcttccggccccggtcatatcatctggaacacaaactgaggctgacaccccaaatgatgaagcaccaactgcaattgaggcaaatgattcttcctccaatgacgatgaaagagattcaggagcagatacaccagaacaactgtctagtggaggtgaaaatgagaaatcttcactatctgagagtgaaaagaatgatacaccaagagaaggtgctaaagagacaacaagtaaactttctgctgctgcggctccattcaatccatccagcgtaccagcttttggttcaatggctgtcccaggtttcagagaacatggagggctattgccatcaccagccaatgtgccccctatgctgtccattcctctccgcaagcaccctcaccaatctgcaactgcaagggtaccttatggtccacgtctggctggaggctacaatagatcagggcaccgaggacttcgtaagaagcctgtgttgacaagtggtgaagcccctacagaaacaaacacgtctggccccaggattatgaaccctaacgccccagagtttgttccaggtcaatctcggagtcctaatgggcatccagcatctccaaatggtcctttagcatctccaggtggtattccatcttcaccacaggaccttctatcctctccagatagtaccttggagtcaccagtaactgcatccccacaagtttctgaatgtagccagattagtcctgaaggagatgttgagggtgtgggtgtaaagcagaacatggatgacacgaaccacccagaaagtaaagatggtgaagtggagcctgagcaaaccaaagctcctgaaggtacagaagaaggcgcagcggtaaaagatgctgctgaagagttgattgcagccgagcagcccaaatcctgggctgactacagcgatggagaggttgaggtcgttgaggttgcaagctaatgaaaatacgaccttctcagatagccaacacagagtggaatttttatttctcgaacagatgagcatttctccttctcaatagatggtgcatttttttacagtgcgggcttctcccgctgtattttctgctaaagaaaagatgctgcttttttggggatagactgaattgccttccagtggcattcaatgacctttgggacttgaaattttgaagactttccagaatgtgtcagcctttgggatttggcatttcttcatctatttttttgctgcgaagaattttggggaataagagcacctcaaagtatcagcaggggagatacggcgttaacatttcatcatttccccatcttgctcctgatttcccccccttggtgaatgtactgtcgacttaacgtctttcatagttatttctttgttacaataaatagactttttgaaccatgtataaaatataaagcaagagattttatctttccacacttgcggttaatccgagcttgtatagcatcgaaaattcgagatcgaactaaagaaagcttcctattgaatttcgcttttaacactagctctgttggctcatttagatgattcctatgattcctgtggttgtcacctaacttgatctgtgataaaaatcaactggacttggagcttgtctgtggataaatccataaatgatacaatgataaatggtactccattcctatttatatttcatttgacttttttaccctaaagtttggctcgtcttattcaaaaaatttcataattattattaaacattaccgcgatatcgtttgccatataacatactttagtgattttttttatttttttcttaaaattttgaataagacaagttaaaattttgaataagacaagacaatcaaatttgatataaaaaagttaaataagttatatattaggagaaatggagtatgggtctgcgtttag

SEQ ID NO: 56209 - DNA, 6888 bp, Zea Mays
atccccataaacaccttatcccctctctacctctctccactgcatgcctcgctatctcctcctcctcctcagcagcagctctgcaatgccaagggcgccttagccgagttcctcccgagtccagactggtggtggcgataaggttgtcgcgaggggttccgcgcgcggtgctgcgctgcccagagctcggttagcttcggggcggcggcagcccggcagccatggcgcccaaggcggggaaggccaagcccaaggccaggggcgacaggaagaagaaggaggagaaagtgctgcccaccgtgctggacgtcaccgttgagacgccggactacacgctgctcacgctcaagggcatatcaacggacaggatcctcgacatccggaagctcctggccgtccacgtggacacctgccacctcaccagcttctccctgtcccacgaggtccgtgggggccagctcaaggacacggtggagatcgccgccctcaagccctgccacctcaccatcgtcgaagaggactacacggaggagctcgccgtcgcgcacgtgcgtcgcctgctcgacatcgtcgcctgcaccaccgtgttcggggcgaagaagcccgagccgaagcccgatgcggcggatgccgcggccgagtccgccaaagccggctcgccctcgcccggtaagacggcgcccggcggcggcgaggagcccatgtacccgccgccgaagctggagcagttctacgatttcttcaccttctcgcacctcacgccgccgctgcactacattcggaggtcgtcccgcccattcgttgatgacaagagagaagacgacttcttccagatcgatgtgcgagtttgtaacgggaaacccgtgacgattgtggcatcccaagaaggattctaccctgcagggaagcgagcactcatcagccgctccctcgttggactgttgcagcagacaagccgtgcatttgatggagcctacaaggctctgatgaaggcatttgtcgagcacaacaagtttggaaatctaccttatgggttccgatcaaacacatgggtggctccccctgtcgttgccgactcaccatcagtgttcccacctctcccaaccgaagatgaaacctggggtggcagtggtggtggtcaaggaagagacggaaagcacgaccatagaccatgggtgaaagaatttgccattcttgctgcaatgccttgcaaaacagctgaggagaggcaaatcagagacagaaaggctttcctactccacagtttgtttgtggatgttgcagtcctcaaagctgttgcatctatccagcaactgatttccaaccatacaagtttacatgaaacagagaatggcaccatcggttcagttttgcacaccgagcaagtaggtgatatgaaaataatgatcacaaaggacaaaacagatgcaagctccaagctagatgtcaaattggatggaagtcaggctccagggatgtcttctgatgagcttgctcagagaaacttgttgaaaggcatcactgctgatgagagtgcaacagtacatgttagactccctccatgcaacttttatactaatacttccattagcattttatgaagtattgaagttatgctatccaattacaggatacagccactcttggtgtggttattgtaaagcattgtgggtatacagctgttgtccaagttccagtagatactgaactgccagctgcttctgtagcacagcaggagatccacattgaagaccagcctgaaggaggtagcaatgctcttaatgtcaacagcttaaggatgctgcttcataagtcatgtgctcaagcacctggagttcaacggttgcagactagtgatcctcaagacaatgaggctactcaaacttttgtccggaagatattaacagacagcctgcagaagcttgaaaatgaggttccgatagtaacaagacctatcagatgggaacttggtgcttgttgggtacaacatctacagaacccaacttccgagaagacagagactaagaaaagtgacgagactaaggatgtccctacagtaaagggtctgggtaaacaatttggtcagttaaaggagataaaaaagaagacagatgacaagggtggaaaaggtacatatgtaaaaggaaacaattcacctaatacagataatgggcatacagacaacactgccagtgtaaaggatgataaggacattattcttcagagattgcttccggaagcagctttccaaagactgaaggaatcagaaactggacttcatgttaagtcactggatgaactgattgagatgtcacataaatattatgatgataccgcgctacccaaattggttgcagactttggctcacttgagctttcccctgttgatggaaggacattaacagattttatgcacactaggggcctccagatgcggtcactgggacgagtggtacatactatgattatgttcaagatttgttttctgagtcgcaaaatcatgtcaattcatttgaacaactaagatagtaagaacctcttattaatgacactgaggtactattataattgccgcttttcaggttgagctttcggataagcttccacatatacagtccttgtgtatacatgagatggtagttcgagcatttaagcacatagttcgggctgttattgcagctgttgatgatataaatgatatggcagactcagttgcgtcatgtttaaatattttgttgggaccatttctggaggaaaacaatgacaaagattgtggtgaggatcataatctcaggaaaaggtggctggaggtctttttgataaagagatttggttggaagtggaaagatgaatattgtcttgatctaagaaaatatgccattctccgtggtctctgccataaggtaggacttgagttaataacaaaagattatgacatggatatgccaaacccattcagaaagtcggatattatcagtgttgttcctatctacaagcatgttgcatgctcatcagctgatggccgcaccctgctggagtcatccaagactttcctggataaagggaaacttgaggatgctgttagctacggcacaaaagctcttgcaaaacttgttgctgtttgtggtccttatcatagaatgacggcaggagcatacagccttcttgcagtagtgctttatcatactggtgacttcaaccaggcaaccatctatcaacagaaggctttagatattaatgagagggaacttggacttgaccacccagatacaatgaaaagctatggagatcttgctgttttctactatcgcctgcaacatacagaactagcattaaagtatgtcaatcgtgccctatatcttttgcaccttacatgtggcccttctcatcctaacaccgctgcaacttatatcaatgttgcgatgatggaagaagggttgggcaatgtccatgttgcactccgttacctgcacgaagctctaaaatgtaaccaacggttgcttggcgctgatcacatacaggtaggcaacccaaccacatccactgtctttggcatgattgtattatgcctcatgaatatacatacagctgcacactctactgcctgctcagtgctcacatcagttttgatctgtacacttctaacagttagagtacctgtctgtgatttaaacaaaggctaacatcgaaaggccatcttatgtctcaatattttaatgacagactgcggcaagttatcatgctattgctattgctttgtctttaatggaagcgtactcattgagtgtccaacatgaaaagaccacgctaaggatacttcaagcaaagcttggatccgaggatcttcggacccaggatgcttctgcttggctggaatactttgaatccaaggcactagagcagcaggaagcagcacgaaatggtactccaaagcctgatgcttcaatagcaagcagaggacatctgagtgtatcagatcttttggattatatcaacccggatgatgagctcaaggctaaggaaatgcaaaggaaacaagtccgtgctaagatcaaaggtcgcactgggcaaaaccaatctgaacttgttgatgatgaagatcaaaggagtcctgcacctaacaatgataaaaatttattaaccgagaatggaaactctggagtaaaagagaatggaacctttgttgagcatgtgaaagatgaaatatcaagtgacactgcaatccacatacctcaagatggttttactgaagagtgcacatctgatgaggggtggcaagcggctgttccaaaggggcgatccacagggagccgcagaactggtgcaggcacgaggaggccaaatctggcaaaaattaatactagttcactaaacagtgagaatggaagatacaaaggaagaggtatatctaacttctcttcccctcgagtttcacctagtgaggctgcagtttctattggttctagacctcttgcaaagaaattggctaagagttcaagcttcaattccaaagcagttagcactgccgtctcatcgaatactggtgagaattctttcaatctcaactccaagccagcaagccctgccattgccacagctgctgccaaggtgataccatccacaacaccaagtgctagtcaaacagtaaggaagtcactttcatacaaggaggtagcaatagctgcaccagggactcttgccaaagcatcgagtgatgtacacacagaagaaaaagatacaggtgaccaaggtgcaagtcctgaaagttctaattctaagtctccaaaagaaatcaatggtcacccttctggggagaaagatggggcaatagaagtgtcgccacaggatgatacttcacaggtatctaaatcacctgatggaggtaaacctgagcaaactgatgttttgattggttcaaatcaaccagatacagtacataaaaaatcctcagatccagcagagacatctgtagcaaaggacatagatcttccggccccggtcatatcatctggaacacaaactgaggctgacaccccaaatgatgaagcaccaactgcaattgaggcaaatgattcttcctccaatgacgatgaaagagattcaggagcagatacaccagaacaactgtctagtggaggtgaaaatgagaaatcttcactatctgagagtgaaaagaatgatacaccaagagaaggtgctaaagagacaacaagtaaactttctgctgctgcggctccattcaatccatccagcgtaccagcttttggttcaatggctgtcccaggtttcagagaacatggagggctattgccatcaccagccaatgtgccccctatgctgtccattcctctccgcaagcaccctcaccaatctgcaactgcaagggtaccttatggtccacgtctggctggaggctacaatagatcagggcaccgaggacttcgtaagaagcctgtgttgacaagtggtgaagcccctacagaaacaaacacgtctggccccaggattatgaaccctaacgccccagagtttgttccaggtcaatctcggagtcctaatgggcatccagcatctccaaatggtcctttagcatctccaggtggtattccatcttcaccacaggaccttctatcctctccagatagtaccttggagtcaccagtaactgcatccccacaagtttctgaatgtagccagattagtcctgaaggagatgttgagggtgtgggtgtaaagcagaacatggatgacacgaaccacccagaaagtaaagatggtgaagtggagcctgagcaaaccaaagctcctgaaggtacagaagaaggcgcagcggtaaaagatgctgctgaagagttgattgcagccgagcagcccaaatcctgggctgactacagcgatggagaggttgaggtcgttgaggttgcaagctaatgaaaatacgaccttctcagatagccaacacagagtggaatttttatttctcgaacagatgagcatttctccttctcaatagatggtgcatttttttacagtgcgggcttctcccgctgtattttctgctaaagaaaagatgctgcttttttggggatagactgaattgccttccagtggcattcaatgacctttgggacttgaaattttgaagactttccagaatgtgtcagcctttgggatttggcatttcttcatctatttttttgctgcgaagaattttggggaataagagcacctcaaagtatcagcaggggagatacggcgttaacatttcatcatttccccatcttgctcctgatttcccccccttggtgaatgtactgtcgacttaacgtctttcatagttatttctttgttacaataaatagactttttgaaccatgtataaaatataaagcaagagattttatctttccacacttgcggttaatccgagcttgtatagcatcgaaaattcgagatcgaactaaagaaagcttcctattgaatttcgcttttaacactagctctgttggctcatttagatgattcctatgattcctgtggttgtcacctaacttgatctgtgataaaaatcaactggacttggagcttgtctgtggataaatccataaatgatacaatgataaatggtactccattcctatttatatttcatttgacttttttaccctaaagtttggctcgtcttattcaaaaaatttcataattattattaaacattaccgcgatatcgtttgccatataacatactttagtgattttttttatttttttcttaaaattttgaataagacaagttaaaattttgaataagacaagacaatcaaatttgatataaaaaagttaaataagttatatattaggagaaatggagtatgggtctgcgtttag

SEQ ID NO: 56210 - DNA, 7460 bp, Zea Mays
atccccataaacaccttatcccctctctacctctctccactgcatgcctcgctatctcctcctcctcctcagcagcagctctgcaatgccaagggcgccttagccgagttcctcccgagtccagactggtggtggcgataaggttgtcgcgaggggttccgcgcgcggtgctgcgctgcccagagctcggttagcttcggggcggcggcagcccggcagccatggcgcccaaggcggggaaggccaagcccaaggccaggggcgacaggaagaagaaggaggagaaagtgctgcccaccgtgctggacgtcaccgttgagacgccggactacacgctgctcacgctcaagggcatatcaacggacaggatcctcgacatccggaagctcctggccgtccacgtggacacctgccacctcaccagcttctccctgtcccacgaggtccgtgggggccagctcaaggacacggtggagatcgccgccctcaagccctgccacctcaccatcgtcgaagaggactacacggaggagctcgccgtcgcgcacgtgcgtcgcctgctcgacatcgtcgcctgcaccaccgtgttcggggcgaagaagcccgagccgaagcccgatgcggcggatgccgcggccgagtccgccaaagccggctcgccctcgcccggtaagacggcgcccggcggcggcgaggagcccatgtacccgccgccgaagctggagcagttctacgatttcttcaccttctcgcacctcacgccgccgctgcactacattcggaggtcgtcccgcccattcgttgatgacaagagagaagacgacttcttccagatcgatgtgcgagtttgtaacgggaaacccgtgacgattgtggcatcccaagaaggattctaccctgcagggaagcgagcactcatcagccgctccctcgttggactgttgcagcagacaagccgtgcatttgatggagcctacaaggctctgatgaaggcatttgtcgagcacaacaagtttggaaatctaccttatgggttccgatcaaacacatgggtggctccccctgtcgttgccgactcaccatcagtgttcccacctctcccaaccgaagatgaaacctggggtggcagtggtggtggtcaaggaagagacggaaagcacgaccatagaccatgggtgaaagaatttgccattcttgctgcaatgccttgcaaaacagctgaggagaggcaaatcagagacagaaaggctttcctactccacagtttgtttgtggatgttgcagtcctcaaagctgttgcatctatccagcaactgatttccaaccatacaagtttacatgaaacagagaatggcaccatcggttcagttttgcacaccgagcaagtaggtgatatgaaaataatgatcacaaaggacaaaacagatgcaagctccaagctagatgtcaaattggatggaagtcaggctccagggatgtcttctgatgagcttgctcagagaaacttgttgaaaggcatcactgctgatgagagtgcaacagtacatgatacagccactcttggtgtggttattgtaaagcattgtgggtatacagctgttgtccaagttccagtagatactgaactgccagctgcttctgtagcacagcaggagatccacattgaagaccagcctgaaggaggtagcaatgctcttaatgtcaacagcttaaggatgctgcttcataagtcatgtgctcaagcacctggagttcaacggttgcagactagtgatcctcaagacaatgaggctactcaaacttttgtccggaagatattaacagacagcctgcagaagcttgaaaatgaggttccgatagtaacaagacctatcagatgggaacttggtgcttgttgggtacaacatctacagaacccaacttccgagaagacagagactaagaaaagtgacgagactaaggatgtccctacagtaaagggtctgggtaaacaatttggtcagttaaaggagataaaaaagaagacagatgacaagggtggaaaaggtacatatgtaaaaggaaacaattcacctaatacagataatgggcatacagacaacactgccagtgtaaaggatgataaggacattattcttcagagattgcttccggaagcagctttccaaagactgaaggaatcagaaactggacttcatgttaagtcactggatgaactgattgagatgtcacataaatattatgatgataccgcgctacccaaattggttgcagactttggctcacttgagctttcccctgttgatggaaggacattaacagattttatgcacactaggggcctccagatgcggtcactgggacgagtggttgagctttcggataagcttccacatatacagtccttgtgtatacatgagatggtagttcgagcatttaagcacatagttcgggctgttattgcagctgttgatgatataaatgatatggcagactcagttgcgtcatgtttaaatattttgttgggaccatttctggaggaaaacaatgacaaagattgtggtgaggatcataatctcaggaaaaggtggctggaggtctttttgataaagagatttggttggaagtggaaagatgaatattgtcttgatctaagaaaatatgccattctccgtggtctctgccataaggtaggacttgagttaataacaaaagattatgacatggatatgccaaacccattcagaaagtcggatattatcagtgttgttcctatctacaaggtaatcttttcatttctaaaagaaatagctgaataagaaattcttagagaattcatggacatcaacctttattttgcctacttgcagcatgttgcatgctcatcagctgatggccgcaccctgctggagtcatccaagactttcctggataaagggaaacttgaggatgctgttagctacggcacaaaagtacgattcgttatattactattgcatccatatgtgaagaattcttgaactggtgcttctttcggtttccatcattctaatctgcacatgattgtgcaggctcttgcaaaacttgttgctgtttgtggtccttatcatagaatgacggcaggagcatacagccttcttgcagtagtgctttatcatactggtgacttcaaccaggtatattcttcttaggacttcatcactagctctcactagtagcattcactattccacaatatttgtcaattttacctgcataagatatgtctgcagaacaattaggtgctcatgaaattgcatctatcctagacatgttactgtgtttcaaattggaatcgtatttcattattttggttgagcttgtaagttgctttagctttgtcaatgctatgatattacatctctgagttacctgtagtacatatgcacttgtcaggtgtttaatttttttccacaacagcgtagttctatcctatgctgtgaaggcttaactttataaatgttgctgctctttcaaacaggcaaccatctatcaacagaaggctttagatattaatgagagggaacttggacttgaccacccagatacaatgaaaagctatggagatcttgctgttttctactatcgcctgcaacatacagaactagcattaaagtatgtcaatcgtgccctatatcttttgcaccttacatgtggcccttctcatcctaacaccgctgcaacttatatcaatgttgcgatgatggaagaagggttgggcaatgtccatgttgcactccgttacctgcacgaagctctaaaatgtaaccaacggttgcttggcgctgatcacatacagactgcggcaagttatcatgctattgctattgctttgtctttaatggaagcgtactcattgagtgtccaacatgaaaagaccacgctaaggatacttcaagcaaagcttggatccgaggatcttcggacccaggtaagctgaaaaggctggcttggttatgtgtaattccacttagccaccaattttcagttaaatgatctacctttcttgttgcaccaaggaaatctaatagccatattttccacaggatgcttctgcttggctggaatactttgaatccaaggcactagagcagcaggaagcagcacgaaatggtactccaaagcctgatgcttcaatagcaagcagaggacatctgaggtagatgttgtaactgattatgtttgtgaaatattatcattcacgaaactaaactacaggaagaagtttttacttgatttgctaaagaatagttaatcttctaagtttctgtatggattttataggtgataacttgttgtatactggtgattgtttcctttaccctaatactgtcaaaagcagtgcgtaaaaaatatttatggaactgtgtttttaagtagatcatttgctgaaagtgttgatcttctatttttctttatcagtgtatcagatcttttggattatatcaacccggatgatgagctcaaggctaaggaaatgcaaaggaaacaagtccgtgctaaggtagggtcttccgttgagactatatcacatttatattccactattggtcattctcatacatgcacattatgaatcatagatcaaaggtcgcactgggcaaaaccaatctgaacttgttgatgatgaagatcaaaggagtcctgcacctaacaatgataaaaatttattaaccgagaatggaaactctggagtaaaagagaatggaacctttgttgagcatgtgaaagatgaaatatcaagtgacactgcaatccacatacctcaagatggttttactgaagagtgcacatctgatgaggggtggcaagcggctgttccaaaggggcgatccacagggagccgcagaactggtgcaggcacgaggaggccaaatctggcaaaaattaatactagttcactaaacagtgagaatggaagatacaaaggaagaggtatatctaacttctcttcccctcgagtttcacctagtgaggctgcagtttctattggttctagacctcttgcaaagaaattggctaagagttcaagcttcaattccaaagcagttagcactgccgtctcatcgaatactggtgagaattctttcaatctcaactccaagccagcaagccctgccattgccacagctgctgccaaggtgataccatccacaacaccaagtgctagtcaaacagtaaggaagtcactttcatacaaggaggtagcaatagctgcaccagggactcttgccaaagcatcgagtgatgtacacacagaagaaaaagatacaggtgaccaaggtgcaagtcctgaaagttctaattctaagtctccaaaagaaatcaatggtcacccttctggggagaaagatggggcaatagaagtgtcgccacaggatgatacttcacaggtatctaaatcacctgatggaggtaaacctgagcaaactgatgttttgattggttcaaatcaaccagatacagtacataaaaaatcctcagatccagcagagacatctgtagcaaaggacatagatcttccggccccggtcatatcatctggaacacaaactgaggctgacaccccaaatgatgaagcaccaactgcaattgaggcaaatgattcttcctccaatgacgatgaaagagattcaggagcagatacaccagaacaactgtctagtggaggtgaaaatgagaaatcttcactatctgagagtgaaaagaatgatacaccaagagaaggtgctaaagagacaacaagtaaactttctgctgctgcggctccattcaatccatccagcgtaccagcttttggttcaatggctgtcccaggtttcagagaacatggagggctattgccatcaccagccaatgtgccccctatgctgtccattcctctccgcaagcaccctcaccaatctgcaactgcaagggtaccttatggtccacgtctggctggaggctacaatagatcagggcaccgaggacttcgtaagaagcctgtgttgacaagtggtgaagcccctacagaaacaaacacgtctggccccaggattatgaaccctaacgccccagagtttgttccaggtcaatctcggagtcctaatgggcatccagcatctccaaatggtcctttagcatctccaggtggtattccatcttcaccacaggaccttctatcctctccagatagtaccttggagtcaccagtaactgcatccccacaagtttctgaatgtagccagattagtcctgaaggagatgttgagggtgtgggtgtaaagcagaacatggatgacacgaaccacccagaaagtaaagatggtgaagtggagcctgagcaaaccaaagctcctgaaggtacagaagaaggcgcagcggtaaaagatgctgctgaagagttgattgcagccgagcagcccaaatcctgggctgactacagcgatggagaggttgaggtcgttgaggttgcaagctaatgaaaatacgaccttctcagatagccaacacagagtggaatttttatttctcgaacagatgagcatttctccttctcaatagatggtgcatttttttacagtgcgggcttctcccgctgtattttctgctaaagaaaagatgctgcttttttggggatagactgaattgccttccagtggcattcaatgacctttgggacttgaaattttgaagactttccagaatgtgtcagcctttgggatttggcatttcttcatctatttttttgctgcgaagaattttggggaataagagcacctcaaagtatcagcaggggagatacggcgttaacatttcatcatttccccatcttgctcctgatttcccccccttggtgaatgtactgtcgacttaacgtctttcatagttatttctttgttacaataaatagactttttgaaccatgtataaaatataaagcaagagattttatctttccacacttgcggttaatccgagcttgtatagcatcgaaaattcgagatcgaactaaagaaagcttcctattgaatttcgcttttaacactagctctgttggctcatttagatgattcctatgattcctgtggttgtcacctaacttgatctgtgataaaaatcaactggacttggagcttgtctgtggataaatccataaatgatacaatgataaatggtactccattcctatttatatttcatttgacttttttaccctaaagtttggctcgtcttattcaaaaaatttcataattattattaaacattaccgcgatatcgtttgccatataacatactttagtgattttttttatttttttcttaaaattttgaataagacaagttaaaattttgaataagacaagacaatcaaatttgatataaaaaagttaaataagttatatattaggagaaatggagtatgggtctgcgtttag

SEQ ID NO: 56211 - DNA, 5947 bp, Zea Mays
ctgtcctcttctcactctgcacgaaccacttcaggtccaggagcagcaggagtacataggctacctgctgtactaggcacctagctattagcagcagctgccgcgcgcggctactatatatccccataaacaccttatcccctctctacctctctccactgcatgcctcgctatctcctcctcctcctcagcagcagctctgcaatgccaagggcgccttagccgagttcctcccgagtccagactggtggtggcgataaggttgtcgcgaggggttccgcgcgcggtgctgcgctgcccagagctcggttagcttcggggcggcggcagcccggcagccatggcgcccaaggcggggaaggccaagcccaaggccaggggcgacaggaagaagaaggaggagaaagtgctgcccaccgtgctggacgtcaccgttgagacgccggactacacgctgctcacgctcaagggcatatcaacggacaggatcctcgacatccggaagctcctggccgtccacgtggacacctgccacctcaccagcttctccctgtcccacgaggtccgtgggggccagctcaaggacacggtggagatcgccgccctcaagccctgccacctcaccatcgtcgaagaggactacacggaggagctcgccgtcgcgcacgtgcgtcgcctgctcgacatcgtcgcctgcaccaccgtgttcggggcgaagaagcccgagccgaagcccgatgcggcggatgccgcggccgagtccgccaaagccggctcgccctcgcccggtaagacggcgcccggcggcggcgaggagcccatgtacccgccgccgaagctggagcagttctacgatttcttcaccttctcgcacctcacgccgccgctgcactacattcggaggtcgtcccgcccattcgttgatgacaagagagaagacgacttcttccagatcgatgtgcgagtttgtaacgggaaacccgtgacgattgtggcatcccaagaaggattctaccctgcagggaagcgagcactcatcagccgctccctcgttggactgttgcagcagacaagccgtgcatttgatggagcctacaaggctctgatgaaggcatttgtcgagcacaacaagtttggaaatctaccttatgggttccgatcaaacacatgggtggctccccctgtcgttgccgactcaccatcagtgttcccacctctcccaaccgaagatgaaacctggggtggcagtggtggtggtcaaggaagagacggaaagcacgaccatagaccatgggtgaaagaatttgccattcttgctgcaatgccttgcaaaacagctgaggagaggcaaatcagagacagaaaggctttcctactccacagtttgtttgtggatgttgcagtcctcaaagctgttgcatctatccagcaactgatttccaaccatacaagtttacatgaaacagagaatggcaccatcggttcagttttgcacaccgagcaagtaggtgatatgaaaataatgatcacaaaggacaaaacagatgcaagctccaagctagatgtcaaattggatggaagtcaggctccagggatgtcttctgatgagcttgctcagagaaacttgttgaaaggcatcactgctgatgagagtgcaacagtacatgatacagccactcttggtgtggttattgtaaagcattgtgggtatacagctgttgtccaagttccagtagatactgaactgccagctgcttctgtagcacagcaggagatccacattgaagaccagcctttattttgcctacttgcagcatgttgcatgctcatcagctgatggccgcaccctgctggagtcatccaagactttcctggataaagggaaacttgaggatgctgttagctacggcacaaaagtacgattcgttatattactattgcatccatatgtgaagaattcttgaactggtgcttctttcggtttccatcattctaatctgcacatgattgtgcaggctcttgcaaaacttgttgctgtttgtggtccttatcatagaatgacggcaggagcatacagccttcttgcagtagtgctttatcatactggtgacttcaaccaggtatattcttcttaggacttcatcactagctctcactagtagcattcactattccacaatatttgtcaattttacctgcataagatatgtctgcagaacaattaggtgctcatgaaattgcatctatcctagacatgttactgtgtttcaaattggaatcgtatttcattattttggttgagcttgtaagttgctttagctttgtcaatgctatgatattacatctctgagttacctgtagtacatatgcacttgtcaggtgtttaatttttttccacaacagcgtagttctatcctatgctgtgaaggcttaactttataaatgttgctgctctttcaaacaggcaaccatctatcaacagaaggctttagatattaatgagagggaacttggacttgaccacccagatacaatgaaaagctatggagatcttgctgttttctactatcgcctgcaacatacagaactagcattaaagtatgtcaatcgtgccctatatcttttgcaccttacatgtggcccttctcatcctaacaccgctgcaacttatatcaatgttgcgatgatggaagaagggttgggcaatgtccatgttgcactccgttacctgcacgaagctctaaaatgtaaccaacggttgcttggcgctgatcacatacagactgcggcaagttatcatgctattgctattgctttgtctttaatggaagcgtactcattgagtgtccaacatgaaaagaccacgctaaggatacttcaagcaaagcttggatccgaggatcttcggacccaggatgcttctgcttggctggaatactttgaatccaaggcactagagcagcaggaagcagcacgaaatggtactccaaagcctgatgcttcaatagcaagcagaggacatctgagtgtatcagatcttttggattatatcaacccggatgatgagctcaaggctaaggaaatgcaaaggaaacaagtccgtgctaagatcaaaggtcgcactgggcaaaaccaatctgaacttgttgatgatgaagatcaaaggagtcctgcacctaacaatgataaaaatttattaaccgagaatggaaactctggagtaaaagagaatggaacctttgttgagcatgtgaaagatgaaatatcaagtgacactgcaatccacatacctcaagatggttttactgaagagtgcacatctgatgaggggtggcaagcggctgttccaaaggggcgatccacagggagccgcagaactggtgcaggcacgaggaggccaaatctggcaaaaattaatactagttcactaaacagtgagaatggaagatacaaaggaagaggtatatctaacttctcttcccctcgagtttcacctagtgaggctgcagtttctattggttctagacctcttgcaaagaaattggctaagagttcaagcttcaattccaaagcagttagcactgccgtctcatcgaatactggtgagaattctttcaatctcaactccaagccagcaagccctgccattgccacagctgctgccaaggtgataccatccacaacaccaagtgctagtcaaacagtaaggaagtcactttcatacaaggaggtagcaatagctgcaccagggactcttgccaaagcatcgagtgatgtacacacagaagaaaaagatacaggtgaccaaggtgcaagtcctgaaagttctaattctaagtctccaaaagaaatcaatggtcacccttctggggagaaagatggggcaatagaagtgtcgccacaggatgatacttcacaggtatctaaatcacctgatggaggtaaacctgagcaaactgatgttttgattggttcaaatcaaccagatacagtacataaaaaatcctcagatccagcagagacatctgtagcaaaggacatagatcttccggccccggtcatatcatctggaacacaaactgaggctgacaccccaaatgatgaagcaccaactgcaattgaggcaaatgattcttcctccaatgacgatgaaagagattcaggagcagatacaccagaacaactgtctagtggaggtgaaaatgagaaatcttcactatctgagagtgaaaagaatgatacaccaagagaaggtgctaaagagacaacaagtaaactttctgctgctgcggctccattcaatccatccagcgtaccagcttttggttcaatggctgtcccaggtttcagagaacatggagggctattgccatcaccagccaatgtgccccctatgctgtccattcctctccgcaagcaccctcaccaatctgcaactgcaagggtaccttatggtccacgtctggctggaggctacaatagatcagggcaccgaggacttcgtaagaagcctgtgttgacaagtggtgaagcccctacagaaacaaacacgtctggccccaggattatgaaccctaacgccccagagtttgttccaggtcaatctcggagtcctaatgggcatccagcatctccaaatggtcctttagcatctccaggtggtattccatcttcaccacaggaccttctatcctctccagatagtaccttggagtcaccagtaactgcatccccacaagtttctgaatgtagccagattagtcctgaaggagatgttgagggtgtgggtgtaaagcagaacatggatgacacgaaccacccagaaagtaaagatggtgaagtggagcctgagcaaaccaaagctcctgaaggtacagaagaaggcgcagcggtaaaagatgctgctgaagagttgattgcagccgagcagcccaaatcctgggctgactacagcgatggagaggttgaggtcgttgaggttgcaagctaatgaaaatacgaccttctcagatagccaacacagagtggaatttttatttctcgaacagatgagcatttctccttctcaatagatggtgcatttttttacagtgcgggcttctcccgctgtattttctgctaaagaaaagatgctgcttttttggggatagactgaattgccttccagtggcattcaatgacctttgggacttgaaattttgaagactttccagaatgtgtcagcctttgggatttggcatttcttcatctatttttttgctgcgaagaattttggggaataagagcacctcaaagtatcagcaggggagatacggcgttaacatttcatcatttccccatcttgctcctgatttcccccccttggtgaatgtactgtcgacttaacgtctttcatagttatttctttgttacaataaatagactttttgaaccatgtataaaatataaagcaagagattttatctttccacacttgcggttaatccgagcttgtatagcatcgaaaattcgagatcgaactaaagaaagcttcctattgaatttcgcttttaacactagctctgttggctcatttagatgattcctatgattcctgtggttgtcacctaacttgatctgtgataaaaatcaactggacttggagcttgtctgtggataaatccataaatgatacaatgataaatggtactccattcctatttatatttcatttgacttttttaccctaaagtttggctcgtcttattcaaaaaatttcataattattattaaacattaccgcgatatcgtttgccatataacatactttagtgattttttttatttttttcttaaaattttgaataagacaagttaaaattttgaataagacaagacaatcaaatttgatataaaaaagttaaataagttatatattaggagaaatggagtatgggtctgcgtttag

SEQ ID NO: 56212 - DNA, 994 bp, Zea Mays
agtacgccgtttgcgccatcgttacgtccaccagaaggaaaacccaagccaacgacgacggcacggccaagaaacggggagtgccttccaaggcgaccgccccctctcgcgctccatacgtccatccgtcggcccagagccacaagataacgcagccaagaacaagagacaccgccgagcgagcgaggcggggagaagcaggtccaggaccaggagaaaggaaaaggaagcccagctctctctagcctggagccgagaagccgagggggcgaaggagcagcaaggcatggaggagcccgttccggctgatccccccaggattttctggaagtcaaggagttcagccaatggccggagcctgcaacaagagcctgacaaagacgctaccgaggaaactaacgagcaggctcaagaggaacccatgaagaccgacgacgcaacggacacagcagcagcagcagcagctacagctgagccgtacccgaaagctaacctatccgagaagcggaaggctctcttcgagcctctcgagccgatcaacggcaagcgcggcgctgctgagacgctgctcccaccgccggactttgagcccgcgtcgtaccccaaggggtggctggtgggcaagaaacgcaagctcgtcaacgtagacgtcgtggagagcatgcggaggattgcgatccaggaaatgaacagaaaggaccgtgagatcaatgggctgaacgagcagctagaggaagactcccgcgtgctggagcttctgcagaagcagctggctgacgagcgcaggaagcggacagagatcgagaaggagaactccatgctccatgagcaggtcaccatgctgatgaacatgctcgacgagaacgagggtttcgacgaggacggagaggccccgccgcccgattccttcgattaagcgaaatgtaaacaagatgtgatttcccaatgttgcatgcgtgtggtgtttctcgatcggcgcggatgaggcaatgag

SEQ ID NO: 56213 - DNA, 955 bp, Zea Mays
agtacgccgtttgcgccatcgttacgtccaccagaaggaaaacccaagccaacgacgacggcacggccaagaaacggggagtgccttccaaggcgaccgccccctctcgcgctccatacgtccatccgtcggcccagagccacaagataacgcagccaagaacaagagacaccgccgagcgagcgaggcggggagaagcaggtccaggaccaggagaaaggaaaaggaagcccagctctctctagcctggagccgagaagccgagggggcgaaggagcagcaaggcatggaggagcccgttccggctgatccccccaggattttctggaagtcaaggagttcaggttcaggaccgtgagatcaatgggctgaacgagcagctagaggaagactcccgcgtgctggagcttctgcagaagcagctggctgacgagcgcaggaagcggacagagatcgagaaggagaactccatgctccatgagcaggtcaccatgctgatgaacatgctcgacgagaacgagggtttcgacgaggacggagaggccccgccgcccgattccttcgattaagcgttgttacagtactatatccgttttctttttcccgtcagtgtgaaatcatacgtctctaggtgctggtttcagagtatccgagagatatgggctagctgtgtagtaggatttcattggtggtcgtattccattacatggctttggcttctgtagataaagggtgcattgcatgtctgttgtactgtactgtacctactccttttctaggcttcaaaagtgtatgtgagaaactagcaacatgttatgtttgaatcgaagtgtatgtacatgttacttaaaattcttccttgctatgccaaaattgcaggaaatgtaaacaagatgtgatttcccaatgttgcatgcgtgtggtgtttctcgatcggcgcggatgaggcaatgag

SEQ ID NO: 56214 - DNA, 1369 bp, Zea Mays
agtacgccgtttgcgccatcgttacgtccaccagaaggaaaacccaagccaacgacgacggcacggccaagaaacggggagtgccttccaaggcgaccgccccctctcgcgctccatacgtccatccgtcggcccagagccacaagataacgcagccaagaacaagagacaccgccgagcgagcgaggcggggagaagcaggtccaggaccaggagaaaggaaaaggaagcccagctctctctagcctggagccgagaagccgagggggcgaaggagcagcaaggcatggaggagcccgttccggctgatccccccaggattttctggaagtcaaggagttcagccaatggccggagcctgcaacaagagcctgacaaagacgctaccgaggaaactaacgagcaggctcaagaggaacccatgaagaccgacgacgcaacggacacagcagcagcagcagcagctacagctgagccgtacccgaaagctaacctatccgagaagcggaaggctctcttcgagcctctcgagccgatcaacggcaagcgcggcgctgctgagacgctgctcccaccgccggactttgagcccgcgtcgtaccccaaggggtggctggtgggcaagaaacgcaagctcgtcaacgtagacgtcgtggagagcatgcggaggattgcgatccaggaaatgaacagaaaggttgacacatttgaaaaaaatatatcctcaaatgttgttggcttctgtttttaatctgtgataaagagaccgtgagatcaatgggctgaacgagcagctagaggaagactcccgcgtgctggagcttctgcagaagcagctggctgacgagcgcaggaagcggacagagatcgagaaggagaactccatgctccatgagcaggtcaccatgctgatgaacatgctcgacgagaacgagggtttcgacgaggacggagaggccccgccgcccgattccttcgattaagcgttgttacagtactatatccgttttctttttcccgtcagtgtgaaatcatacgtctctaggtgctggtttcagagtatccgagagatatgggctagctgtgtagtaggatttcattggtggtcgtattccattacatggctttggcttctgtagataaagggtgcattgcatgtctgttgtactgtactgtacctactccttttctaggcttcaaaagtgtatgtgagaaactagcaacatgttatgtttgaatcgaagtgtatgtacatgttacttaaaattcttccttgctatgccaaaattgcaggaaatgtaaacaagatgtgatttcccaatgttgcatgcgtgtggtgtttctcgatcggcgcggatgaggcaatgag

SEQ ID NO: 56215 - DNA, 832 bp, Zea Mays
agtacgccgtttgcgccatcgttacgtccaccagaaggaaaacccaagccaacgacgacggcacggccaagaaacggggagtgccttccaaggcgaccgccccctctcgcgctccatacgtccatccgtcggcccagagccacaagataacgcagccaagaacaagagacaccgccgagcgagcgaggcggggagaagcaggtccaggaccaggagaaaggaaaaggaagcccagctctctctagcctggagccgagaagccgaggtgaggtcgtggttggcctgggagcgaggaggaatttcgaggcgggaagaagcagagatgatttagcggtttggaagctggttgatgggtgcaattcgttttgtgctgctgtagggggcgaaggagcagcaaggcatggaggagcccgttccggctgatccccccaggattttctggaagtcaaggagttcagccaatggccggagcctgcaacaagagcctgacaaagacgctaccgaggaaactaacgagcaggctcaagaggaacccatgaagaccgacgacgcaacggacacagcagcagcagcagcagctacagctgagccgtacccgaaagctaacctatccgagaagcggaaggctctcttcgagcctctcgagccgatcaacggcaagcgcggcgctgctgagacgctgctcccaccgccggactttgagcccgcgtcgtaccccaaggggtggctggtgggcaagaaacgcaagctcgtcaacgtagacgtcgtggagagcatgcggaggattgcgatccaggaaatgaacagaaaggcagttttgttgctgaacatg

SEQ ID NO: 56216 - DNA, 1309 bp, Zea Mays
cttaaatccataataactagcaggattttaatagcatatctggatggcttcattgtgtccaacagaaccatgtaatgtaactgggaccatctcctgcaaaaaatggaagtgtaactgggaccataacattaggaaatggcaagtgaagcagaagaggtttaaggagagaatctggtgaacttgtgtaactcatcagtctgaaagacgagatgggcattgtccacgaaattgagaaaataactggtaatggaattttcttacaatcaataaatcagatattaagagactaaagtatgaggacaggcggacagcaaccaggacagagttatctgccattagtttagttgccacttttccccaaatctttttgcttcacagagtgggagagtaagtaactaagagcatctcgaatgtcaaagactcaagagggtgtcactgccccatcaaacaaaaaaatgctaaatggactgtgttatacaaataaaataaagtgagcgtaggttaattcacaaaagatactgcagccctgattaaatttaaaattgtcgacttcaacatgttttccctcaacacaccgtactgtagagttttaggatgtcccccttctttaaaagaaaaaggaaattatgactatagttactgggtacccatgcaatcattaggatatagcctctagaacattgttatgtgatatcatgaacagcctagataggcaataatagagaccaggggacttttactattccaacaaactagtgcatgtgaagatgtgtacttgttttcttttcaagaatagcgacagtgaggttgaaaaagtaagaacctcgtcaatgaagtcttgtatattgacacttagagaagcctcttagtcacccttcactcatcactggcaacgtagatcatgagacatgagttagtaacaatgcaatagtttgcactcacctggaaatagctgcactgaaacaaatttattttaaaggaccaccactctacattcctgccattgccataatttgtgattacctgacttgccataaagcaaacttttgtatatcactaatacccttgagttccgtgacagcctgaaagacatcaaagttactagcgttaggaataagttataaccagcaaaaggcagttgtgggacacttgtacttgatgagtgttaagctcaattgtttgtgcattttgagacatgataatgctcactaacatgcctgcctaagtaatacgggcgtcaacagagagaaacacacctagtaagcacttgaatgaagctgccgctatacgactactggtttcgataaag

SEQ ID NO: 56217 - DNA, 1993 bp, Zea Mays
cgtcccttcgcccagacccccaccggaagggctctcatcgtcccctccactccactcgtttctttcgcttcccgcggcgaaagccctcgaagcagataaggcctaccggctgccgccgtgcccgtgctcgcgctcgaccaccgccggccatggtcggcgtcgccctcgcgccggcagtgtcccgcgtgccttgccgtcccggcgcttccttccacgcctcgcgcccctcctcttcggcgcggctcccggccaggccgcgggcgcgggcgcgggcgccgccggagaggctcgtggttgtcgcgcggtactcgtcctcgtacgaggtcgagggcgaggaggaggaggaagatgaggaagggctcgggggtggcggaggctgggggaggagggaccgcgggcccgaccccgactacgacccggcccttgacatcgaacgcatcgagtcctcgaccgtaaggctattggacgaacagaaaagaatggttggtgtagtatctgtcagcgaggcagttcagattgcagacgataatgatcttatactggcaatattatcaatggatggggaccccccagtacttcgactctttgatgagagagattacaaaaaacataggtatgaacaacagaagaagaaaaagattcagcagaaaagatctgtcgcgaaacgcatgggcttgaaggagctgaaaatgggatacaacattgacatccatgattacagcgtgaggcttaaagctgcaaaaaagtttcttaaagctggcgacaaggttaagataattgtgaacctgaaaggacgggaaaacttgtacaaaaaagaagctatcgaactccttagaagattccaaaatgacgttggcgagctggcgaccgaagaaagtaagaatttcgcggagaggaatatatatctggttcttgttcccaataagatagctatacagaaagaacaggatgaattgaacaaaaagggtgctgtgagagaagagaaagaccaatcagacagtgatgaaccagaagagaacgaccaaccagacagcgatgtacccctgacagaactgctggaggaaagtatggaacccgaggcagaagtctcagcaaacgtttgatttgaactgtagaggccaaggtgcctgagattgaaacaagtatcacgcaggtacagttgctgtagaattgcagctctcgtaaatacaaggcaggctggttcttttgtgcaacaattatatctgttaaactccatctccacaagctatccgataggcgccaaggcgtctgacaagtaaacaaggcttgatgatgtatgtcctccaagtctccaacccctcagcattgaaggatgatgatacctaggaactggaaatcaccacccctcgcataaatggattgagacagagaaaagttgagacgtgtctatttgacaagtgcacatgttattgcgagtttgagaccttgtgtaagagcctaccattgtgttctggaagagttattctgtataaaaaagtggtctttgttttaccacctgaatgcaggacttccttccaggacaggatatagatgattttgatcattggtggtgcttcaatagtgctcggttgggtggaatgagtaaaaagggctttgactccttggttgctttaggcgcgtggatgttgtggaaacatagaaatggtgttgtcttcaatggctcccatccaaatttgatgggggtcgtctggttggccagggaggaagctttcttgtggtctttggctggggctaagggtttttcttacctcctagctcaaagacgggtggtgtagtttttttttttctctgttttagttggggtgtttgtcagctgacaaacgctctgtccctgcccctgttccagttgttctttctggctaggtgggttcggtgtgtgtgtgtttgtgtgtgtatgtgtgtctgtctgtttcggggtatttttccctttttttcttcttaatatattgatgcgcagctctcctgcgtgttc

SEQ ID NO: 56218 - DNA, 1983 bp, Zea Mays
cgtcccttcgcccagacccccaccggaagggctctcatcgtcccctccactccactcgtttctttcgcttcccgcggcgaaagccctcgaagcagataaggcctaccggctgccgccgtgcccgtgctcgcgctcgaccaccgccggccatggtcggcgtcgccctcgcgccggcagtgtcccgcgtgccttgccgtcccggcgcttccttccacgcctcgcgcccctcctcttcggcgcggctcccggccaggccgcgggcgcgggcgcgggcgccgccggagaggctcgtggttgtcgcgcggtactcgtcctcgtacgaggtcgagggcgaggaggaggaggaagatgaggaagggctcgggggtggcggaggctgggggaggagggaccgcgggcccgaccccgactacgacccggcccttgacatcgaacgcatcgagtcctcgaccgtaaggctattggacgaacagaaaagaatggttggtgtagtatctgtcagcgaggcagttcagattgcagacgataatgatcttatactggcaatattatcaatggatggggaccccccagtacttcgactctttgatgagagagattacaaaaaacataggtatgaacaacagaagaagaaaaagattcagcagaaaagatctgtcgcgaaacgcatgggcttgaaggagctgaaaatgggatacaacattgacatccatgattacagcgtgaggcttaaagctgcaaaaaagtttcttaaagctggcgacaaggttaagataattgtgaacctgaaaggacgggaaaacttgtacaaaaaagaagctatcgaactccttagaagattccaaaatgacgttggcgagctggcgaccgaagaaagtaagaatttcgcggagaggaatatatatctggttcttgttcccaataagatagctatacagaaagaacaggatgaattgaacaaaaagggtgctgtgagagaagagaaagaccaatcagacagtgatgaaccagaagagaacgaccaaccagacagcgatgtacccctgacagaactgctggaggaaagtatggaacccgaggcagaagtctcagcaaacgtttgatttgaactgtagaggccaaggtgcctgagattgaaacaaggtacagttgctgtagaattgcagctctcgtaaatacaaggcaggctggttcttttgtgcaacaattatatctgttaaactccatctccacaagctatccgataggcgccaaggcgtctgacaagtaaacaaggcttgatgatgtatgtcctccaagtctccaacccctcagcattgaaggatgatgatacctaggaactggaaatcaccacccctcgcataaatggattgagacagagaaaagttgagacgtgtctatttgacaagtgcacatgttattgcgagtttgagaccttgtgtaagagcctaccattgtgttctggaagagttattctgtataaaaaagtggtctttgttttaccacctgaatgcaggacttccttccaggacaggatatagatgattttgatcattggtggtgcttcaatagtgctcggttgggtggaatgagtaaaaagggctttgactccttggttgctttaggcgcgtggatgttgtggaaacatagaaatggtgttgtcttcaatggctcccatccaaatttgatgggggtcgtctggttggccagggaggaagctttcttgtggtctttggctggggctaagggtttttcttacctcctagctcaaagacgggtggtgtagtttttttttttctctgttttagttggggtgtttgtcagctgacaaacgctctgtccctgcccctgttccagttgttctttctggctaggtgggttcggtgtgtgtgtgtttgtgtgtgtatgtgtgtctgtctgtttcggggtatttttccctttttttcttcttaatatattgatgcgcagctctcctgcgtgttc

SEQ ID NO: 56219 - DNA, 2206 bp, Zea Mays
tggggacgcaaccgcggccgatatataccaagcctccgcgctgcctctatggccaccgccgccgcatccaccaccacctccgccgccgtgctcgccttcaggctcctccgccgcctgccgcgccgcctcagcgtgtcccgcgcgccgcccgcggcactcgcgtcgtcgtcgtcgtcgtcgtcgcgcagactaccgtccctcgcccgccacccgctcggtcaccgcacccggatggggcacacagccgccgctgcggccgcggccgccgaacccgctctcggactcaccaagcccaacgccgtcgagccgcctcaggtcaccttttccgcgaaagacatcgaattctccgagtggaagggcgatattctcgctgtcgccgtcacggagaaggatctgtccaaggacgcggactccaaattcgagaatgccgtcttgaagaagctggacggccagctcggcggcctcctgtcggaggctgcggcagaggaagatttcaccgggaagacggggcagtcggtggtcctccgcctcgcggggcagggcttcaagagggtgggcctgatcggtcttggtcagagcgccccgtccaccgccgccgctagccgaggcctcggcgagtctgtcgcgtctgttgccaaggccgctcaagctagcagcgctgcaatcgttcttgcctcccccagtgggatccaggaagagttcaagctgactgctgcagcagcagttgcttctggaaccgtgctggggttgtatgaggacagcagatacaaatctgaatcgaaaaaggtgcacctgaaacaggttgatattattggactgggttctggtgcagaggtggatcagaaacttaagtatgctaatgatctttcgtcgggtgtgatattcggaagagagcttgtgaactctcctgcaaatgtccttacccctgctgtgcttgcggaggaggcgtcaaagatcgcttctacttacagtgatgtgttcactgccacagtactagatgtagagaaatgcaaagaactaaagatgggttcctacttgggagttgctgcagcttctgctaaccctcctcacttcatccatttgtgctacaaacccactgatgggaacgtcaagagaaagctggctattgttgggaagggtttaacttttgacagtggtggctacaacattaagaccgggccaggctgcagcatcgagctgatgaaatttgacatgggaggctctgcagctgtatttggtgcagctaaagctttgggacaaatcaagcctcctggagtaggttcactttatagtcgctgcctgtgaaaatatgatcagtggcacaggcatgagacctggtgacattgtaactgcttccaatgggaagacaattgaggtaaataacactgacgcagaaggaaggctaacacttgctgatgctttggtctatgcttgcaaccaaggtgttgaaaagattattgatttggcaacgctgaccggcgcttgcgttgtcgcactcgggcctagcattgccggaattttcacgccgagcgacgagcttgccaaggaggttgccgctgcttccgaggtatccggcgagaagttctggagactcccgctggaagagagctactgggagtctatgaagtctggcgtggctgatatggtcaacactggcggcaggcagggaggttctattaccgccgcgctgttcctgaaacagttcgtcgacgacaaggtccagtggatgcacatcgacatggccgggccagtgtggagcgacaagaagcgggccgccaccgggttcggcgtttccaccctggtggagtgggttctcaacaactcgtcctcgtcgtgaacaaaacccatacctcccctcgtatcacaatgcctttccatgcgtttttattttgttcctcctcttttgtgctaccattccatagttgcaaactgcagagcgcctcttggcatgtgataccgttgtgatagaataatcagcatgggtagtggtgtcgggtcctcctttccctgaaagaaagcagcggcgtgctggtcgcggtcaagccatgcctgtcgccttccggctgccgctgtgggcatttgtaacgcgtctctgcccagtgaaataacgtttgttccttgtgtttgtgcccccgcccaaaagaaagctgcatcggaactgatcttcccgtgactccttcctccggagacgttgcttttgcttccg

SEQ ID NO: 56220 - DNA, 1290 bp, Zea Mays
ctttggactaatgtccttacttccattgtatgagcattgagtttcaccacgaagtgtatctttgtatcaatacatgcaggttctttcggacaagcttcctgaagtgcttgacttcagcagggatcttgcaaatttagaacctgcctcaaagatacaactgaaggagttagcagaagaaatgcaagcgataactaaaggactggaaaaagtggagcaggaactggcaacagctgaaaaggatccttcagagacagagatattttacaggaaactgaatttattccttgatgacgcccaagctgaaggaaggtcgttagcttcgctttacagcagtgcggggaaaagtgccgattctctagcacattattttggtgaagatcccgtgcggtgtcctttcgagcaagttgtctcaacgttgctaagcttcacgaagacgttcgagcgggcccatgcggagaatgttaagcagatggagctggagaagaaaagagcacaagcggaagcagagaaagagaaggccaaactaactgcccacaagaagagggagtcgctggagcttggaatttcaggccggtgacacaccatatattgcatctgtggatagcacgcacttcactaattctgtgccgcctgatcacctagaccagcggcagaaaattttgtagcgctccttcagcgtgtatcacaaggaagctagggagaagtaatgatgtgtagtcctaatataacagttcactcgatgtacatagcagtttcagatctgttgcttctgtaaagaaaggttccacagctagctcacgaagggagctgcagtctctttggtttgtcaggaagttagggagaagtaatgttgtgttagtcctaatgtaacagttcacctaattagcgagaagcaatactgtacatagcagtttcaggtctattgctgttgtaaagaaaggttctgcaaactcgtttagctctcgatttatcttggggaattcacctgttactgccacttgctatagcaaatctgtaatcttgcgagtacattctccaatctccatttctactacgatgggcgtttggatgacggtaggagctgatatggctaagagcatgtacagttgtgtttaatgtagagtcttttgaggtgtttaaatgagatatctgcaaaaaaatgtagagtcgtctctccgtgaagtgacgtctctgtctcgtaacacaagtagcaatagacagacgacgtcacttcccattgtatgaattcgtctgttctatcaattcgatgttgtacagacgtatttactt

SEQ ID NO: 56221 - DNA, 1546 bp, Zea Mays
cgaaggagccgcttcacaatggtcagttcttcatggagatgatgaaagtaccaagggtggaatcaaaactgagaattttgtcatttaagataaagtttgttacacaggttgcggacctaaaaagtaatttgaataccatcaatttggttgctgaagaggttaggagctctgtgaaacttaagcgagtgatgcagacaattctttctttgggaaacgcattaaaccaaggaactgcaaggggtgcagctgttggatttagattggatagtcttcttaagctcagtgatatacgagcacgtaataataggatgactctcatgcattatctatgcaaggttctttcggacaagcttcctgaagtgcttgacttcagcagggatcttgcaaatttagaacctgcctcaaagatacaactgaaggagttagcagaagaaatgcaagcgataactaaaggactggaaaaagtggagcaggaactggcaacagctgaaaaggatccttcagagacagagatattttacaggaaactgaatttattccttgatgacgcccaagctgaaggaaggtcgttagcttcgctttacagcagtgcggggaaaagtgccgattctctagcacattattttggtgaagatcccgtgcggtgtcctttcgagcaagttgtctcaacgttgctaagcttcacgaagacgttcgagcgggcccatgcggagaatgttaagcagatggagctggagaagaaaagagcacaagcggaagcagagaaagagaaggccaaactaactgcccacaagaagagggagtcgctggagcttggaatttcaggccggtgacacaccatatattgcatctgtggatagcacgcacttcactaattctgtgccgcctgatcacctagaccagcggcagaaaattttgtagcgctccttcagcgtgtatcacaaggaagctagggagaagtaatgatgtgtagtcctaatataacagttcactcgatgtacatagcagtttcagatctgttgcttctgtaaagaaaggttccacagctagctcacgaagggagctgcagtctctttggtttgtcaggaagttagggagaagtaatgttgtgttagtcctaatgtaacagttcacctaattagcgagaagcaatactgtacatagcagtttcaggtctattgctgttgtaaagaaaggttctgcaaactcgtttagctctcgatttatcttggggaattcacctgttactgccacttgctatagcaaatctgtaatcttgcgagtacattctccaatctccatttctactacgatgggcgtttggatgacggtaggagctgatatggctaagagcatgtacagttgtgtttaatgtagagtcttttgaggtgtttaaatgagatatctgcaaaaaaatgtagagtcgtctctccgtgaagtgacgtctctgtctcgtaacacaagtagcaatagacagacgacgtcacttcccattgtatgaattcgtctgttctatcaattcgatgttgtacagacgtatttactt

SEQ ID NO: 56222 - DNA, 5318 bp, Zea Mays
aaactaacagctgcgcgttagtaataaaataaaacaattaaatgtagtcaaacgccaatttcttcctcctcctgccttatcgtcttcctccttcctgccttgtcttcgtcctcgctcaacgccaatctctctcctcttaccattacccatttctcaaatttccaactgaaatacgcccgccccttttcctgcgcgctccgattccaaaccctcggagctctcaagacaagagattcaacagagccggagcggtagcacctctttcctgtttgcctgtaaccttcctgctacagtacgccgcagcgattagcggcccgaacccaaatccgcaacggcctgagcgagctattgagctcggcggggcgggattctcggcgtagagagtatccttcagctgtatcgcgaaagattgagccgaatcggttgctggagttgagccagctcttggacttcctgcgagcagaagtgatccggagattggagctgctggtcctgccgcgtcatgtcgctgttccggaagttcttctataagaagccgcccgatggtctgctcctcatcacagataacgtctacgtttttgatcactgcttctccctgaaagaggtggaaggggaccatttcgatgctcacattagaggcattgcagcagatcttctggaaaattttcgcgatcactcattcatgatctcgaatttcgggactaaagaggaagaaagccctatataccatattttgtctgagtatggtatgactgtattggactaccctggccactatgagggatgtccactcctcaccatggaaatgatccactgcatcttgaagtccagcgaaagctggctttctttgggtcagcataacttactgctaatgcactgtcaacgagggagctggcctattctggctttcatgttagctgctcttctaatatacctggggcattattccgacgaggagaaagtgctggatatggtctacaagcaatcgtctttggagcttttggagatgatttcacctctgaatcccatgccttctcaaatgagatatttgcgctatatctcgacgaggaatgtcatgcctgagtggcctccagctgatagagccctcacattagattgtgttattttgaggatggttccaaattttcatggccaaggtggtttccgtccaatattcaggatatacggcccggatcatctcatgccccctgatcagactccaaaagttcttttttcaactccaaagaaaagcaaccttgtccgtttttattcacagatgaactggtgaaaatagaccttcaatgtcatgtccaaggtgatattgtcctagagtgtatccatctgtatgaggatctggatcgtgaagagatggttttccgaatcatgttcaatacagcattcatccggtcaaacatcttgatgcttaaccgtgatcacatagacatgttatggaatgcaaaagaccaattccctaaagattttcggtttgaggttatcttttccgatatggacatagttacttcacatgtcacaacagagcctgttattcatcaagagaaacaaggacttggggttgaagagtttgctaaggtgctagatatctttaaccatttggactggttggatgggaaaaaagacaccgtacctcacacaacccagctaaagatctcagcgattaccgatgaacctgagactttctttgatactcgtgaagaacttgaatctgaaagttcttctggtgaaatttattcttctagtgttgttctgaaggtcggaaatgaattggatatgcttgtcagcactaaaccgagacatattccccaagattcaagttcagctaatgttcaatccaaatcacaaactacagtgcagtctccttcgcgaatgcggcgcacagcattgttatcaccttctaaggttaaggtttcaaagaccagtgcttcaccaatggaactgtcttcaagtacaatcatgccacaacaatcatcttcgccggttcagcctcggcgagtgatgtctgactctgcagtaaaatttttatcagagataacagaatcagcatcaggtgagatgtcttgttcacaaactccagttgaacatgaaccttcctctctgatggaaaacaatccagcaccaacagcatctctgttacctttgtgcacacctcctcctcttcctccccctccacccactgtctctttactccctgttcccactaagttacccataaatactagcacaagtaccatcaacatttcccttagagcaaccgtgcgttcctctccaccttcagaaccatcagtccctcctaaagatcttttgagaaccgaagagctgggtaaatcacaagaaccttcctatgaaactcgtgggaaattacaaactgatagtactacaggttccaatgatttcatactgtcaccagccgcttcatcttcactggatgaggaattgagcaacgcaagagcatctctcccgacagatttgccagcagtacctcaaaatccagacactaggccctttgcaattcaagcgacaagatctgaaactatgccgccgccgccaccaccaccaccaccgcctccgtcaaaatcaggcatgacgctgtttcctttgacacatggtgaagaggtaaaaatcactatagaaaaagtcgtaccacatcagcctccgcatccaccagcagcagcagcgtcattttcaagctcaaatccagatgctgtatctgtaattctagctccacaaaagagagctcggtctccaccgcccccgcccctgcccccacccccagggttggcaaaaccaccattttcctctctacggtcacgatcatcacctgaagtctcattgtctcaaccgcagtttctagataacaaggacagtgcaacaatggaatatccagacaccccgtctttgacacctacattttcacaaagcgttacacgggtgcaaacactgcacgttccacctccaccaccacattcttctcaaacaccacctactccacctccaccacctccctcttcacaaagtttcccatccttaagtagaagaaatcgtgtggcagcccctcatccacctccgcctccagcaccactgtcatcccgtgttacttctgcaccatcagtaccaccttcacccccattacctcctcctaagctagccgtggccaataacacttcacagaagtcaccaacaatccgaccacctccacctccacccggcccccttcataagcttacgaagggaagtgttgccaattctaaccctcccccacatccagcattttcatttggtgcaaaggatcgtagcacagcccgctcaaaaagtcctagaagtttacgtgccaaccaggcatctaaaaggaccccgctgaagccattgcactgggtgaaagtttcaagagcaacacagggaagtttgtgggctgaaacacagaagtctgatgaaatatctaggaccccagagattgatatctctgagctggaaagtcttttctctgtaacgatgccaaatatggaggcaaaacgtcaacggcaacaacaacacccttctgttgcaacaaagcaagaaaaagttcatctgattgagctccaacgcgcaaagaattgtgaaattatgctgagaaacattaagatgccactgcctgatctaatgggtttagtagttgctcttgatgattccgtagttgatggtgatcaagtagattacctaataaagttctgtccaactaaggaagaaatggaactactcaaaagttatacgggcaaaaaggagaacctagggaactgtgaacagttcttcatggagatgatgaaagtaccaagggtggaatcaaaactgagaattttgtcatttaagataaagtttgttacacaggttgcggacctaaaaagtaatttgaataccatcaatttggttgctgaagaggttaggagctctgtgaaacttaagcgagtgatgcagacaattctttctttgggaaacgcattaaaccaaggaactgcaaggggtgcagctgttggatttagattggatagtcttcttaagctcagtgatatacgagcacgtaataataggatgactctcatgcattatctatgcaaggttctttcggacaagcttcctgaagtgcttgacttcagcagggatcttgcaaatttagaacctgcctcaaagatacaactgaaggagttagcagaagaaatgcaagcgataactaaaggactggaaaaagtggagcaggaactggcaacagctgaaaaggatccttcagagacagagatattttacaggaaactgaatttattccttgatgacgcccaagctgaaggaaggtcgttagcttcgctttacagcagtgcggggaaaagtgccgattctctagcacattattttggtgaagatcccgtgcggtgtcctttcgagcaagttgtctcaacgttgctaagcttcacgaagacgttcgagcgggcccatgcggagaatgttaagcagatggagctggagaagaaaagagcacaagcggaagcagagaaagagaaggccaaactaactgcccacaagaagagggagtcgctggagcttggaatttcaggccggtgacacaccatatattgcatctgtggatagcacgcacttcactaattctgtgccgcctgatcacctagaccagcggcagaaaattttgtagcgctccttcagcgtgtatcacaaggaagctagggagaagtaatgatgtgtagtcctaatataacagttcactcgatgtacatagcagtttcagatctgttgcttctgtaaagaaaggttccacagctagctcacgaagggagctgcagtctctttggtttgtcaggaagttagggagaagtaatgttgtgttagtcctaatgtaacagttcacctaattagcgagaagcaatactgtacatagcagtttcaggtctattgctgttgtaaagaaaggttctgcaaactcgtttagctctcgatttatcttggggaattcacctgttactgccacttgctatagcaaatctgtaatcttgcgagtacattctccaatctccatttctactacgatgggcgtttggatgacggtaggagctgatatggctaagagcatgtacagttgtgtttaatgtagagtcttttgaggtgtttaaatgagatatctgcaaaaaaatgtagagtcgtctctccgtgaagtgacgtctctgtctcgtaacacaagtagcaatagacagacgacgtcacttcccattgtatgaattcgtctgttctatcaattcgatgttgtacagacgtatttactt

SEQ ID NO: 56223 - DNA, 5463 bp, Zea Mays
aaactaacagctgcgcgttagtaataaaataaaacaattaaatgtagtcaaacgccaatttcttcctcctcctgccttatcgtcttcctccttcctgccttgtcttcgtcctcgctcaacgccaatctctctcctcttaccattacccatttctcaaatttccaactgaaatacgcccgccccttttcctgcgcgctccgattccaaaccctcggagctctcaagacaagagattcaacagagccggagcggtagcacctctttcctgtttgcctgtaaccttcctgctacagtacgccgcagcgattagcggcccgaacccaaatccgcaacggcctgagcgagctattgagctcggcggggcgggattctcggcgtagagagtatccttcagctgtatcgcgaaagattgagccgaatcggttgctggagttgagccagctcttggacttcctgcgagcagaagtgatccggagattggagctgctggtcctgccgcgtcatgtcgctgttccggaagttcttctataagaagccgcccgatggtctgctcctcatcacagataacgtctacgtttttgatcactgcttctccctgaaagaggtggaaggggaccatttcgatgctcacattagaggcattgcagcagatcttctggaaaattttcgcgatcactcattcatgatctcgaatttcgggactaaagaggaagaaagccctatataccatattttgtctgagtatggtatgactgtattggactaccctggccactatgagggatgtccactcctcaccatggaaatgatccactgcatcttgaagtccagcgaaagctggctttctttgggtcagcataacttactgctaatgcactgtcaacgagggagctggcctattctggctttcatgttagctgctcttctaatatacctggggcattattccgacgaggagaaagtgctggatatggtctacaagcaatcgtctttggagcttttggagatgatttcacctctgaatcccatgccttctcaaatgagatatttgcgctatatctcgacgaggaatgtcatgcctgagtggcctccagctgatagagccctcacattagattgtgttattttgaggatggttccaaattttcatggccaaggtggtttccgtccaatattcaggatatacggcccggatcatctcatgccccctgatcagactccaaaagttcttttttcaactccaaagaaaagcaaccttgtccgtttttattcacagtaggcagatgaactggtgaaaatagaccttcaatgtcatgtccaaggtgatattgtcctagagtgtatccatctgtatgaggatctggatcgtgaagagatggttttccgaatcatgttcaatacagcattcatccggtcaaacatcttgatgcttaaccgtgatcacatagacatgttatggaatgcaaaagaccaattccctaaagattttcggtttgaggttatcttttccgatatggacatagttacttcacatgtcacaacagagcctgttattcatcaagagaaacaaggacttggggttgaagagtttgctaaggtgctagatatctttaaccatttggactggttggatgggaaaaaagacaccgtacctcacacaacccagctaaagatctcagcgattaccgatgaacctgagactttctttgatactcgtgaagaacttgaatctgaaagttcttctggtgaaatttattcttctagtgttgttctgaaggtcggaaatgaattggatatgcttgtcagcactaaaccgagacatattccccaagattcaagttcagctaatgttcaatccaaatcacaaactacagtgcagtctccttcgcgaatgcggcgcacagcattgttatcaccttctaaggttaaggtttcaaagaccagtgcttcaccaatggaactgtcttcaagtacaatcatgccacaacaatcatcttcgccggttcagcctcggcgagtgatgtctgactctgcagtaaaatttttatcagagataacagaatcagcatcaggtgagatgtcttgttcacaaactccagttgaacatgaaccttcctctctgatggaaaacaatccagcaccaacagcatctctgttacctttgtgcacacctcctcctcttcctccccctccacccactgtctctttactccctgttcccactaagttacccataaatactagcacaagtaccatcaacatttcccttagagcaaccgtgcgttcctctccaccttcagaaccatcagtccctcctaaagatcttttgagaaccgaagagctgggtaaatcacaagaaccttcctatgaaactcgtgggaaattacaaactgatagtactacaggttccaatgatttcatactgtcaccagccgcttcatcttcactggatgaggaattgagcaacgcaagagcatctctcccgacagatttgccagcagtacctcaaaatccagacactaggccctttgcaattcaagcgacaagatctgaaactatgccgccgccgccaccaccaccaccaccgcctccgtcaaaatcaggcatgacgctgtttcctttgacacatggtgaagaggtaaaaatcactatagaaaaagtcgtaccacatcagcctccgcatccaccagcagcagcagcgtcattttcaagctcaaatccagatgctgtatctgtaattctagctccacaaaagagagctcggtctccaccgcccccgcccctgcccccacccccagggttggcaaaaccaccattttcctctctacggtcacgatcatcacctgaagtctcattgtctcaaccgcagtttctagataacaaggacagtgcaacaatggaatatccagacaccccgtctttgacacctacattttcacaaagcgttacacgggtgcaaacactgcatgttccacctccaccacctcctccatctcgaacaccgcctgttccacctccacctcctcgaacaccacctgttccgcctccaccaccaccttcatctcgaacaccgcctgttccatctccacctcctggaacaccacacgttccacctccaccaccacattcttctcaaacaccacctactccacctccaccacctccctcttcacaaagtttcccatccttaagtagaagaaatcgtgtggcagcccctcatccacctccgcctccagcaccactgtcatcccgtgttacttctgcaccatcagtaccaccttcacccccattacctcctcctaagctagccgtggccaataacacttcacagaagtcaccaacaatccgaccacctccacctccacccggcccccttcataagcttacgaagggaagtgttgccaattctaaccctcccccacatccagcattttcatttggtgcaaaggatcgtagcacagcccgctcaaaaagtcctagaagtttacgtgccaaccaggcatctaaaaggaccccgctgaagccattgcactgggtgaaagtttcaagagcaacacagggaagtttgtgggctgaaacacagaagtctgatgaaatatctaggaccccagagattgatatctctgagctggaaagtcttttctctgtaacgatgccaaatatggaggcaaaacgtcaacggcaacaacaacacccttctgttgcaacaaagcaagaaaaagttcatctgattgagctccaacgcgcaaagaattgtgaaattatgctgagaaacattaagatgccactgcctgatctaatgggtttagtagttgctcttgatgattccgtagttgatggtgatcaagtagattacctaataaagttctgtccaactaaggaagaaatggaactactcaaaagttatacgggcaaaaaggagaacctagggaactgtgaacagttcttcatggagatgatgaaagtaccaagggtggaatcaaaactgagaattttgtcatttaagataaagtttgttacacaggttgcggacctaaaaagtaatttgaataccatcaatttggttgctgaagaggttaggagctctgtgaaacttaagcgagtgatgcagacaattctttctttgggaaacgcattaaaccaaggaactgcaaggggtgcagctgttggatttagattggatagtcttcttaagctcagtgatatacgagcacgtaataataggatgactctcatgcattatctatgcaaggttctttcggacaagcttcctgaagtgcttgacttcagcagggatcttgcaaatttagaacctgcctcaaagatacaactgaaggagttagcagaagaaatgcaagcgataactaaaggactggaaaaagtggagcaggaactggcaacagctgaaaaggatccttcagagacagagatattttacaggaaactgaatttattccttgatgacgcccaagctgaaggaaggtcgttagcttcgctttacagcagtgcggggaaaagtgccgattctctagcacattattttggtgaagatcccgtgcggtgtcctttcgagcaagttgtctcaacgttgctaagcttcacgaagacgttcgagcgggcccatgcggagaatgttaagcagatggagctggagaagaaaagagcacaagcggaagcagagaaagagaaggccaaactaactgcccacaagaagagggagtcgctggagcttggaatttcaggccggtgacacaccatatattgcatctgtggatagcacgcacttcactaattctgtgccgcctgatcacctagaccagcggcagaaaattttgtagcgctccttcagcgtgtatcacaaggaagctagggagaagtaatgatgtgtagtcctaatataacagttcactcgatgtacatagcagtttcagatctgttgcttctgtaaagaaaggttccacagctagctcacgaagggagctgcagtctctttggtttgtcaggaagttagggagaagtaatgttgtgttagtcctaatgtaacagttcacctaattagcgagaagcaatactgtacatagcagtttcaggtctattgctgttgtaaagaaaggttctgcaaactcgtttagctctcgatttatcttggggaattcacctgttactgccacttgctatagcaaatctgtaatcttgcgagtacattctccaatctccatttctactacgatgggcgtttggatgacggtaggagctgatatggctaagagcatgtacagttgtgtttaatgtagagtcttttgaggtgtttaaatgagatatctgcaaaaaaatgtagagtcgtctctccgtgaagtgacgtctctgtctcgtaacacaagtagcaatagacagacgacgtcacttcccattgtatgaattcgtctgttctatcaattcgatgttgtacagacgtatttactt

SEQ ID NO: 56224 - DNA, 4276 bp, Zea Mays
aaactaacagctgcgcgttagtaataaaataaaacaattaaatgtagtcaaacgccaatttcttcctcctcctgccttatcgtcttcctccttcctgccttgtcttcgtcctcgctcaacgccaatctctctcctcttaccattacccatttctcaaatttccaactgaaatacgcccgccccttttcctgcgcgctccgattccaaaccctcggagctctcaagacaagagattcaacagagccggagcggtagcacctctttcctgtttgcctgtaaccttcctgctacagtacgccgcagcgattagcggcccgaacccaaatccgcaacggcctgagcgagctattgagctcggcggggcgggattctcggcgtagagagtatccttcagctgtatcgcgaaagattgagccgaatcggttgctggagttgagccagctcttggacttcctgcgagcagaagtgatccggagattggagctgctggtcctgccgcgtcatgtcgctgttccggaagttcttctataagaagccgcccgatggtctgctcctcatcacagataacgtctacgtttttgatcactgcttctccctgaaagaggtggaaggggaccatttcgatgctcacattagaggcattgcagcagatcttctggaaaattttcgcgatcactcattcatgatctcgaatttcgggactaaagaggaagaaagccctatataccatattttgtctgagtatggtatgactgtattggactaccctggccactatgagggatgtccactcctcaccatggaaatgatccactgcatcttgaagtccagcgaaagctggctttctttgggtcagcataacttactgctaatgcactgtcaacgagggagctggcctattctggctttcatgttagctgctcttctaatatacctggggcattattccgacgaggagaaagtgctggatatggtctacaagcaatcgtctttggagcttttggagatgatttcacctctgaatcccatgccttctcaaatgagatatttgcgctatatctcgacgaggaatgtcatgcctgagtggcctccagctgatagagccctcacattagattgtgttattttgaggatggttccaaattttcatggccaaggtggtttccgtccaatattcaggatatacggcccggatcatctcatgccccctgatcagactccaaaagttcttttttcaactccaaagaaaagcaaccttgtccgtttttattcacaggcagatgaactggtgaaaatagaccttcaatgtcatgtccaaggtgatattgtcctagagtgtatccatctgtatgaggatctggatcgtgaagagatggttttccgaatcatgttcaatacagcattcatccggtcaaacatcttgatgcttaaccgtgatcacatagacatgttatggaatgcaaaagaccaattccctaaagattttcggtttgaggttatcttttccgatatggacatagttacttcacatgtcacaacagagcctgttattcatcaagagaaacaaggacttggggttgaagagtttgctaaggtgctagatatctttaaccatttggactggttggatgggaaaaaagacaccgtacctcacacaacccagctaaagatctcagcgattaccgatgaacctgagactttctttgatactcgtgaagaacttgaatctgaaagttcttctggtgaaatttattcttctagtgttgttctgaaggtcggaaatgaattggatatgcttgtcagcactaaaccgagacatattccccaagattcaagttcagctaatgttcaatccaaatcacaaactacagtgcagtctccttcgcgaatgcggcgcacagcattgttatcaccttctaaggttaaggtttcaaagaccagtgcttcaccaatggaactgtcttcaagtacaatcatgccacaacaatcatcttcgccggttcagcctcggcgagtgatgtctgactctgcagtaaaatttttatcagagataacagaatcagcatcaggtgagatgtcttgttcacaaactccagttgaacatgaaccttcctctctgatggaaaacaatccagcaccaacagcatctctgttacctttgtgcacacctcctcctcttcctccccctccacccactgtctctttactccctgttcccactaagttacccataaatactagcacaagtaccatcaacatttcccttagagcaaccgtgcgttcctctccaccttcagaaccatcagtccctcctaaagatcttttgagaaccgaagagctgggtaaatcacaagaaccttcctatgaaactcgtgggaaattacaaactgatagtactacaggttccaatgatttcatactgtcaccagccgcttcatcttcactggatgaggaattgagcaacgcaagagcatctctcccgacagatttgccagcagtacctcaaaatccagacactaggccctttgcaattcaagcgacaagatctgaaactatgccgccgccgccaccaccaccaccaccgcctccgtcaaaatcaggcatgacgctgtttcctttgacacatggtgaagaggtaaaaatcactatagaaaaagtcgtaccacatcagcctccgcatccaccagcagcagcagcgtcattttcaagctcaaatccagatgctgtatctgtaattctagctccacaaaagagagctcggtctccaccgcccccgcccctgcccccacccccagggttggcaaaaccaccattttcctctctacggtcacgatcatcacctgaagtctcattgtctcaaccgcagtttctagataacaaggacagtgcaacaatggaatatccagacaccccgtctttgacacctacattttcacaaagcgttacacgggtgcaaacactgcatgttccacctccaccacctcctccatctcgaacaccgcctgttccacctccacctcctcgaacaccacctgttccgcctccaccaccaccttcatctcgaacaccgcctgttccatctccacctcctggaacaccacacgttccacctccaccaccacattcttctcaaacaccacctactccacctccaccacctccctcttcacaaagtttcccatccttaagtagaagaaatcgtgtggcagcccctcatccacctccgcctccagcaccactgtcatcccgtgttacttctgcaccatcagtaccaccttcacccccattacctcctcctaagctagccgtggccaataacacttcacagaagtcaccaacaatccgaccacctccacctccacccggcccccttcataagcttacgaagggaagtgttgccaattctaaccctcccccacatccagcattttcatttggtgcaaaggatcgtagcacagcccgctcaaaaagtcctagaagtttacgtgccaaccaggcatctaaaaggaccccgctgaagccattgcactgggtgaaagtttcaagagcaacacagggaagtttgtgggctgaaacacagaagtctgatgaaatatctaggaccccagagattgatatctctgagctggaaagtcttttctctgtaacgatgccaaatatggaggcaaaacgtcaacggcaacaacaacacccttctgttgcaacaaagcaagaaaaagttcatctgattgagctccaacgcgcaaagaattgtgaaattatgctgagaaacattaagatgccactgcctgatctaatgggtttagtagttgctcttgatgattccgtagttgatggtgatcaagtagattacctaataaagttctgtccaactaaggaagaaatggaactactcaaaagttatacgggcaaaaaggagaacctagggaactgtgaacagttcttcatggagatgatgaaagtaccaagggtggaatcaaaactgagaattttgtcatttaagataaagtttgttacacaggttgcggacctaaaaagtaatttgaataccatcaatttggttgctgaagaggttaggagctctgtgaaacttaagcgagtgatgcagacaattctttctttgggaaacgcattaaaccaaggaactgcaaggggtgcagctgttggatttagattggatagtcttcttaagctcagtgatatacgagcacgtaataataggatgactctcatgcattatctatgcaagtgaccgtattagaagattaaatgtacc

SEQ ID NO: 56225 - DNA, 3962 bp, Zea Mays
aaactaacagctgcgcgttagtaataaaataaaacaattaaatgtagtcaaacgccaatttcttcctcctcctgccttatcgtcttcctccttcctgccttgtcttcgtcctcgctcaacgccaatctctctcctcttaccattacccatttctcaaatttccaactgaaatacgcccgccccttttcctgcgcgctccgattccaaaccctcggagctctcaagacaagagattcaacagagccggagcggtagcacctctttcctgtttgcctgtaaccttcctgctacagtacgccgcagcgattagcggcccgaacccaaatccgcaacggcctgagcgagctattgagctcggcggggcgggattctcggcgtagagagtatccttcagctgtatcgcgaaagattgagccgaatcggttgctggagttgagccagctcttggacttcctgcgagcagaagtgatccggagattggagctgctggtcctgccgcgtcatgtcgctgttccggaagttcttctataagaagccgcccgatggtctgctcctcatcacagataacgtctacgtttttgatcactgcttctccctgaaagaggtggaaggggaccatttcgatgctcacattagaggcattgcagcagatcttctggaaaattttcgcgatcactcattcatgatctcgaatttcgggactaaagaggaagaaagccctatataccatattttgtctgagtatggtatgactgtattggactaccctggccactatgagggatgtccactcctcaccatggaaatgatccactgcatcttgaagtccagcgaaagctggctttctttgggtcagcataacttactgctaatgcactgtcaacgagggagctggcctattctggctttcatgttagctgctcttctaatatacctggggcattattccgacgaggagaaagtgctggatatggtctacaagcaatcgtctttggagcttttggagatgatttcacctctgaatcccatgccttctcaaatgagatatttgcgctatatctcgacgaggaatgtcatgcctgagtggcctccagctgatagagccctcacattagattgtgttattttgaggatggttccaaattttcatggccaaggtggtttccgtccaatattcaggatatacggcccggatcatctcatgccccctgatcagactccaaaagttcttttttcaactccaaagaaaagcaaccttgtccgtttttattcacaggcagatgaactggtgaaaatagaccttcaatgtcatgtccaaggtgatattgtcctagagtgtatccatctgtatgaggatctggatcgtgaagagatggttttccgaatcatgttcaatacagcattcatccggtcaaacatcttgatgcttaaccgtgatcacatagacatgttatggaatgcaaaagaccaattccctaaagattttcggtttgaggttatcttttccgatatggacatagttacttcacatgtcacaacagagcctgttattcatcaagagaaacaaggacttggggttgaagagtttgctaaggtgctagatatctttaaccatttggactggttggatgggaaaaaagacaccgtacctcacacaacccagctaaagatctcagcgattaccgatgaacctgagactttctttgatactcgtgaagaacttgaatctgaaagttcttctggtgaaatttattcttctagtgttgttctgaaggtcggaaatgaattggatatgcttgtcagcactaaaccgagacatattccccaagattcaagttcagctaatgttcaatccaaatcacaaactacagtgcagtctccttcgcgaatgcggcgcacagcattgttatcaccttctaaggttaaggtttcaaagaccagtgcttcaccaatggaactgtcttcaagtacaatcatgccacaacaatcatcttcgccggttcagcctcggcgagtgatgtctgactctgcagtaaaatttttatcagagataacagaatcagcatcaggtgagatgtcttgttcacaaactccagttgaacatgaaccttcctctctgatggaaaacaatccagcaccaacagcatctctgttacctttgtgcacacctcctcctcttcctccccctccacccactgtctctttactccctgttcccactaagttacccataaatactagcacaagtaccatcaacatttcccttagagcaaccgtgcgttcctctccaccttcagaaccatcagtccctcctaaagatcttttgagaaccgaagagctgggtaaatcacaagaaccttcctatgaaactcgtgggaaattacaaactgatagtactacaggttccaatgatttcatactgtcaccagccgcttcatcttcactggatgaggaattgagcaacgcaagagcatctctcccgacagatttgccagcagtacctcaaaatccagacactaggccctttgcaattcaagcgacaagatctgaaactatgccgccgccgccaccaccaccaccaccgcctccgtcaaaatcaggcatgacgctgtttcctttgacacatggtgaagaggtaaaaatcactatagaaaaagtcgtaccacatcagcctccgcatccaccagcagcagcagcgtcattttcaagctcaaatccagatgctgtatctgtaattctagctccacaaaagagagctcggtctccaccgcccccgcccctgcccccacccccagggttggcaaaaccaccattttcctctctacggtcacgatcatcacctgaagtctcattgtctcaaccgcagtttctagataacaaggacagtgcaacaatggaatatccagacaccccgtctttgacacctacattttcacaaagcgttacacgggtgcaaacactgcatgttccacctccaccacctcctccatctcgaacaccgcctgttccacctccacctcctcgaacaccacctgttccgcctccaccaccaccttcatctcgaacaccgcctgttccatctccacctcctggaacaccacacgttccacctccaccaccacattcttctcaaacaccacctactccacctccaccacctccctcttcacaaagtttcccatccttaagtagaagaaatcgtgtggcagcccctcatccacctccgcctccagcaccactgtcatcccgtgttacttctgcaccatcagtaccaccttcacccccattacctcctcctaagctagccgtggccaataacacttcacagaagtcaccaacaatccgaccacctccacctccacccggcccccttcataagcttacgaagggaagtgttgccaattctaaccctcccccacatccagcattttcatttggtgcaaaggatcgtagcacagcccgctcaaaaagtcctagaagtttacgtgccaaccaggcatctaaaaggaccccgctgaagccattgcactgggtgaaagtttcaagagcaacacagggaagtttgtgggctgaaacacagaagtctgatgaaatatctaggaccccagagattgatatctctgagctggaaagtcttttctctgtaacgatgccaaatatggaggcaaaacgtcaacggcaacaacaacacccttctgttgcaacaaagcaagaaaaagttcatctgattgagctccaacgcgcaaagaattgtgaaattatgctgagaaacattaagatgccactgcctgatctaatgggtttagtagttgctcttgatgattccgtagttgatggtgatcaagtagattacctaataaagttctgtccaactaaggaagaaatggaactactcaaaagttatacgggcaaaaaggagaacctagggaactgtgaacagtcaacattggtgtagacgacaa

SEQ ID NO: 56226 - DNA, 1861 bp, Zea Mays
ttcggcaccccagcggcccagccgtcgccgcgtgcgagtcccccagctccgggctccggccaccttctcgagcaccgctcgcccggagaataatcccgccgcagacgccgacgccgccattagcttgatgaatcaaaaacaaggagagagcgacgaggacgccccgcgctgccccacgccccgtgggttcgtcctcgggcgctgctccctgtgcggagcgatggatgagggcgcggaaggagctgctcccgcagtcgctgttgggcacgagacgttgaggcaaggaggagacggaggtgaagacggcgtcggcgacagcgatgactacgctgcaagctgccccccgcaccctcggttcgtccacgggctctgctcacggtgcggggcggagaaggaagaggaggatggaggagttgctcccccccccggagtcgccgttggtcacgagacgatgaggcaaggaggagaccgagacggcgactactacgctgcgagttgccccccgcaccctgggttcgtccatggggtctgggaggcggctggaggagatgctctccccggagttgccgttgggtacgatgtgacgaatcaaggaagaggagacgaggacgataacagcgacgaagacgaagacgacgacactgacactgtcgtcgagtacatccacggcgagggcccggtgctgccagtgccagccatagaggaggcgatgagcattgtcagcgcgtccgacagggcgaccctcatgcgcgagaggaagctgatcctcatcctggacctggaccacacgctgctcaactccacgagtctatacgacctctcccccgtcgagcaagccaaggggtttacgccctacacatttggagacaccagcatcgacctcttccgagtggacatcgacaacctcagcatgctcgtcaagcttggggcgttcgcacggggcttcctcaagcaggcgaacgccttattcgagatgcacgtgtacaccctgggcatccgagcctacgcgagggcggccgtccggctgctggacccgaacggcatctacttcggcggcaggatcgtgtccagaaacgagtcgacgaaggagaacacgaagagcctcgacgtcatccagggcgccgatcccgccatggtggtgatcctcgatgacacggacggtgtctggccggggtacccggataacctcatcctcatggacaggtaccgctacttcgcctccacctgccgcacattcgactacgacatcccgtccctggcggagcagggcttggaagagagggagcacgacggctcgctggccgtggtgctgggcgccctgcagcgcatccaccagggtttcttcgacggccaccgcgcggacgtcagggaggtgatcgcgaaggtgcggagccagatgtggaccgcagcgcagcaccgagtttgaaactatatatgaaatcatgtcttgatgtttgataaataaaatgcatcaacggtccacgaaggaaattccacggcggagcagcagcacgcctcgccggcacccgacaccaagcacggcaggcagggtgacgtgctcccaagtccccaacccattccgtgagctcgtggtctgcacatgagccaaactttgggtaccgccaagcatcgtcatgcctcacgccagccacccaccggggcacgtcaacgtccccctgacgacaaagacgaaattgacagtttcctttatcattggcagcgctgtttgggcagcagctgcagcagcaaaatcttcaggcatacagtaggcagccagcagctgcagctgctgcagaattagcacagcctatagatctgtactgtacaataatataatactaatatattcactaattttact

SEQ ID NO: 56227 - DNA, 3056 bp, Zea Mays
aagagaagaatagaagaaaacaagatagaggaaagagaaattccttataactgctattatgtggaggcgtggaacgctcggagcccaatccaaagaagcccaccggcccacctcacaacggcctgttccgcgccctaagtttgctgcaacgccgccaccaatttgcagctccagcaaacggctcgtcgccgtcgcggactcgcagccactccggagcgttgcctcacctgtgtgctcctcgccggcctcgacaactccccggattgtcatagtcgaggcggttctagtcgctgatggtggccatggcgaggaaggacgaggaagaggggcccgcggaccgcgtgccgcacctgccgtggatgcggtaccccgtcgatatcgacaccttctccggccgccccgtcacacagctaccccgcctcgacccgagactggtagaggctttgcagagaatgggaattgaatcatttttcccagttcaagaagcagcctggctggaaacaattggtcctggcgcttttgagagggatatctgtatcaactccccaactggatctggcaaaactcttgcttatgccctacctattgtgcaaatgctctgcacacggaaagtaaggtgcttgcgagctttggttgtgcttcctacgcgggatctggccttgcaggttaaagaggtttttgatgctattgctcctgtggtgggcttgtcagtaggttcagccgttggtcaatcatcaatagcagatgaagtttctagtcttgtccagaagcccagacaggagttttacccaactattgacaaagaatacgtccaaatggaaccacggactaaaattgatatattggtggcaacccctggaagactcatggatcacattaacatgacaaatggtttcagtctggagcatcttcagtacctggtcattgatgagacagatagaatgttaagagaggcttatcaatcctggttgccaacagtgatccaacttacccactcaattggtcaagatcattcctgtcatgacattgatgggaaaactctacttcatccattgactactattagaagatcgggtgtggagcgtgggtttaaaagtaaatgctatccaagattggcgaagatagttttgtctgctacactgactcaagatcctagcaagctatcacaactcgaattgcaccatcccttgttgttgaatagtgggaagaagcgctatagaattcctacaaaacttgaatcctacaaactgatatgtaaatcaaacttaaaaccactctctctcattgttcttctccaagaactgcaagggaataagtgcttagtttttacctcatcagtggaatcaagccacagactaagcactttactgcgttttttcgaaaacttaccctttaaattcagtgaatattcacgtttgcagcgtgaatctactcgaaggaagacactggaggccttcaaggaagggaaaatcgatgttctaattggcacggatagaatggctcgtggaatacatattgatggtttaagatatgttatcaattatgatatgccaccatatgtgaaaacgtacatacatcgagcaggccggactgctagggcaggggaatctggttcctgcttcacctttttaagaaaacacgaggttaaaacttttgacaaaatgctcaaaaaggcagacaatgctggctgcaatcttcattcattgcctgaagaatcaatagaaacacttcgtccagctttctccggtgctctgaggaaactggaaggagcactggaatcagaagcagtgaagaaatatgatttaggagataaaacgccaggtgcttctaaacgaaagagaccaaatcagttgtgcaagcaatagtgctctagttctaacgtcttgacattacaatgttgcacctgcatgtctacagagttacgatggtccatgagcatggaagaaacgtgaggaggcaattgattcccagttcaaatcatgaactagaatggggcatgttaaacctacaatttgaaacctttagggctggttcgatgataagggaattagaggcgattgagggctgatttggtgaccagagaatcgaagggatccataggagaggaatcctcttgctattcaaaccaaggaaatctcttgctattcaattcacttgaattccctgctcatcaaactagcccttactactttacgtttgaggggagttcctccctcgaaagcttttgaattcacagatataatgagaatgagtccatgaagttggtgtagaaatatcttccagttgtgcgaggaaaattttacaaccagcataactgatgagaactgaaaaatatccagcatattttcttatatttatgtactagtcagcacagacatgtttagctattcagatttttgagaatgaaaccctgaaggatcctacctattcagaagatctaatgttgagtgcagcagcagtagtggtttcacaagcatggtcgtctactgctactactaatacttgtcttcttggctgccagcatatatagcttgtcgattgattatcttactggtcccaagctttctaatacggccgtggttgagtgcagcagcagtaggttgttctcagccccaacaacactgcagccggttcgtggttcatcatggatacccaaagtaaaaaaaaaaggtgtctgctttatgctgttcaatgtgctctcccatctccaaacagctttcgcgatgcctgcagcaggccgatccattctgatgaatggcacagtaaatctctcggccttggacagttggacccttatcttcctggtgtggtgctcatcattcactgtacatttttggctgcaaggaggccacccaaaagaaaagttggctttacattcacctcaacatatgtatcggggcattcagggcctttcagttatgctttacgcttagaatgcccctttttccgtcttcgtcaggcttgtggttttccctcaattatttaaggcgtgtttggtttgaggacactccatctaagttcagacactccatttaagatgaactcgtgcatcatga

SEQ ID NO: 56228 - DNA, 3314 bp, Zea Mays
aagagaagaatagaagaaaacaagatagaggaaagagaaattccttataactgctattatgtggaggcgtggaacgctcggagcccaatccaaagaagcccaccggcccacctcacaacggcctgttccgcgccctaagtttgctgcaacgccgccaccaatttgcagctccagcaaacggctcgtcgccgtcgcggactcgcagccactccggagcgttgcctcacctgtgtgctcctcgccggcctcgacaactccccggattgtcatagtcgaggcggttctagtcgctgatggtggccatggcgaggaaggacgaggaagaggggcccgcggaccgcgtgccgcacctgccgtggatgcggtaccccgtcgatatcgacaccttctccggccgccccgtcacacagctaccccgcctcgacccgagactggtagaggctttgcagagaatgggaattgaatcatttttcccagttcaagaagcagcctggctggaaacaattggtcctggcgcttttgagagggatatctgtatcaactccccaactggatctggcaaaactcttgcttatgccctacctattgtgcaaatgctctgcacacggaaagtaaggtgcttgcgagctttggttgtgcttcctacgcgggatctggccttgcaggttaaagaggtttttgatgctattgctcctgtggtgggcttgtcagtaggttcagccgttggtcaatcatcaatagcagatgaagtttctagtcttgtccagaagcccagacaggagttttacccaactattgacaaagaatacgtccaaatggaaccacggactaaaattgatatattggtggcaacccctggaagactcatggatcacattaacatgacaaatggtttcagtctggagcatcttcagtacctggtcattgatgagacagatagaatgttaagagaggcttatcaatcctggttgccaacagtgatccaacttacccactcaattggtcaagatcattcctgtcatgacattgatgggaaaactctacttcatccattgactactattagaagatcgggtgtggagcgtgggtttaaaagtaaatgctatccaagattggcgaagatagttttgtctgctacactgactcaagatcctagcaagctatcacaactcgaattgcaccatcccttgttgttgaatagtgggaagaagcgctatagaattcctacaaaacttgaatcctacaaactgatatgtaaatcaaacttaaaaccactctctctcattgttcttctccaagaactgcaagggaataagtgcttagtttttacctcatcagtggaatcaagccacagactaagcactttactgcgttttttcgaaaacttaccctttaaattcagtgaatattcacgtttgcagcgtgaatctactcgaaggaagacactggaggccttcaaggaagggaaaatcgatgttctaattggcacggatagaatggctcgtggaatacatattgatggtttaagatatgttatcaattatgatatgccaccatatgtgaaaacgtacatacatcgagcaggccggactgctagggcaggggaatctggttcctgcttcacctttttaagaaaacacgaggttaaaacttttgacaaaatgctcaaaaaggcagacaatgctggctgcaatcttcattcattgcctgaagaatcaatagaaacacttcgtccagctttctccggtgctctgaggaaactggaaggagcactggaatcagaagcagtgaagaaatatgatttaggagataaaacgccaggtgcttctaaacgaaagagaccaaatcagttgtgcaagcaatagtgctctagttctaacgtcttgacattacaatgttgcacctgcatgtctacagagttacgatggtccatgagcatggaagaaacgtgaggaggcaattgattcccagttcaaatcatgaactagaatggggcatgttaaacctacaatttgaagtatgcttggcctttatcagtcaaatttgagccaggttattctggcttgggcttgaaatgttgagccaaatatttgttcaactatttaacttgaaccccttatattaaatagagatatgttaattttctgctttcttcatttgtttgtatctcgtataagatcgtacagttcagacattttgttctccactaacaaaatattgtttttatatggtactgcttgactgaagccatgctgttttctattgtgcctctcagacctttagggctggttcgatgataagggaattagaggcgattgagggctgatttggtgaccagagaatcgaagggatccataggagaggaatcctcttgctattcaaaccaaggaaatctcttgctattcaattcacttgaattccctgctcatcaaactagcccttactactttacgtttgaggggagttcctccctcgaaagcttttgaattcacagatataatgagaatgagtccatgaagttggtgtagaaatatcttccagttgtgcgaggaaaattttacaaccagcataactgatgagaactgaaaaatatccagcatattttcttatatttatgtactagtcagcacagacatgtttagctattcagatttttgagaatgaaaccctgaaggatcctacctattcagaagatctaatgttgagtgcagcagcagtagtggtttcacaagcatggtcgtctactgctactactaatacttgtcttcttggctgccagcatatatagcttgtcgattgattatcttactggtcccaagctttctaatacggccgtggttgagtgcagcagcagtaggttgttctcagccccaacaacactgcagccggttcgtggttcatcatggatacccaaagtaaaaaaaaaaggtgtctgctttatgctgttcaatgtgctctcccatctccaaacagctttcgcgatgcctgcagcaggccgatccattctgatgaatggcacagtaaatctctcggccttggacagttggacccttatcttcctggtgtggtgctcatcattcactgtacatttttggctgcaaggaggccacccaaaagaaaagttggctttacattcacctcaacatatgtatcggggcattcagggcctttcagttatgctttacgcttagaatgcccctttttccgtcttcgtcaggcttgtggttttccctcaattatttaaggcgtgtttggtttgaggacactccatctaagttcagacactccatttaagatgaactcgtgcatcatga

SEQ ID NO: 56229 - DNA, 3014 bp, Zea Mays
aagagaagaatagaagaaaacaagatagaggaaagagaaattccttataactgctattatgtggaggcgtggaacgctcggagcccaatccaaagaagcccaccggcccacctcacaacggcctgttccgcgccctaagtttgctgcaacgccgccaccaatttgcagctccagcaaacggctcgtcgccgtcgcggactcgcagccactccggagcgttgcctcacctgtgtgctcctcgccggcctcgacaactccccggattgtcatagtcgaggcggttctagtcgctgatggtggccatggcgaggaaggacgaggaagaggggcccgcggaccgcgtgccgcacctgccgtggatgcggtaccccgtcgatatcgacaccttctccggccgccccgtcacacagctaccccgcctcgacccgagactggtagaggctttgcagagaatgggaattgaatcatttttcccagttcaagaagcagcctggctggaaacaattggtcctggcgcttttgagagggatatctgtatcaactccccaactggatctggcaaaactcttgcttatgccctacctattgtgcaaatgctctgcacacggaaagtaaggtgcttgcgagctttggttgtgcttcctacgcgggatctggccttgcaggttaaagaggtttttgatgctattgctcctgtggtgggcttgtcagtaggttcagccgttggtcaatcatcaatagcagatgaagtttctagtcttgtccagaagcccagacaggagttttacccaactattgacaaagaatacgtccaaatggaaccacggactaaaattgatatattggtggcaacccctggaagactcatggatcacattaacatgacaaatggtttcagtctggagcatcttcagtacctggtcattgatgagacagatagaatgttaagagaggcttatcaatcctggttgccaacagtgatccaacttacccactcaattggtcaagatcattcctgtcatgacattgatgggaaaactctacttcatccattgactactattagaagatcgggtgtggagcgtgggtttaaaagtaaatgctatccaagattggcgaagatagttttgtctgctacactgactcaagatcctagcaagctatcacaactcgaattgcaccatcccttgttgttgaatagtgggaagaagcgctatagaattcctacaaaacttgaatcctacaaactgatatgtaaatcaaacttaaaaccactctctctcattgttcttctccaagaactgcaagggaataagtgcttagtttttacctcatcagtggaatcaagccacagactaagcactttactgcgttttttcgaaaacttaccctttaaattcagtgaatattcacgtttgcagcgtgaatctactcgaaggtaagctgtctacattacaattccatgcataccccgcccgcaatcccactcggacgcacagaagaactgcagatccttatattcagaagaaaaggagtccaaaatgactcatacatgccacacacaaactagcatgtatcactcaccagggccatgctagttacatgagcaatcaccagaaagaataagaccatgatcaaagaatgggaatcttcatgattctgccttactcaagtgttgtgggttataattttttttggttcacataaatgcgaattagaatgatacattgaagttgaactactctcaccttgagacatcaatagttatgggatgttataaccatgagctgggcccatgtggaaggttaaactaagagtagatcatgaattaggaacacatcggataaaatagtagattatgtagataggagagtgatgggttttttaaaatgaaaccagggataaatgtcaagtccgtttctataataatatagattagcatcttacacgaccatttcaatgtcataatattagttcgatctctctattgcaggaagacactggaggccttcaaggaagggaaaatcgatgttctaattggcacggatagaatggctcgtggaatacatattgatggtttaagatatgttatcaattatgatatgccaccatatgtgaaaacgtacatacatcgagcaggccggactgctagggcaggggaatctggttcctgcttcacctttttaagaaaacacgaggttaaaacttttgacaaaatgctcaaaaaggcagacaatgctggctgcaatcttcattcattgcctgaagaatcaatagaaacacttcgtccagctttctccggtgctctgaggaaactggaaggagcactggaatcagaagcagtgaagaaatatgatttaggagataaaacgccaggtgcttctaaacgaaagagaccaaatcagttgtgcaagcaatagtgctctagttctaacgtcttgacattacaatgttgcacctgcatgtctacagagttacgcatatatagcttgtcgattgattatcttactggtcccaagctttctaatacggccgtggttgagtgcagcagcagtaggttgttctcagccccaacaacactgcagccggttcgtggttcatcatggatacccaaagtaaaaaaaaaaggtgtctgctttatgctgttcaatgtgctctcccatctccaaacagctttcgcgatgcctgcagcaggccgatccattctgatgaatggcacagtaaatctctcggccttggacagttggacccttatcttcctggtgtggtgctcatcattcactgtacatttttggctgcaaggaggccacccaaaagaaaagttggctttacattcacctcaacatatgtatcggggcattcagggcctttcagttatgctttacgcttagaatgcccctttttccgtcttcgtcaggcttgtggttttccctcaattatttaaggcgtgtttggtttgaggacactccatctaagttcagacactccatttaagatgaactcgtgcatcatga

SEQ ID NO: 56230 - DNA, 2283 bp, Zea Mays
atttgtttacatcgaatgatcaaaatagttaagcactgaattgtgacaacgacgaatcaggctgttgtcgccttgagtatgctgaggcaaaacagggacctgtttgatcttgttattagtgatgttcacatgccagacatggatggctttaagcttctagagcttgtggggcttgaaatggacctccctgtcattatgttatcggtgaatggagagacaaaaactgtaatgaaggggataactcatggtgcctgtgactatctcttaaaaccggttcggctggaagagcttaggaatatctggcagcatgttgttaggaggaaattcagtaactgtgatcgtgctaacaatgatggctatgaggagtgcaataggccatcaaatgcagattttgatcttgctcacagccaaattacagctgggccacctgaccaaagtgggaggcccagcaaaaagaggaaggaatatcatagtgaagaggaagatgaaggagaagagagtaatggccaagataacgatgatccttcagctccaaagaaaccaagggttgtttggtcagttgaactgcaccgaaaatttgttgctgctgtcaatcagctaggaattgacaaagccgtgccaaaaaggatacttgagctcatgaatgttgagagactcaccagggaaaatgttgcaagtcacctgcagaagtatagactctaccttaaacggctaagtgctgtggcatcacaacaggctagcattgttgctgctttgggaggcaacgacccctttatgcggatgagtgcatttgaaggactccatggttatcaatcttttgtctcttcagcagctctgccatctttcagtccacagggactgttaaatagaaataatccagcatcatttgcgattcaaggggtgtctgcttccaggccaattcagattgcaaccggcaataccacaatgagtcattccattggcgatccaaatgataaatatcaccttagcttaccaggcactagttgcctacaaggaaatctagcacaaggtttgccaactccagttgggcaggtccagctgccacagaagtggatacacgaagaaaccgacgatctatctactatcctttctgcgagtggccgggctaatagtggtgttcctggcacactccaaagtgtcacgaacagtcacttgctgcagcaaggctttgttgaacgtagacaagacaaagttgttatccagccatcttcatctgcaagttcagatcgtcctgaaggcactgttggagtttcctccagtctgatggattcctgtgcaacccagcagagggttgttccattgtctgccttctctagcagtgcatctccaatgaatggctcgttttgcagcaacggtgtagctgagttgggtgctacatcctctggaggtacaagtattttcccctccaatgacctgaggatagaaagagacagcaaagtgggagctagctcttttggtagtgtgatacttctgtctccagacactgtgccaaaccaaaaatacttgaacttcggcggtggaagcgatttgagatcgaacatggagggagggaacgcaggcaatctgttgaatcccaagctactatggagttgtttgccggcctctcagccgcctaatcttatcggaagtcatcatcccatgagccaaagactgaaccttggcggctcaatggtcagacagacaacagcaagtgcttcggcagctgccccacagacgaggatcgacatgtttatctctggagacgctccgaagagcgcgtcggatttgagcttccctaaggtccacagcgagcttagctctagcagctgcagcttcgacggcctcctcaactccataatcaaagtggagaaggacgatgcttccttcagcgatgacctgggatgcgacttgtactccctgggtgcctgtatatgatcgctaccttccacgtatctgcatctgcatctgtgttaatctcccattgtatgctgtgcagctagtgttaatcttaggtagaattgtagctgtgcgcctatctttgcttgcccacagccaagaaaaaaaaattatgtctgcacgtgatgtgctagcagtaagatatctggattgtggaagtcaatgcccatttgctaaatcgagctggagacactgttggcacgagttgattctaaaagcggccttgatgatctaggcccaatttgaatgtcgacacactggtaatgacacgtggtgttcatgtaaacaaatccaaaagttcaaaacaaattgggagatttgaagtcg

SEQ ID NO: 56231 - DNA, 3478 bp, Zea Mays
agtattaagagattcagataaaacaaaaagaatacaccgcggagtagcagtacaaatttacggagagatagagagagggctttgacagtttcacaggaggtagcagtggtctcgaatggcttggttgcattgcacggcggagaggatcacgcacgctgtagttaccagtggttgcttggacatgggcggggtccactcgcttttcccgccgccgccaccaccgccattttgacccacgtatatctaccatccatggctgccagccatgggaggatgctcgccaccgcaccgcccgtgccacaggaaccaaaagctacagacctctcgtcaatccatgctgagcagcagtggcgctgtggaagaggcggagcggaggggaggggaggggagccgagcttggcgtggactgtagtgactgctgagcttgcttgtgtagaagaggtgggaaagagggaagagtcagagagggagacagaggtggcttggttcatctgtaacagtcgccatctctgcctgctttccagctcctttgcttgctttccctgcccatctcttttgttctggcctgccctctccatcccgtccaactccctatccttcctccttttgctttcccacatctttgctccaataatgatggcgtggtggtgggtttggtcgtgaacctgccgctgtggctgtgctgcatcccccaccctcgccgctccctcgtccaaatccaccagccgttcgctttcctctcctctcctctccatcatcccggccggctcgccagtcgccaccctccctttcctcttttcagctacagttgagcttgggcagtagtaggttggttctgcttcccttcccctcccccgatcccttttccttgctggggatcgggaggccttcaggcttcaacccatcttcctccctgtccacatctcgctccttgtttggggtagtgccggctggtggtgccgctactgctagccgggaacccaatttcttgataggactggacgactggaacaccaacagtagtgtgttcttgcgccggcttttcttgccgtgtttcgggtcgatattattgggagggtgggtctcccgtcccgtttcgatgaggccggaggagagagatgctgccgtggggagagtcagggaccagttccccgtcggcatgagggtcctcgccgtggacgacgaccccgtgtgcctcaaggtgcttgagaacctcctgcgccgctgccagtatcatgtgacaacgacgaatcaggctgttgtcgccttgagtatgctgaggcaaaacagggacctgtttgatcttgttattagtgatgttcacatgccagacatggatggctttaagcttctagagcttgtggggcttgaaatggacctccctgtcattatgttatcggtgaatggagagacaaaaactgtaatgaaggggataactcatggtgcctgtgactatctcttaaaaccggttcggctggaagagcttaggaatatctggcagcatgttgttaggaggaaattcagtaactgtgatcgtgctaacaatgatggctatgaggagtgcaataggccatcaaatgcagattttgatcttgctcacagccaaattacagctgggccacctgaccaaagtgggaggcccagcaaaaagaggaaggaatatcatagtgaagaggaagatgaaggagaagagagtaatggccaagataacgatgatccttcagctccaaagaaaccaagggttgtttggtcagttgaactgcaccgaaaatttgttgctgctgtcaatcagctaggaattgacaaagccgtgccaaaaaggatacttgagctcatgaatgttgagagactcaccagggaaaatgttgcaagtcacctgcagaagtatagactctaccttaaacggctaagtgctgtggcatcacaacaggctagcattgttgctgctttgggaggcaacgacccctttatgcggatgagtgcatttgaaggactccatggttatcaatcttttgtctcttcagcagctctgccatctttcagtccacagggactgttaaatagaaataatccagcatcatttgcgattcaaggggtgtctgcttccaggccaattcagattgcaaccggcaataccacaatgagtcattccattggcgatccaaatgataaatatcaccttagcttaccaggcactagttgcctacaaggaaatctagcacaaggtttgccaactccagttgggcaggtccagctgccacagaagtggatacacgaagaaaccgacgatctatctactatcctttctgcgagtggccgggctaatagtggtgttcctggcacactccaaagtgtcacgaacagtcacttgctgcagcaaggctttgttgaacgtagacaagacaaagttgttatccagccatcttcatctgcaagttcagatcgtcctgaaggcactgttggagtttcctccagtctgatggattcctgtgcaacccagcagagggttgttccattgtctgccttctctagcagtgcatctccaatgaatggctcgttttgcagcaacggtgtagctgagttgggtgctacatcctctggaggtacaagtattttcccctccaatgacctgaggatagaaagagacagcaaagtgggagctagctcttttggtagtgtgatacttctgtctccagacactgtgccaaaccaaaaatacttgaacttcggcggtggaagcgatttgagatcgaacatggagggagggaacgcaggcaatctgttgaatcccaagctactatggagttgtttgccggcctctcagccgcctaatcttatcggaagtcatcatcccatgagccaaagactgaaccttggcggctcaatggtcagacagacaacagcaagtgcttcggcagctgccccacagacgaggatcgacatgtttatctctggagacgctccgaagagcgcgtcggatttgagcttccctaaggtccacagcgagcttagctctagcagctgcagcttcgacggcctcctcaactccataatcaaagtggagaaggacgatgcttccttcagcgatgacctgggatgcgacttgtactccctgggtgcctgtatatgatcgctaccttccacgtatctgcatctgcatctgtgttaatctcccattgtatgctgtgcagctagtgttaatcttaggtagaattgtagctgtgcgcctatctttgcttgcccacagccaagaaaaaaaaattatgtctgcacgtgatgtgctagcagtaagatatctggattgtggaagtcaatgcccatttgctaaatcgagctggagacactgttggcacgagttgattctaaaagcggccttgatgatctaggcccaatttgaatgtcgacacactggtaatgacacgtggtgttcatgtaaacaaatccaaaagttcaaaacaaattgggagatttgaagtcg

SEQ ID NO: 56232 - DNA, 1692 bp, Zea Mays
gaaaaacaaggccgcaggcccgcagctccgcgcgaacaacagccaaccacccacctcacgtcgcgacctgcgagctccacctccggcctccgcccgcccgcccacaccaccaacgcccggaataggcagttgcagttgcagcagcagccagccagacccgccccgccatcgtaggaggaggcccatgccgcgggggcagcagggggcagggtagaatgggcaacgtcacgtcgtcggtggcggcgcggttggccttcttcccgccggagccggcgacgtacggcgtcgagcccgcggaccaggacggtgctggcgccggctctctgctgcggatgacgggggtgtcgccggacgcgggcgtcgaggtgcgcgcgctgcccaccagggccggcacgcgcgtcgtctccgccttctggcgccaccccgcggcgcggctcacgctgctctactcccacggcaacgccgccgacctcggccagatgctcggcctcctcctcgagctccgcacgcacctccgcgtcaacatcatgagctatgattattcaggctatggtgcctctacaggaaaaccatcagagtacaacacatacaatgacatagaggccgtttatgattgcttgaaaaaggagtatgggatagaagaagaggatttaatcttgtatgggcaatcagttggaagtggaccgacattgcatttagcctcacgtctggaaaatataagaggggttgtgcttcacagtggtatactctctggcatacgggttctgtatccagtcaaagtgacactttggttcgacatcttcaagaacatcgacaaaataaagcaggttgactgccctgtgttggtcatacatccgatgagatcgtggacttcacgcatggcaagcggctgtgggagctagccaaggagaagtacgagccgctgtggatcaaaggcggtgggcattgcaacctggagacgtacccggagtacatcaggcacctgcgcaagttcataaacgccatggagaagctggcaaaggacagcaaggcggccagggcgccgccgccgtcgagcatggccgacgaagtaagacgcaccaagtgcttgagattcgggaagagatgaggctggcggcgaggccatgcgggtctcggccgtctttagctgcgtacgccagtcactaaccccctgctgcattgcattgcattgctttgctgctgctcgtgccgtgtgcaagtcgaaggagcgatgtcactggtcgtcgatgaggaaggaagggactaaggaaagcaggcagatgaatggggattgtttgcctgttgagttgtacgtgctgctctctctgcagacgtcgacgacctgggaaggaaacgcagcagcaaccctaggtcatgtatgatccgtgtgagctgagttcagagtagagtagacagaaagacctgtggctgctgcagtgtgctgcagatcgggagatgcctttgctttcctagtggttgtgcaaaggaattcgtagcgtaatttttctttctcatttttcctacctgtattgtagtcactgtgcaaaggaattcgttttgattgattgattggttgctgcaacaaagtgaagtgcgctgtgacacttgacgacgtagaggctagaaacgagaccctgacgagtgacgaccatattgtttccttgcggcaatgttcgggtccgaccagaggag

SEQ ID NO: 56233 - DNA, 5720 bp, Zea Mays
cgatcgcctacgccccacgcaacgccacgagcccacgacgcaccccgcaagcgaagcaaagcaagccccaggcggcgccgccggcggaggacgcgatggggaataagatcgcgcggacgacgcaggcgtcggcgacggagtactacctccacgacctgccgtccacctacaatctcgtgctcctcgacgtcgtcagccgcggccgcttcctcaagtccgtccgctgcaagcacgacgaggggttgctcctcgtcaaggtctactttaagcgcgccggcgagtccatagacctcaaggagcacgagcggaggctggagcggattaggaacgcgttcaaggggatcgaggggtcccacgtatggcccttccaggtttggctgcaaacagataaggcagcatatctcttgagacaatacttcttcagcaacttgcaagatcggttgagtacacgccctttcctcagtcaggttgcaaagaaatggcttgcctttcagttaattcatgcagtggaacagagccatagtaagggaatttgccatggtgacataaaatgtgaaaatgtgctcgttacttcttggaattggctatatcttgcggactttgcatcattcaagccaacgtatatcccggatgatgacccgtctgatttctcattctactttgacactggaggaagacgacgatgctatctagcacctgaaagattctatgaaagtggtggtgaatcccaagttgcagcagacgcacctctgcaaccatctatggatatattttctcttgggtgtgttcttgctgaacttttccttgaaggccagccactttttgagctttctcaacttctggcttaccggcgtggtcaatatgaccccatacataccctagaaaagatacaagatactggtatccgtgacatgatacttcacatgatccagttggaccccaaaaaaagggtaccatgtcgaagctatctgcagaaatatgaatctgttgtgttcccattttatttttcaaaatttctgcacaagttcttctcggatatcgttccacttgattccgatgctagggttgagaagactcaagaaaattttggaaagatacaggaaataatgatgggtagttcaacaattgaacaaattgagaggtctacatcgtgtgagcatagtgaaccatctgggagaaaaggcatggaaggggaaattttaaactcgccaggaaattatagaaatagcacatctgtatttaagaaaaatactcctgtagaccatcaacatattattggagatatcaatttcctcctcaaagaagtggagggcaggagtaacaacacaagcacaaaggtcacaaaagacacttatcattttgttgcaccgagcattacctgtgcaaatggtgttcagtcctctcatctagttaatccagcaggaagacaaattggaactggtttgatgggccacaaacatgttgtatctcatgtgaagatctcaaagagtaacatacgctccttggtggctacttatgatgatcaatcagatacctatagttttgatatttttcagcagacagactccaaggtgagctgtgaaggcatggtcttgcttgcctcattactttgctcatgcatacgcagtgtgaaaaaacctgagctaagaagggccagcctcattcttctgaagttctcgtccacatacatagatgatgatagtcgcctacagctagtggttccctatgtgattgcgatgctttcagatccgtctgccattgtccgctgtgctgctttggaaaccctatgtgatgttctttgtcttgtgcaagatttccctatcagtgatgctgttatattccctgagtatatcctcccaatgctctctttgctccctgatgatacggaagagagtgttagggtttgctatgctagcaatattcataagctggctttaacagcttataggttcctacttcgttctcgtagcattgcagatattcgacctctggatgaatcagtggtagctcacagatcccaatctgcagattcaccagcgaagaggcaagataatttttttcgccagcttgcagaactgaggaaatctatttatgagatagtgcaagatttggtgatgggacaaaagcagacacctaatacccgtagagctcttctgcaggatataggttatttgtgttacttctttgggcacaaacaaagtaacgattttcttcttcctatacttccagcatttctaaatgatcatgatgagcagctccgtgcagttttctttggccagattgtctatgtttgctattttattggagcaagaagtgttgaggaatatcttctgccatatcttgaacaggcactaagtgatgacatggaggctgtccttgtaaatgcacttgattgcttgaccatgatgtgcagaagtggttatttgaggaaaagagtaattgttggtctattggtaaagattctccccctgctccggtatccaatcaattgggttaaacagtctgctgtaagatttgttgctgcctgcagcgagagcttaggatctgtagatacttatgtgtatctttctcctcatctaaggcagttcctacacatggagccaccttcattggcctctgaaactgctcttctttcatgtcttaagcctccactaccaaaatcaatcttctatgaaggtttagagcatgctcaggacattggagacattttactgaagagcagtggcaagaaagaacagatagtacatggtggaagatatcctggtacagcacaaagtggatccttggccaaccttgaagatatcctgcgaccgaaaggccctaatatttccagcagcatgtccttgtatgtcaaaaactctgtttcttttgaaaaatcactatattctggttttgctctgcatgcatctgctgcaaatagctccttttatgatggcttatctaaaggaataccatcatattctttttgtactgataataagcggggtttaggagaaacacacatggtccctgattcatcagtgtataaagcttcaataaggctaccttggttggaaccaaaccgtcctgccatgcagaccagagatgatcattttagtagcacgcgacaagatttcagcatcaatgactctatgaagagcaattcctctttgcaaggggatatcattccgaactctgatactggagggttgcctttctccagatcagcagtgaacttggagactggatggaagcctcgtggaattctagtggcacatctccaggagcatcgctcttctgtcaatgacattgccgtatcaaatgataataccttttttgtgactgcttctgatgactcaagtatcaaaatatgggatacaagaaaattggaaaaggacattgctttcagatctaggttaacatacagcatgggtaatagccgagctctatgtacgacaatggttcatggtacttcacaggttattgtcggtgccagcgatggaacattacacttgttttctgtggattgtgcacgcagcgttgggactgttgtggaaaggtatgctggaattgttgatgtaaaaaggaacgagattaaagaagacgcaattctcagcgttgtaaattgttcaaccgacagctttagcccgactgttcttttcagcactgaacattgtggcatccataaatgggatacaagaaccaactcagaatcttggtcttttaaatcctctccggaggagggctatatatcggcacttgttgtgggcccgtgtgggaattggttcatctcaggttcttcgagaggcgtccttacactgtgggataataggtttttagtacctgttaaatcgtggaattattcaacattaagcccaatagagaaactatgcttgcttatacctccaccaagttcgatatcctctgctggaaggcctttagtttttgttgccgctggatgcaacgaagtttctctgtggaatgctgagaatggaaactgccatcagatgtttagaacagcaagcactgacaatgaagctgtgatgtcaaaggcgccatcgaggcctgttaacaagccagtcatcaaagatataaggcgagcaggcaattataagtacagaatcgatgaattgaatgacccacctgtacgccatccagggatacgttctttgctgcccttgccaggtggtgatctattaactggaggaacagatttgaagattcgttactgggatcaagcaaggcctgagcaaagcttctgtattgctggtccctcggcgaaagaagtccgttcggcaaaaggagatatcttggagaaagcagttggaaacgatgagtcttacgatataagatccagttttggaatacaggtcgtgcaggaaatgtacaaacagagtagctcggtctccggtttgacgcccaagactcagctcgcggtggcagctgcagattctgcagggtgccatcgtgacgcaatactcgcgttggcatccttcaacttgtctagccagagattggtatcaggcagcagagacggcgctgtcaaagtgtggaaatagcttctccagcatgggctatgattattcaggctatggtgcctctacaggaaaaccatcagagtacaacacatacaatgacatagaggccgtttatgattgcttgaaaaaggagtatgggatagaagaagaggatttaatcttgtatgggcaatcagttggaagtggaccgacattgcatttagcctcacgtctggaaaatataagaggggttgtgcttcacagtggtatactctctggcatacgggttctgtatccagtcaaagtgacactttggttcgacatcttcaagaacatcgacaaaataaagcaggttgactgccctgtgttggtcatacatggcacagccgatgagatcgtggacttcacgcatggcaagcggctgtgggagctagccaaggagaagtacgagccgctgtggatcaaaggcggtgggcattgcaacctggagacgtacccggagtacatcaggcacctgcgcaagttcataaacgccatggagaagctggcaaaggacagcaaggcggccagggcgccgccgccgtcgagcatggccgacgaagtaagacgcaccaagtgcttgagattcgggaagagatgaggctggcggcgaggccatgcgggtctcggccgtctttagctgcgtacgccagtcactaaccccctgctgcattgcattgcattgctttgctgctgctcgtgccgtgtgcaagtcgaaggagcgatgtcactggtcgtcgatgaggaaggaagggactaaggaaagcaggcagatgaatggggattgtttgcctgttgagttgtacgtgctgctctctctgcagacgtcgacgacctgggaaggaaacgcagcagcaaccctaggtcatgtatgatccgtgtgagctgagttcagagtagagtagacagaaagacctgtggctgctgcagtgtgctgcagatcgggagatgcctttgctttcctagtggttgtgcaaaggaattcgtagcgtaatttttctttctcatttttcctacctgtattgtagtcactgtgcaaaggaattcgttttgattgattgattggttgctgcaacaaagtgaagtgcgctgtgacacttgacgacgtagaggctagaaacgagaccctgacgagtgacgaccatattgtttccttgcggcaatgttcgggtccgaccagaggag

SEQ ID NO: 56234 - DNA, 4833 bp, Zea Mays
cgatcgcctacgccccacgcaacgccacgagcccacgacgcaccccgcaagcgaagcaaagcaagccccaggcggcgccgccggcggaggacgcgatggggaataagatcgcgcggacgacgcaggcgtcggcgacggagtactacctccacgacctgccgtccacctacaatctcgtgctcctcgacgtcgtcagccgcggccgcttcctcaagtccgtccgctgcaagcacgacgaggggttgctcctcgtcaaggtctactttaagcgcgccggcgagtccatagacctcaaggagcacgagcggaggctggagcggattaggaacgcgttcaaggggatcgaggggtcccacgtatggcccttccaggtttggctgcaaacagataaggcagcatatctcttgagacaatacttcttcagcaacttgcaagatcggttgagtacacgccctttcctcagtcaggttgcaaagaaatggcttgcctttcagttaattcatgcagtggaacagagccatagtaagggaatttgccatggtgacataaaatgtgaaaatgtgctcgttacttcttggaattggctatatcttgcggactttgcatcattcaagccaacgtatatcccggatgatgacccgtctgatttctcattctactttgacactggaggaagacgacgatgctatctagcacctgaaagattctatgaaagtggtggtgaatcccaagttgcagcagacgcacctctgcaaccatctatggatatattttctcttggatacaagatactggtatccgtgacatgatacttcacatgatccagttggaccccaaaaaaagggtaccatgtcgaagctatctgcagaaatatgaatctgttgtgttcccattttatttttcaaaatttctgcacaagttcttctcggatatcgttccacttgattccgatgctagggttgagaagactcaagaaaattttggaaagatacaggaaataatgatgggtagttcaacaattgaacaaattgagaggtctacatcgtgtgagcatagtgaaccatctgggagaaaaggcatggaaggggaaattttaaactcgccaggaaattatagaaatagcacatctgtatttaagaaaaatactcctgtagaccatcaacatattattggagatatcaatttcctcctcaaagaagtggagggcaggagtaacaacacaagcacaaaggtcacaaaagacacttatcattttgttgcaccgagcattacctgtgcaaatggtgttcagtcctctcatctagttaatccagcaggaagacaaattggaactggtttgatgggccacaaacatgttgtatctcatgtgaagatctcaaagagtaacatacgctccttggtggctacttatgatgatcaatcagatacctatagttttgatatttttcagcagacagactccaaggtgagctgtgaaggcatggtcttgcttgcctcattactttgctcatgcatacgcagtgtgaaaaaacctgagctaagaagggccagcctcattcttctgaagttctcgtccacatacatagatgatgatagtcgcctacagctagtggttccctatgtgattgcgatgctttcagatccgtctgccattgtccgctgtgctgctttggaaaccctatgtgatgttctttgtcttgtgcaagatttccctatcagtgatgctgttatattccctgagtatatcctcccaatgctctctttgctccctgatgatacggaagagagtgttagggtttgctatgctagcaatattcataagctggctttaacagcttataggttcctacttcgttctcgtagcattgcagatattcgacctctggatgaatcagtggtagctcacagatcccaatctgcagattcaccagcgaagaggcaagataatttttttcgccagcttgcagaactgaggaaatctatttatgagatagtgcaagatttggtgatgggacaaaagcagacacctaatacccgtagagctcttctgcaggatataggttatttgtgttacttctttgggcacaaacaaagtaacgattttcttcttcctatacttccagcatttctaaatgatcatgatgagcagctccgtgcagttttctttggccagattgtctatgtttgctattttattggagcaagaagtgttgaggaatatcttctgccatatcttgaacaggcactaagtgatgacatggaggctgtccttgtaaatgcacttgattgcttgaccatgatgtgcagaagtggttatttgaggaaaagagtaattgttggtctattggtaaagattctccccctgctccggtatccaatcaattgggttaaacagtctgctgtaagatttgttgctgcctgcagcgagagcttaggatctgtagatacttatgtgtatctttctcctcatctaaggcagttcctacacatggagccaccttcattggcctctgaaactgctcttctttcatgtcttaagcctccactaccaaaatcaatcttctatgaaggtttagagcatgctcaggacattggagacattttactgaagagcagtggcaagaaagaacagatagtacatggtggaagatatcctggtacagcacaaagtggatccttggccaaccttgaagatatcctgcgaccgaaaggccctaatatttccagcagcatgtccttgtatgtcaaaaactctgtttcttttgaaaaatcactatattctggttttgctctgcatgcatctgctgcaaatagctccttttatgatggcttatctaaaggaataccatcatattctttttgtactgataataagcggggtttaggagaaacacacatggtccctgattcatcagtgtataaagcttcaataaggctaccttggttggaaccaaaccgtcctgccatgcagaccagagatgatcattttagtagcacgcgacaagatttcagcatcaatgactctatgaagagcaattcctctttgcaaggggatatcattccgaactctgatactggagggttgcctttctccagatcagcagtgaacttggagactggatggaagcctcgtggaattctagtggcacatctccaggagcatcgctcttctgtcaatgacattgccgtatcaaatgataataccttttttgtgactgcttctgatgactcaagtatcaaaatatgggatacaagaaaattggaaaaggacattgctttcagatctaggttaacatacagcatgggtaatagccgagctctatgtacgacaatggttcatggtacttcacaggttattgtcggtgccagcgatggaacattacacttgttttctgtggattgtgcacgcagcgttgggactgttgtggaaaggtatgctggaattgttgatgtaaaaaggaacgagattaaagaagacgcaattctcagcgttgtaaattgttcaaccgacagctttagcccgactgttcttttcagcactgaacattgtggcatccataaatgggatacaagaaccaactcagaatcttggtcttttaaatcctctccggaggagggctatatatcggcacttgttgtgggcccgtgtgggaattggttcatctcaggttcttcgagaggcgtccttacactgtgggataataggtttttagtacctgttaaatcgtggaattattcaacattaagcccaatagagaaactatgcttgcttatacctccaccaagttcgatatcctctgctggaaggcctttagtttttgttgccgctggatgcaacgaagtttctctgtggaatgctgagaatggaaactgccatcagatgtttagaacagcaagcactgacaatgaagctgtgatgtcaaaggcgccatcgaggcctgttaacaagccagtcatcaaagatataaggcgagcaggcaattataagtacagaatcgatgaattgaatgacccacctgtacgccatccagggatacgttctttgctgcccttgccaggtggtgatctattaactggaggaacagatttgaagattcgttactgggatcaagcaaggcctgagcaaagcttctgtattgctggtccctcggcgaaagaagtccgttcggcaaaaggagatatcttggagaaagcagttggaaacgatgagtcttacgatataagatccagttttggaatacaggaaatgtacaaacagagtagctcggtctccggtttgacgcccaagactcagctcgcggtggcagctgcagattctgcagggtgccatcgtgacgcaatactcgcgttggcatccttcaacttgtctagccagagattggtatcaggcagcagagacggcgctgtcaaagtgtggaaatagcttctccagcatggggtaagattacaagtccacaggcgtgtacatattttggcctgtctagtgctcatacagtacatatgccactagttattgctgtacagaagattattccgatcaatacaagtcaaatttgacatgtacgctttcatccggtgtgaccacctcatctgtttcggttgatataaactataatcacttatcttataggagtatcgtggaatagcaaaaaataaaataaaataatcatgacgaataggaggcaggaggctgtccgactacaactgtatagggctccaatgtctaatcatactcctctacacaagaagtgtttgtagatggctgttattttggataatgaagggcctctaggtagtgttggggccgcaattaaaagaggcctggatgctgaa

SEQ ID NO: 56235 - DNA, 4868 bp, Zea Mays
cgatcgcctacgccccacgcaacgccacgagcccacgacgcaccccgcaagcgaagcaaagcaagccccaggcggcgccgccggcggaggacgcgatggggaataagatcgcgcggacgacgcaggcgtcggcgacggagtactacctccacgacctgccgtccacctacaatctcgtgctcctcgacgtcgtcagccgcggccgcttcctcaagtccgtccgctgcaagcacgacgaggggttgctcctcgtcaaggtctactttaagcgcgccggcgagtccatagacctcaaggagcacgagcggaggctggagcggattaggaacgcgttcaaggggatcgaggggtcccacgtatggcccttccaggtttggctgcaaacagataaggcagcatatctcttgagacaatacttcttcagcaacttgcaagatcggttgagtacacgccctttcctcagtcaggttgcaaagaaatggcttgcctttcagttaattcatgcagtggaacagagccatagtaagggaatttgccatggtgacataaaatgtgaaaatgtgctcgttacttcttggaattggctatatcttgcggactttgcatcattcaagccaacgtatatcccggatgatgacccgtctgatttctcattctactttgacactggaggaagacgacgatgctatctagcacctgaagtgtgttcttgctgaacttttccttgaaggccagccactttttgagctttctcaacttctggcttaccggcgtggtcaatatgaccccatacataccctagaaaagatacaagatactggtatccgtgacatgatacttcacatgatccagttggaccccaaaaaaagggtaccatgtcgaagctatctgcagaaatatgaatctgttgtgttcccattttatttttcaaaatttctgcacaagttcttctcggatatcgttccacttgattccgatgctagggttgagaagactcaagaaaattttggaaagatacaggaaataatgatgggtagttcaacaattgaacaaattgagaggtctacatcgtgtgagcatagtgaaccatctgggagaaaaggcatggaaggggaaattttaaactcgccaggaaattatagaaatagcacatctgtatttaagaaaaatactcctgtagaccatcaacatattattggagatatcaatttcctcctcaaagaagtggagggcaggagtaacaacacaagcacaaaggtcacaaaagacacttatcattttgttgcaccgagcattacctgtgcaaatggtgttcagtcctctcatctagttaatccagcaggaagacaaattggaactggtttgatgggccacaaacatgttgtatctcatgtgaagatctcaaagagtaacatacgctccttggtggctacttatgatgatcaatcagatacctatagttttgatatttttcagcagacagactccaaggtgagctgtgaaggcatggtcttgcttgcctcattactttgctcatgcatacgcagtgtgaaaaaacctgagctaagaagggccagcctcattcttctgaagttctcgtccacatacatagatgatgatagtcgcctacagctagtggttccctatgtgattgcgatgctttcagatccgtctgccattgtccgctgtgctgctttggaaaccctatgtgatgttctttgtcttgtgcaagatttccctatcagtgatgctgttatattccctgagtatatcctcccaatgctctctttgctccctgatgatacggaagagagtgttagggtttgctatgctagcaatattcataagctggctttaacagcttataggttcctacttcgttctcgtagcattgcagatattcgacctctggatgaatcagtggtagctcacagatcccaatctgcagattcaccagcgaagaggcaagataatttttttcgccagcttgcagaactgaggaaatctatttatgagatagtgcaagatttggtgatgggacaaaagcagacacctaatacccgtagagctcttctgcaggatataggttatttgtgttacttctttgggcacaaacaaagtaacgattttcttcttcctatacttccagcatttctaaatgatcatgatgagcagctccgtgcagttttctttggccagattgtctatgtttgctattttattggagcaagaagtgttgaggaatatcttctgccatatcttgaacaggcactaagtgatgacatggaggctgtccttgtaaatgcacttgattgcttgaccatgatgtgcagaagtggttatttgaggaaaagagtaattgttggtctattggtaaagattctccccctgctccggtatccaatcaattgggttaaacagtctgctgtaagatttgttgctgcctgcagcgagagcttaggatctgtagatacttatgtgtatctttctcctcatctaaggcagttcctacacatggagccaccttcattggcctctgaaactgctcttctttcatgtcttaagcctccactaccaaaatcaatcttctatgaaggtttagagcatgctcaggacattggagacattttactgaagagcagtggcaagaaagaacagatagtacatggtggaagatatcctggtacagcacaaagtggatccttggccaaccttgaagatatcctgcgaccgaaaggccctaatatttccagcagcatgtccttgtatgtcaaaaactctgtttcttttgaaaaatcactatattctggttttgctctgcatgcatctgctgcaaatagctccttttatgatggcttatctaaaggaataccatcatattctttttgtactgataataagcggggtttaggagaaacacacatggtccctgattcatcagtgtataaagcttcaataaggctaccttggttggaaccaaaccgtcctgccatgcagaccagagatgatcattttagtagcacgcgacaagatttcagcatcaatgactctatgaagagcaattcctctttgcaaggggatatcattccgaactctgatactggagggttgcctttctccagatcagcagtgaacttggagactggatggaagcctcgtggaattctagtggcacatctccaggagcatcgctcttctgtcaatgacattgccgtatcaaatgataataccttttttgtgactgcttctgatgactcaagtatcaaaatatgggatacaagaaaattggaaaaggacattgctttcagatctaggttaacatacagcatgggtaatagccgagctctatgtacgacaatggttcatggtacttcacaggttattgtcggtgccagcgatggaacattacacttgttttctgtggattgtgcacgcagcgttgggactgttgtggaaaggtatgctggaattgttgatgtaaaaaggaacgagattaaagaagacgcaattctcagcgttgtaaattgttcaaccgacagctttagcccgactgttcttttcagcactgaacattgtggcatccataaatgggatacaagaaccaactcagaatcttggtcttttaaatcctctccggaggagggctatatatcggcacttgttgtgggcccgtgtgggaattggttcatctcaggttcttcgagaggcgtccttacactgtgggataataggtttttagtacctgttaaatcgtggaattattcaacattaagcccaatagagaaactatgcttgcttatacctccaccaagttcgatatcctctgctggaaggcctttagtttttgttgccgctggatgcaacgaagtttctctgtggaatgctgagaatggaaactgccatcagatgtttagaacagcaagcactgacaatgaagctgtgatgtcaaaggcgccatcgaggcctgttaacaagccagtcatcaaagatataaggcgagcaggcaattataagtacagaatcgatgaattgaatgacccacctgtacgccatccagggatacgttctttgctgcccttgccaggtggtgatctattaactggaggaacagatttgaagattcgttactgggatcaagcaaggcctgagcaaagcttctgtattgctggtccctcggcgaaagaagtccgttcggcaaaaggagatatcttggagaaagcagttggaaacgatgagtcttacgatataagatccagttttggaatacaggtcgtgcaggaaatgtacaaacagagtagctcggtctccggtttgacgcccaagactcagctcgcggtggcagctgcagattctgcagggtgccatcgtgacgcaatactcgcgttggcatccttcaacttgtctagccagagattggtatcaggcagcagagacggcgctgtcaaagtgtggaaatagcttctccagcatggggtaagattacaagtccacaggcgtgtacatattttggcctgtctagtgctcatacagtacatatgccactagttattgctgtacagaagattattccgatcaatacaagtcaaatttgacatgtacgctttcatccggtgtgaccacctcatctgtttcggttgatataaactataatcacttatcttataggagtatcgtggaatagcaaaaaataaaataaaataatcatgacgaataggaggcaggaggctgtccgactacaactgtatagggctccaatgtctaatcatactcctctacacaagaagtgtttgtagatggctgttattttggataatgaagggcctctaggtagtgttggggccgcaattaaaagaggcctggatgctgaa

SEQ ID NO: 56236 - DNA, 4833 bp, Zea Mays
cgatcgcctacgccccacgcaacgccacgagcccacgacgcaccccgcaagcgaagcaaagcaagccccaggcggcgccgccggcggaggacgcgatggggaataagatcgcgcggacgacgcaggcgtcggcgacggagtactacctccacgacctgccgtccacctacaatctcgtgctcctcgacgtcgtcagccgcggccgcttcctcaagtccgtccgctgcaagcacgacgaggggttgctcctcgtcaaggtctactttaagcgcgccggcgagtccatagacctcaaggagcacgagcggaggctggagcggattaggaacgcgttcaaggggatcgaggggtcccacgtatggcccttccaggtttggctgcaaacagataaggcagcatatctcttgagacaatacttcttcagcaacttgcaagatcggttgagtacacgccctttcctcagtcaggttgcaaagaaatggcttgcctttcagttaattcatgcagtggaacagagccatagtaagggaatttgccatggtgacataaaatgtgaaaatgtgctcgttacttcttggaattggctatatcttgcggactttgcatcattcaagccaacgtatatcccggatgatgacccgtctgatttctcattctactttgacactggaggaagacgacgatgctatctagcacctgaaagattctatgaaagtggtggtgaatcccaagttgcagcagacgcacctctgcaaccatctatggatatattttctcttgggtgtgttcttgctgaacttttccttgaaggccagccactttttgagctttctcaacttctggcttaccggcgtggtcaatatgaccccatacataccctagaaaagatacaagatactggtatccgtgacatgatacttcacatgatccagttggaccccaaaaaaagggtaccatgtcgaagctatctgcagaaatatgaatctgttgtgttcccattttatttttcaaaatttctgcacaagttcttctcggatatcgttccacttgattccgatgctagggttgagaagactcaagaaaattttggaaagatacaggaaataatgatgggtagttcaacaattgaacaaattgagaggtctacatcgtgtgagcatagtgaaccatctgggagaaaaggcatggaaggggaaattttaaactcgccaggaaattatagaaatagcacatctgtatttaagaaaaatactcctgtagaccatcaacatattattggagatatcaatttcctcctcaaagaagtggagggcaggagtaacaacacaagcacaaaggtcacaaaagacacttatcattttgttgcaccgagcattacctgtgcaaatggtgttcagtcctctcatctagttaatccagcaggaagacaaattggaactggtttgatgggccacaaacatgttgtatctcatgtgaagatctcaaagagtaacatacgctccttggtggctacttatgatgatcaatcagatacctatagttttgatatttttcagcagacagactccaaggtgagctgtgaaggcatggtcttgcttgcctcattactttgctcatgcatacgcagtgtgaaaaaacctgagctaagaagggccagcctcattcttctgaagttctcgtccacatacatagatgatgatagtcgcctacagctagtggttccctatgtgattgcgatgctttcagatccgtctgccattgtccgctgtgctgctttggaaaccctatgtgatgttctttgtcttgtgcaagatttccctatcagtgatgctgttatattccctgagtatatcctcccaatgctctctttgctccctgatgatacggaagagagtgttagggtttgctatgctagcaatattcataagctggctttaacagcttataggttcctacttcgttctcgtagcattgcagatattcgacctctggatgaatcagtggtagctcacagatcccaatctgcagattcaccagcgaagaggatataggttatttgtgttacttctttgggcacaaacaaagtaacgattttcttcttcctatacttccagcatttctaaatgatcatgatgagcagctccgtgcagttttctttggccagattgtctatgtttgctattttattggagcaagaagtgttgaggaatatcttctgccatatcttgaacaggcactaagtgatgacatggaggctgtccttgtaaatgcacttgattgcttgaccatgatgtgcagaagtggttatttgaggaaaagagtaattgttggtctattggtaaagattctccccctgctccggtatccaatcaattgggttaaacagtctgctgtaagatttgttgctgcctgcagcgagagcttaggatctgtagatacttatgtgtatctttctcctcatctaaggcagttcctacacatggagccaccttcattggcctctgaaactgctcttctttcatgtcttaagcctccactaccaaaatcaatcttctatgaaggtttagagcatgctcaggacattggagacattttactgaagagcagtggcaagaaagaacagatagtacatggtggaagatatcctggtacagcacaaagtggatccttggccaaccttgaagatatcctgcgaccgaaaggccctaatatttccagcagcatgtccttgtatgtcaaaaactctgtttcttttgaaaaatcactatattctggttttgctctgcatgcatctgctgcaaatagctccttttatgatggcttatctaaaggaataccatcatattctttttgtactgataataagcggggtttaggagaaacacacatggtccctgattcatcagtgtataaagcttcaataaggctaccttggttggaaccaaaccgtcctgccatgcagaccagagatgatcattttagtagcacgcgacaagatttcagcatcaatgactctatgaagagcaattcctctttgcaaggggatatcattccgaactctgatactggagggttgcctttctccagatcagcagtgaacttggagactggatggaagcctcgtggaattctagtggcacatctccaggagcatcgctcttctgtcaatgacattgccgtatcaaatgataataccttttttgtgactgcttctgatgactcaagtatcaaaatatgggatacaagaaaattggaaaaggacattgctttcagatctaggttaacatacagcatgggtaatagccgagctctatgtacgacaatggttcatggtacttcacaggttattgtcggtgccagcgatggaacattacacttgttttctgtggattgtgcacgcagcgttgggactgttgtggaaaggtatgctggaattgttgatgtaaaaaggaacgagattaaagaagacgcaattctcagcgttgtaaattgttcaaccgacagctttagcccgactgttcttttcagcactgaacattgtggcatccataaatgggatacaagaaccaactcagaatcttggtcttttaaatcctctccggaggagggctatatatcggcacttgttgtgggcccgtgtgggaattggttcatctcaggttcttcgagaggcgtccttacactgtgggataataggtttttagtacctgttaaatcgtggaattattcaacattaagcccaatagagaaactatgcttgcttatacctccaccaagttcgatatcctctgctggaaggcctttagtttttgttgccgctggatgcaacgaagtttctctgtggaatgctgagaatggaaactgccatcagatgtttagaacagcaagcactgacaatgaagctgtgatgtcaaaggcgccatcgaggcctgttaacaagccagtcatcaaagatataaggcgagcaggcaattataagtacagaatcgatgaattgaatgacccacctgtacgccatccagggatacgttctttgctgcccttgccaggtggtgatctattaactggaggaacagatttgaagattcgttactgggatcaagcaaggcctgagcaaagcttctgtattgctggtccctcggcgaaagaagtccgttcggcaaaaggagatatcttggagaaagcagttggaaacgatgagtcttacgatataagatccagttttggaatacaggtcgtgcaggaaatgtacaaacagagtagctcggtctccggtttgacgcccaagactcagctcgcggtggcagctgcagattctgcagggtgccatcgtgacgcaatactcgcgttggcatccttcaacttgtctagccagagattggtatcaggcagcagagacggcgctgtcaaagtgtggaaatagcttctccagcatggggtaagattacaagtccacaggcgtgtacatattttggcctgtctagtgctcatacagtacatatgccactagttattgctgtacagaagattattccgatcaatacaagtcaaatttgacatgtacgctttcatccggtgtgaccacctcatctgtttcggttgatataaactataatcacttatcttataggagtatcgtggaatagcaaaaaataaaataaaataatcatgacgaataggaggcaggaggctgtccgactacaactgtatagggctccaatgtctaatcatactcctctacacaagaagtgtttgtagatggctgttattttggataatgaagggcctctaggtagtgttggggccgcaattaaaagaggcctggatgctgaa

SEQ ID NO: 56237 - DNA, 2926 bp, Zea Mays
cttcccgccacacccgaccccgtcccatcgccgtcgtcccagtccacgtccacgtccacgccgacgcacccgcatccctctctcgcctgcgccgcagctatgtcgggctgggacgagggcgccgtgttctacagcgaccaggcgcaattcccccgcggcggccctggcggcgacccagccgccgacctcacccgccactccgccctccgcaaattcaaggagtttctccgcggcttcactggccccaccggcgacttcccctaccgtgagagcctagtacacaaccgcgaccatgtcaccgtcgctattgaggacctcgacgccttcgatgccgagctctctgacaagatccgcaagtcgccggccgattatcttcctttgtttgagacggctgcggccgaggttctcgcaagtctccgttcgaaagtcgccggcgagaccggagagatggaggagcccgtcactggagatgtccagattttcctctcctccaaggagaactgcctgtccatgagatctgttggggcggattacatgtcgaagctggttaagatagcgggaatagcaattgctgcatcgagagtaaaagctaaggccacccatgtaactcttatctgcaagaattgccggagtgtgaggacagtgccttgcagaccaggcctcggcggggctattgttccacgttcgtgtgaccatgttcctcagcctggagaggagccatgccctctggacccttggattgccgttccagataagagcaagtatgtggatctccagaccctcaaattgcaagagaatcctgaggatgttccaactggtgagcttccaaggaatgtgctgctttctgtagataggcacctagttcagactattgttccagggactagattaactgttgttggcatctacagcgtgtaccaagcatccacaacccagaagggtgctgttggtgttaagcagccttacattagagttgtgggtttagagcaatctcgagacaataactcaaatggcccctcaaacttcactcttgatgaggaaatggaattcaaagaatttgcacagaggccagatgcatatgccaagctatgctcaatgattggtccttcaatttatggtcattctgatgtcaagaaagctattgcatgcttgttatttgggggatctaagaagaggctacctgatggtgtacgtttaagaggggacattcatgtcttgcttctcggtgatccctccacagcaaaatcacagactgcacctattgcagtatatacatctggcaaaggatcgtctgcagctggtcttacagcatctgtaactcgtgatagtagctcgcgtgagttttatttggaaggaggagccatggttttggctgatggtggagtagtttgtatcgatgaatttgacaagatgagacctgaagacagagttgcaattcatgaggccatggagcagcagacaatatctattgccaaagctggcattacaacagtactcaattcaaggacttcagttcttgcagctgccaatccaattgcaggacgctatgatgatcttaagaccgcgcaagataatattgatctgcagacgaccattctttctagatttgatctaatctttatcgtcaaggatatcagaatgtatgatcaagataagagaatagcaagccacattatcaaggtgcatgccagtggtgctgcagcttcatccacaaacacagaggggagtgaaggagagaattggctgaaaaggtacattgagtactgccgcgccacatgcaaaccacggctttcagaaaaagcagctgagatgctgcagaacaaatatatcgagattagacagaaaatgaggcagcaagctcacgagacagggagggccgcagctatacccatcacagtgaggcagcttgaagccatcatccgtttgagtgaatctcttgcaaagatgagattgacaagtgtggctacaccggagcatgtcgaagaggcattcagactgttcaatgtttccaccgttgatgctgcaagatccggaatcaatgagcatttgaacctgtcaccggagatcgcaaacgaaatcaaggttagtatttgcatcccagggtatacaaaattcagctattgaaccttgcattttcctgaacggctttcatcatttttttttcatctgacagcaagcggaggcacaaataaagagaagaatgggcatcggcagccacatatccgagcgacggctgattgatgatctaaaccggatggggatgaatgaatccatcgtcagaagagcccttctgatcatgcatcaaagggacgaggtggagtacaagagagagcgccacgtgatcgtccgaaaggcttgaggtggagaggccagtcagattcacggcatacaacgtacactggaggcggtccttcctcttcggacgtgtgtataccttcactgaaactgcacctttgtctgtccagaggacgaggcatgccttagttgatctctgacatgactcttgtaatctgcacacgagtggatgcaaccttttgcttcgtgcaaatggagctttgtagctgtaccacagtagtctgttgctgcctgtgatcctaaaccatagtgttgtgagcatgaagacttcgtttttttggaagtaaccataggttctgaactgcattgtgctgtgtagctcgtcaatcaattctggaatgcgaactttgtttactgcatcaccaggagtaggacagacagtgtgtggagcttagttgtaataattataataatatatgctatgtgttggggaccttcggcatccgaaggtcctcaaaaacaggatttaacagtatttctggagtacaatgtgtgagcaggtatcctcggacaagtcggcgttgctgtaaaccggaataatacgaaggttgatacagagccgaaggtgtga

SEQ ID NO: 56238 - DNA, 986 bp, Zea Mays
catcggatccatccgcccttcaggcgccaaccatccatagggaacaaccagaaaagagaggggagcagagaccaggccgaagggtgactgagagacggcagccgtgtcaggcgaggtcgccgatgcggaggaggcaccgaaggccacgagtagcctcggactccgcgggaaggagtaagaaggagggcatggggagggagctgggctcaggcgctgcggtagaaaacgccaggcccgcgtacacgggggctttggctggtgatgcagcggggaccgccaccgtcttcttcgtcggcactacggcgggcaccgaggcagaaaacacccggcgcgcgaacacggtcgcgttggctggagatgcagcggggggcgacaccatcttcttcgtcggcaccacggcgggcgcctgcggcccgatccgaccagtggagcagagggcgcgctggtcaaccgccgcggcttgcgccgcggggggcgctgctatcaccggcgtaggggctggcgcgggagctggagcgggcggttcctcgccgcgcttcaagatccggacctcctccatgacaagccgccggttgggattctccttaacgggggacagctgcttccgcgccgaagcagccggcctagccaccggcgaacggcgtccagacgctgcaggacccttaacgggcgtcgccgtcttctgcgccgcagcaggcttcggcggcgacgtcgaggctatgggcgccgcggcccttgcgggcggcgaagacgcggccgccggcttggggctacggcgccggcgcggcttcgccggggacggggtgtacgcgtcgagatgcaggcggttgttgagcgcatcgtgggatctgagaaccgccgtggccatggcggctatggaggattcgcgagggaggtcgctgcctggctaaccctaagcgttaggggagaggaggcgggcgcggaggagggagagaagaggaagcaaagcaaatacgagacggaag

SEQ ID NO: 56239 - DNA, 517 bp, Zea Mays
tgaacacttcaaatattctcctgttttaactattagggctttattttagagcctatggttgaggctcttaggccttgatcattggtccaggaatccaccaaggaactgttttagctaaccaaagcttatataaattaggttttaagttgatcaatacttatacataaattatgcaaacaatccgctccggttacctcagatccgaacgggccgacttggaacctagaacccaagaaataaaacggtgaaaaaataattaccaaaagaatgacgtcaaattcttttctctgtcagtttcccggttacaggcggcagaagatttgtttcagtcttcctgaagagtctcaggccggcatacggagtcaaattgactcagcaatgcacgggagcttcagcggtcaacaacaccggcggtcagagtaatccaaagaaggctcctagagtacgcacgttcaactgccgccaaggaagaatacttcagccttagcgataaccgcggcacagagttcgccgattc

SEQ ID NO: 56240 - DNA, 211 bp, Zea Mays
ttgtgatttagaggtttagacttatattatacagtctcttagttgtttatcatacatatcaacatatgctctaagagcatctccaactaggtgtcctataaaaatgtggtataaattaaaaatgactatattatatatgacaaatattctgctccataagtaaaatcctaattctatattatagggcagcctactatagtctagtataatt

SEQ ID NO: 56241 - DNA, 2070 bp, Zea Mays
gcacttccgagcgatttcctcgtcatttctctcatccgctgcgcaccctctcccactcggcgaagaagtggggggaaaagctcgaaagcgggagccggcgagcgagatgggcgcagggagcagccgcgcggacgcgccgtcgcggcgccgggcgcgcctcagcctcggcgggtgcttcggggccggatcctcctcgtccgcgcacgacggcgggagcttcgccgccgccgggccctcctcctcgcgcgccatcgaggtacaatcacgacagtcagggcgacaagtgagtgccctgaattttcaggcttctctagctgctaaggatctccaggtttccagtgagtcaaatccaaggctgcattcgtcttcaagtaccataagccatcatctcagattcaatcacctcaattaccatgaaaacaaggaagatggcctggggtctgaaaacgctgaaacaagtggtcttcaaagctcatctaggaaacctgtcatggtaaggggaagtctcattaatgaagctgttaatggtgacatatcaggagaaggaataagttctataggatcagagctggaaaatgttcctagcacagtctccactaatgaaattggtggctcaacttctgaatctggtttgggcccctcatcgatgacatctgaaaggatcatgtctgactcagaagtagagatatctccgcaagggacctcatccacaactgtcatgacaagtgaaagatcagatgcatctcaatctagcttaacatctgtgttttctaactcttcaactgcatcatctgtgatcgtggaaccaatgccagatccaatccctacaacggcagatgtccccatattcagtgggccacatggtgaagctggagggagtatattacatgacgacatgatgagcattttctcaaatgacggtgtaggacgctctatagattcaagcagcagtgaaacaaggaggagtcacagaaggatcctgtgggatgcattttccaggcgtggctcaagaggttatccagaatctgatgctgatgaaatgggattttttagtacatggctagaccttggtgatgatatttttgaagagttgggggaatcaagatattttcatcgcaggcgacatggttcaatcagagtaagccagtattcaagatcccggattagggagcatcgccgtgctgtttttgatagtgaatctagcgcccgagcaagtatatcaagaattgtcatgttaactgaggcgctatttgaggtgttggatgaaattcaccgtcaacctgcatcactttcactttccatggtctctgttcaggctcctgaatctgtagttgattcgttgccatgtaagagctacaaaaagcttgagacaccccaatgcagtgatgatatggaacagtgccatatctgcctaaccgaatatgaggacggagaccagataagaacccttccgtgcaagcacgagttccacctgcaatgcgttgacaagtggctgaaagaaatacacagggtgtgccctctgtgccgtggagacgtctgcgaagtcgcctcgtgaagaccttggcgctgccatccttccgatgtggcgccggtggatagggcaccaccgccaggcgccagctgttccgtggttgaagctggttcggtcaggcaatggtgatccaacttggacagttgacaccgcaagagcacgtcaactttgactgtctccctgccgaagagaatggccaaaccaaccctgcgaccgatgagtcgctgttcctgtcatcaacttttaagataccgagactttgtatacagtagcttttgtagcctcccgcctcgtgtatgacagcctgtacatatttgtaaattctggaatcaaatgtcacaatcccctgttctcgtgaagaacacagccgtctcgagctcccccgacgacgaccagtcatcagcgccatgtatcgtcccggcccgtttcggacgggggagcggcggcggcagctagcttcgtcctatctagaggaggaggtgggaggaggaggaggaggagggctcatgctgatggcgtgccaaatgtcaatgtccaac

SEQ ID NO: 56242 - DNA, 1926 bp, Zea Mays
gcacttccgagcgatttcctcgtcatttctctcatccgctgcgcaccctctcccactcggcgaagaagtggggggaaaagctcgaaagcgggagccggcgagcgagatgggcgcagggagcagccgcgcggacgcgccgtcgcggcgccgggcgcgcctcagcctcggcgggtgcttcggggccggatcctcctcgtccgcgcacgacggcgggagcttcgccgccgccgggccctcctcctcgcgcgccatcgaggtacaatcacgacagtcagggcgacaagtgagtgccctgaattttcaggcttctctagctgctaaggatctccaggtttccagtgagtcaaatccaaggctgcattcgtcttcaagtaccataagccatcatctcagattcaatcacctcaattaccatgaaaacaaggaagatggcctggggtctgaaaacgctgaaacaagtggtcttcaaagctcatctaggaaacctgtcatggtaaggggaagtctcattaatgaagctgttaatggtgacatatcaggagaaggaataagttctataggatcagagctggaaaatgttcctagcacagtctccactaatgaaattggtggctcaacttctgaatctggtttgggcccctcatcgatgacatctgaaaggatcatgtctgactcagaagtagagatatctccgcaagggacctcatccacaactgtcatgacaagtgaaagatcagatgcatctcaatctagcttaacatctgtgttttctaactcttcaactgcatcatctgtgatcgtggaaccaatgccagatccaatccctacaacggcagatgtccccatattcagtgggccacatggtgaagctggagggagtatattacatgacgacatgatgagcattttctcaaatgacggtgtaggacgctctatagattcaagcagcagtgaaacaaggaggagtcacagaaggatcctgtgggatgcattttccaggcgtggctcaagaggttatccagaatctgatgctgatgaaatgggattttttagtacatggctagaccttggtgatgatatttttgaagagttgggggaatcaagatattttcatcgcaggcgacatggttcaatcagaattagggagcatcgccgtgctgtttttgatagtgaatctagcgcccgagcaagtatatcaagaattgtcatgttaactgaggcgctatttgaggtgttggatgaaattcaccgtcaacctgcatcactttcactttccatggtctctgttcaggctcctgaatctgtagttgattcgttgccatgtaagagctacaaaaagcttgagacaccccaatgcagtgatgatatggaacagtgccatatctgcctaaccgaatatgaggacggagaccagataagaacccttccgtgcaagcacgagttccacctgcaatgcgttgacaagtggctgaaagaaatacacagggtgtgccctctgtgccgtggagacgtctgcgaagtcgcctcgtgaagaccttggcgctgccatccttccgatgtggcgccggtggatagggcaccaccgccaggcgccagctgttccgtggttgaagctggttcggtcaggcaatggtgatccaacttggacagttgacaccgcaagagcacgtcaactttgactgtctccctgccgaagagaatggccaaaccaaccctgcgaccgatgagtcgctgttcctgtcatcaacttttaagataccgagactttgtatacagtagcttttgtagcctcccgcctcgtgtatgacagcctgtacatatttgtaaattctggaatcaaatgtcacaatcccctgttctcgtgacctgatgttgtagggaacatattcggtgctgatggagccgggaacagagatgtgctgatgg

SEQ ID NO: 56243 - DNA, 1898 bp, Zea Mays
gcacttccgagcgatttcctcgtcatttctctcatccgctgcgcaccctctcccactcggcgaagaagtggggggaaaagctcgaaagcgggagccggcgagcgagatgggcgcagggagcagccgcgcggacgcgccgtcgcggcgccgggcgcgcctcagcctcggcgggtgcttcggggccggatcctcctcgtccgcgcacgacggcgggagcttcgccgccgccgggccctcctcctcgcgcgccatcgaggtacaatcacgacagtcagggcgacaagtgagtgccctgaattttcaggcttctctagctgctaaggatctccaggtttccagtgagtcaaatccaaggctgcattcgtcttcaagtaccataagccatcatctcagattcaatcacctcaattaccatgaaaacaaggaagatggcctggggtctgaaaacgctgaaacaagtggtcttcaaagctcatctaggaaacctgtcatggtaaggggaagtctcattaatgaagctgttaatggtgacatatcaggagaaggaataagttctataggatcagagctggaaaatgttcctagcacagtctccactaatgaaattggtggctcaacttctgaatctggtttgggcccctcatcgatgacatctgaaaggatcatgtctgactcagaagtagagatatctccgcaagggacctcatccacaactgtcatgacaagtgaaagatcagatgcatctcaatctagcttaacatctgtgttttctaactcttcaactgcatcatctgtgatcgtggaaccaatgccagatccaatccctacaacggcagatgtccccatattcagtgggccacatggtgaagctggagggagtatattacatgacgacatgatgagcattttctcaaatgacggtgtaggacgctctatagattcaagcagcagtgaaacaaggaggagtcacagaaggatcctgtgggatgcattttccaggcgtggctcaagaggttatccagaatctgatgctgatgaaatgggattttttagtacatggctagaccttggtgatgatatttttgaagagttgggggaatcaagatattttcatcgcaggcgacatggttcaatcagagtaagccagtattcaagatcccggattagggagcatcgccgtgctgtttttgatagtgaatctagcgcccgagcaagtatatcaagaattgtcatgttaactgaggcgctatttgaggtgttggatgaaattcaccgtcaacctgcatcactttcactttccatggtctctgttcaggctcctgaatctgtagttgattcgttgccatgtgccatatctgcctaaccgaatatgaggacggagaccagataagaacccttccgtgcaagcacgagttccacctgcaatgcgttgacaagtggctgaaagaaatacacagggtgtgccctctgtgccgtggagacgtctgcgaagtcgcctcgtgaagaccttggcgctgccatccttccgatgtggcgccggtggatagggcaccaccgccaggcgccagctgttccgtggttgaagctggttcggtcaggcaatggtgatccaacttggacagttgacaccgcaagagcacgtcaactttgactgtctccctgccgaagagaatggccaaaccaaccctgcgaccgatgagtcgctgttcctgtcatcaacttttaagataccgagactttgtatacagtagcttttgtagcctcccgcctcgtgtatgacagcctgtacatatttgtaaattctggaatcaaatgtcacaatcccctgttctcgtgacctgatgttgtagggaacatattcggtgctgatggagccgggaacagagatgtgctgatgg

SEQ ID NO: 56244 - DNA, 480 bp, Zea Mays
agcgaacgtaagcagagaaaaatgtcccactgatgacgcgggacgccggagcggaagggagggcccaccatgtcagcgccgccgccgccgccgtttctgtcctattctgctcttcctgccgatctgtgcgccgcctcttcttcatcccgtccctagcagccgatcccaactcccgatcttcggttcgtttgaggtttgttatgcccatcaagaaattacatcttgctgcatgaaacgccgaaacgggccttagcaagtggatgcatgggtgtacatgacacgcatcctgatgccgcagaagctagagagacgtgatcctctttttactgcagctacagctagtagcattcgtgcttccaaaagtgatccatgatgtgatgtaagaaaaaaaaaagatgtaaaaacacaacatctttgctagtagtgagaagatatatttatatgactatatatgctatattctggtagcgaagaagacag

SEQ ID NO: 56245 - DNA, 410 bp, Zea Mays
aaataaagttcaaagttcccaaacagtggtattatacagtggttgccttctaatgacatctgctctgtcgtgtcgtgtttgttgtgggctgaagtgcgcaccaacctctagcttatataccttccaaaaggacactgatatctgcaagaggaacatatccggtgcttctctctcaccttttttttttttttttgcttctgtgaatcttttgcggtgtattaccaagtcctatctctctcctcaagataaggtttcgttgggtgttttttccccaatataatttgtgtcgctacgttatcccccgtagaagcagcagaatgggttttgcagcccacggaattgcggcggataggtactgcctttcctttgccccagcccgatgtggagaaatttgctattttgtcactctc

SEQ ID NO: 56246 - DNA, 686 bp, Zea Mays
cgaaaagcgaacgtaagcagagaaaaatgtcccactgatgacgcgggacgccggagcggaagggagggcccaccatgtcagcgccgccgccgccgccgtttctgtcctattctgctcttcctgccgatctgtgcgccgcctcttcttcatcccgtccctagcagccgatcccaactcccgatcttcggttcgtttgaggcccgtgagggtctcctaggaccgactgctcaagggattggagtcaccgttttttttttcttttgagaaagtgcaaagcattagagaaacgttgccgttggtctagatgacgacgagatgattgcgctgctccagaactgcaagcaacctcagaagcctttgactctgcgccaaccagactgactgatgaaaggctcaaggcccctggtctcaactgccctatgcttgaggttgttgagctgacctttacgttttgttcgagtgtgtatcccactgaaataaggtttcacacagaaaggtatggtatagtcgcactcattcagacctgcctagtccgtgctttcatgctggacggagtgtacatcttttatgactcggggttggagggtatttcgtcagcgccattcctggagaggctcaagcttttggatcgcaagaggataacaggtgctggggtgagtttcgttgccccgcgcttgagtagtctc

SEQ ID NO: 56247 - DNA, 2486 bp, Zea Mays
caattattcggcccatatcacatgacggcccatcccagaacccagttcaactattgatgaggacgacaaagaagatattttccttcgccccgaaaagcgaacgtaagcagagaaaaatgtcccactgatgacgcgggacgccggagcggaagggagggcccaccatgtcagcgccgccgccgccgccgtttctgtcctattctgctcttcctgccgatctgtgcgccgcctcttcttcatcccgtccctagcagccgatcccaactcccgatcttcggttcgtttgagtactatgtgaacatcgaattccaggctgtaacttttgctgcatcgggcaaatggttttgatttgctcgatagaactgtcagtttaggaaccactaggcgtcgttacatactgtacgctcgcaagtttcatggtattattagtaaagtgctccttacaaatttatttttagtttggcatgagtattacttctaattcgttgatttgttctaggttaatttgctatttgtttcagaatttcctactcatccgtagtgttttagtttaatttggttgcgcttctacattagcttatttgcatgctcagcgatttagaagaaaataaactcggacacctctctcttcggtgagatcttagtctaacttaacatggaagttaagatttaataaggtgtttggtttgaggaaagggctagtccattatctacttacttctcactttttgtttggtttgtagaatggaatgatttgatccatcatcatcttattcctcagagttagtactgatataaagaatgagttcatttcatcaaatttgaggaatggaatcataatgcaccacctcattttggatgaattgatccatcaaaccaaacacctcctaactgtcagcattggttactgcgatcagggtaatcctaaggttatttttaagctaatcctaaggttatttttaagctggtctcggtcccatagggtgtatataaataaaaaagatgatttcgagaataaggctaattattcaacatataaatctatctaactgattaattaagtgttgaaagagtttaagggactctcaaaccggctccggctcctgtaggagccctcccagatggtctaaaaaaagatctctcaacaaagagcactgagtaatcagagctattattttatagagaggagtgagccaaaggggggggggggctcctatcctagtgcctcctaccccactctcccatcttgcatttctctcacgccaaaatgagccgttttactagacgatttgttaagaaaacactacctcctatataggaattgctcttcaagagaagtcaaagcgaagtcatttttagtagagccggagccgtgtcaaacagtccctaaatacatcaagttcttcatcaagagaggcgtcgagtggctagagtaccttggcaggaccggatcattggtggaacttgtggtgaatgattgcaagggaatccttcaccacaagtttgacctcctaaaattttgtccaggtctccaggatagataaagtttgagaagtttgagatcaatggcaattattggttactagggtctctcggtgatgatggtttgaacatgtttaatggagatctctatgggcaccaatgcttaatgagattataatgtgcgatagtgatggaaagagatgtacggggagatcaaagttgatgtgggaagagacggtaaaagaagacttacaaagatgaaatataataaaagatttaaccttaaatagggtgaatagaaaatagttatccacatgactgaaccttgatctgtgggctctgttgggttttaactttagcctatccaacttacttgggactaaaagatattgttgttttgttgtagtagtagtagtagtaggccctccctctgatcccgcgtatgatgcctgctacccgtaaaaatatgatatcttctgtgagaatttgaggttggcacatatattaactttgcaggcccgtgagggtctcctaggaccgactgctcaagggattggagtcaccgttttttttttcttttgagaaagtgcaaagcattagagaaacgttgccgttggtctagatgacgacgagatgattgcgctgctccagaactgcaagcaacctcagaagcctttgactctgcgccaaccagactgactgatgaaaggctcaaggcccctggtctcaactgccctatgcttgaggttgttgagctgacctttacgttttgttcgagtgtgtatcccactgaaataaggtttcacacagaaaggtatggtatagtcgcactcattcagacctgcctagtccgtgctttcatgctggacggagtgtacatcttttatgactcggggttggagggtatttcgtcagcgccattcctggagaggctcaagcttttggatcgcaagaggataacaggtgctggggtgagtttcgttgccccgcgcttgagtagtctc

SEQ ID NO: 56248 - DNA, 1598 bp, Zea Mays
tttttttttaacttgaatagagccataatatagtgttctctttaaattaaagctcttacaagtaaaacgataggtttctgagggtacgcaagaactcggttacaatagattaaatcaagaaatggatacgaaaatcactacaaaccattacaacactacgtaccgagaacagcaaagcagcacaaaaggaaggaactgcagactcagtaaaaaggtaaatggaggcaccacagggcagtactagggcagtgacacgagactgtttggtttgttttcctttttctttaaaaaaacacggaatttgggaacgctacaggttgaaagctgaaactaagagcaactccaataattctctaaacaactctctaaatcttaaatttaagaagtgagcagaaaattgcttctccaatggttctctaagtagacttgctaaatttagttagttgttatccaactctattaactctccacatttagcaactcgatagtgactccctaaatgatgttgacgtcaatttcttcacagtggcgtgattattttttccctttcccacacagtgaggtagccaggtatagcacactttttcccactttctagcacagtgaggtagctagatcaaatgcgtgtgacacaagtttctcctttaccgtcagaccctactgtcccatagattgcgccatcggaccaccactcctcataggtcatgtcgaccgaccttttctcttccgccctcgacatcctctgttctcaaccttgccgttagccagatttgatggaggtaggactaccaaagctagattcaaaatcgaactactccctaaatatgagtaactattgcacactaagttattttttacttcccatagctatttagtaacttgctaaatatgattttagcaagcttttttatagagaactattgaagttgctctaaagtattcaaagcagtacaaaagcgattcgctacagagaagaaaaacagaactgatgcagggacatgagaatgggaaaaaaagcggagggaattagaaaccaaagacgccagctgtattcctttccgagggaaaaaaagagagagagagagaatcgcaatataaggagggagtagtggaagaagaacacgaatttccctttccttcgaaaaaggaaggggcgcagatttgataaagagcactgcaggtaacccagaaccaagatttgacagggtcgatcgaatgtcgaacattggattgtttcgaagaataaaccctgcaaggagcagaagaaaaggacaccaaaccaaacagatgaacgaaaacctgaggaccacagaacgctaccagaaaattctgggggaccgttccccagcaagaagaagaagaagaagaaatggacttgggtccgtactgaacaaaaggctctgttgtgtgtagacgaactggggtctggggaaaggaaacgactaaacgagagaggcacacgcagacgaacataaatcaccgcactggatgggtcaagaagaggcgagattttttcctgcttctcatcgacgtatatatactatgcaccagagaaaaaagagagagtaatatgtgaagaggaaacgcgagaagtgggg

SEQ ID NO: 56249 - DNA, 1390 bp, Zea Mays
gtctgcagaaccgaaaccacccacgcgcgctcgctccccgcgcccaattcggagatccacccccccaccgaatccgctcgcctgcgcctgcgcctgctacctgcgatccatctctcatggcgaccaccagcgccaggaggccgagcggcccggtgctctcggccgcgcactaccgctccgcctcgccgacgcgcgtctcgctcgccgggcagcccgtcagcgtcagcgtgtcctcgtcgtcgcggggccggcggacctgcatgtgctcgccgaccaaccacccgggctcgttccgctgcagcctgcacaaggagcgcgtcaaatatctaacacataaatttagaacaaacaattagagcttatttagatatccatatatcttccttaattcatgcatattaaagtgtcaagcaatttaaagcatagattaggggaatacatgagcatctaaacaaaacatttagcatctatttggatcccataaacttaaaaccggcatgtagaaagtgatttctatttcattattagattatcttttttccatttccaaccaatacaaaaacaggatcttagagaaaaaaacagtgctcgcagaatattgtccacttccactatcagcaaccaaacaaatgctatatgaattcatgtacgtgtacttttgtgtgtgtttactttcatacctgtatattatattcactccgtcctaaagtagttgattacattcatgtgtgtatattcatcccgtcctaaaacagttgatgtgctatatatgattctaattttgtgccaaaatatatagttgacattctcactcttcaagagaatacactcctctctttctaatacatcattttcccaatacctctctctctacttttaaacgtcattttttttatcttttgccttctacgtaggtctctatgataaggtctagaaaatcaattattataagaccggaggagtatgatcaagtctatgcagcgtggcatttctttttctcaaatgcaaaatggaacagaagctcttctgtgaaggactttgactgggcgacgcagtctcacccttgctcttcaatttagttggagatgtttctttatatgtgatgttggaaacagctaactgcaatggccttattagatgtttggtcccagatttggaataataggaggtttggcacatctacagtacaccgatcgatgacgtaatcctttttttttttggagtttggatgaggacacttgacactatctgtagtgcaggatgtatcttgtattcttgtcttgttaagaatttatctacagtacaatagaacgtacgtagcctgggtttaccctccaggcagggtagacggcgtcggcgtgtagtctcgtttttggtctaaccttccggc

SEQ ID NO: 56250 - DNA, 1777 bp, Zea Mays
gctgcatgtgctcgccgaccaaccacccgggctcgttccgctgcagcctgcacaaggagcgcgtcaaatatctaacacataaatttagaacaaacaattagagcttatttagatatccatatatcttccttaattcatgcatattaaagtgtcaagcaatttaaagcatagattaggggaatacatgagcatctaaacaaaacatttagcatctatttggatcccataaacttaaaaccggcatgtagaaagtgatttctatttcattattagattatcttttttccatttccaaccaatacaaaaacaggatcttagagaaaaaaacagtgctcgcagaatattgtccacttccactatcagcaaccaaacaaatgctatatgaattcatgtacgtgtacttttgtgtgtgtttactttcatacctgtatattatattcactccgtcctaaagtagttgattacattcatgtgtgtatattcatcccgtcctaaaacagttgatgtgctatatatgattctaattttgtgccaaaatatatagttgacattctcactcttcaagagaatacactcctctctttctaatacatcattttcccaatacctctctctctacttttaaacgtcattttttttatcttttgccttctacgtaggtctctatgataaggtctagaaaatcaattattataagaccggaggagtatgatcaagtctatgcagcgtggcatttctttttctcaaatgcaaaatggaacagaagctcttctgtgaaggactttgactgggcgacgcagtctcacccttgctcttcaatttagttggagatgtttctttatatgtgatgttggaaacagctaactgcaatggccttattagatgtttggtcccagatttggaataataggaggtttggcacatctacagtacaccgatcgatgacgtaatcctttttttttttggagtttggatgaggacacttgacactatctgtagtgcaggatgtatcttgtattcttgtcttgttaagaatttatctacagtacaatagaacgtacgtagcctgggtttaccctccaggcagggtagacggcgtcggcgtgtagtctcgtttttggtctaaccttccggcttcgaacacaaaaaaaaaagtccatgttttttctaataataaaccattgtgtgaatcagttctgagtaggcttgatgcttacatgtgactatccaatagagtattattttgtgtaagtatcaactcaatcccagtgagtaatcaatcttaagtttaacgaagtttctatataaaaaagatatagatagacatcatagtaataagtattgtctctatattataagcttacatcgtgcaaacattaccgcggggactaagattaaaagcacctccaatagttatttaaatttagcaccctaaattatagattttagaggtgactaaaacatttcaaggagtagaaaaaaatttgtgctacaatagttctccagctgatttttaaagttgtacacatcaacaaaaaattaagttggtctaccttctttttttgcacaaaaataattatgaacaacctttcatgacatcttggaacatcggattcggagctatcgatggaagaccagacgaccgcgacgatagacacacgccgtgcaccaaggtccaacgtaggaggtgctccgatggcgcctcggcacaagagattgtttggcgatggctgtgtcaaggtgtgtagacggtggagatggatttgtagtaaatggg

SEQ ID NO: 56251 - DNA, 2181 bp, Zea Mays
cgacgccaggccgctccgcccaccgcctgccgccgacggtggcttcaagctcacgccggttctgaccgccgccgctgctgaagcttctgatttctgaattggaacgacacggtttttcttgggccgtctaaaagcccagtgggctcaaaaaaattaggcggcgccaccacgtcctcctccgactactcgctcgctccgccccggcgtcccgccctcagccgccgccgtcgccccctccctcggttcgcctcgtcgtcgtcatgggcaaggcctccaaggacaagagggacatctactaccggaaggccaaagaggaaggctggagagctcgcagcgccttcaagctcctccagatagaccaggagttcaacatcttccatggagtgaagcatgtggttgacctgtgtgctgctcccggaagttggagccaggttttgagccggaacctgtatgtaccagcaaaacagtcttctgattgcaaggaaggtgatcttcctctcatcgtcgcaattgacttgcaaccgatggccccaatagaaggtgttatacaagtgcagggcgacatcaccaatgctcggacagcagacgtggcattttgatggatgcaaagcagacttggttgtttgcgatggagccccggatgttaccggacttcatgatatggacgaatttgttcagtcccagcttatactcgcggcattggctatcgtgactcatgtactcaaagttggtggaaaatttgtggcgaagatatttcggggtaaagatacgagtctcctgtactgccaggtaacgttcactttgctcggcaagttaagatcataagatttttcacgaggctttgctgagttctccatcatattcagtatggaagccttgctagctatggtttcctgactgttgttgttcccacattgtgcgcgcccccttgcctttgtcaggccccctttggaatggaggataggaaaaatataggaataggaaaaatataagaattgagatggtggatattttgaatcctataggaattgaaaacaaaggaactgagataagaatgcctttggtagcaccataggaaaaataaaggaatcactttgctgtgtttttgaatttgaaacaagatagccgttgcatagtggcagcaagccaaccagaaactagaaaaacggcgcgaaaggtagcagacgcgggtgaaaagtagcccgacgcgcgaacattcccgccaggaatcgttccaagaggtctgacctcttggtaaatttcctataaaatcagaccacggaacggcaatcctatggattctttcctttattttttttgggaaccaaagggacagataggaaaaaatccttagcaacagtgatcctacgaatttcctttgccaaccctccgttccaaagggggcctcaatgttttgatgggatgctgattggggactcgattcgtacatgtggctttatacagctaaaactgttcttctcgcaagttacgtttgcgaagccaaaaagtagccggaactcaagcatcgaggcgtttgcggtctgtgagaactactcacctcctgaagggttcaaggaggaagacctataccacctgctagagaaagtgggtactccctcaggagctggcgatctagattgcagaagcggatggctggagggaccaaacaaggtgtacatcccgttcctggcctgcggggatctgagcggctacgactccgaccgctcgtacccgctgcccagcagcacggacggtggctcgtaccggagcctggaccccgtgcagcctcccatcgccccgccttacaagaccgccctgcagatgaagaaggcttccagccacggcgccggcgcggacgccatcaagccgtccgcagactcctgagccgcagaccgtttccgtttaccaccttgcgcggtggaagttgctttcgctgggtcctggacctggctctctagtctctctctacagaaacagaaccttcatctacgaaactaaaaaaaaaggaaaaaggattggaaacattgttgtggtaattttgagctggggatctgtgcagcacgtaactggttactgctgattaggctgagatcactgtttgtgtcctttgcatatttttgccttgtcttcggcaaccggaattccgggtgggcagcgtctcgtgcggtcgtgccctcaagg

SEQ ID NO: 56252 - DNA, 2620 bp, Zea Mays
caacagtttgaacgtagtttaaataacactgcagtccatacaataggaaataacacttgggcataaatgacacaacgaaaaaaataccgttgaaaaacatggcagctgtgaaattgatagatttctgtttaaacttagtagaattaaaatgggccatagcttaccaattcagcagcttgaaacctggcagttgtttctcttcaagcttatcaaaaatattttttgatccattcaccaaaaaatattcagctccaatccaaaatctttttaaaaaagtctccactattcctaagctatccacataataagtattctgtttctttaaatcattatacttgcacttgtacctatactgaatgagaaatcatcacgatcgggtaaagtctgtggccgatttgatttaaccaatccaaggcgagaacgcacgagcacgacgccaggccgctccgcccaccgcctgccgccgacggtggcttcaagctcacgccggttctgaccgccgccgctgctgaagcttctgatttctgaattggaacgacacggtttttcttgggccgtctaaaagcccagtgggctcaaaaaaattaggcggcgccaccacgtcctcctccgactactcgctcgctccgccccggcgtcccgccctcagccgccgccgtcgccccctccctcggttcgcctcgtcgtcgtcatgggcaaggcctccaaggacaagagggacatctactaccggaaggccaaagaggaaggctggagagctcgcagcgccttcaagctcctccagatagaccaggagttcaacatcttccatggagtgaagcatgtggttgacctgtgtgctgctcccggaagttggagccaggttttgagccggaacctgtatgtaccagcaaaacagtcttctgattgcaaggaaggtgatcttcctctcatcgtcgcaattgacttgcaaccgatggccccaatagaaggtgttatacaagtgcagggcgacatcaccaatgctcggacagcagacgtggtcattaggcattttgatggatgcaaagcagacttggttgtttgcgatggagccccggatgttaccggacttcatgatatggacgaatttgttcagtcccagcttatactcgcggcattggctatcgtgactcatgtactcaaagttggtggaaaatttgtggcgaagatatttcggggtaaagatacgagtctcctgtactgccaggtaacgttcactttgctcggcaagttaagatcataagatttttcacgaggctttgctgagttctccatcatattcagtatggaagccttgctagctatggtttcctgactgttgttgttcccacattgtgcgcgcccccttgcctttgtcaggccccctttggaatggaggataggaaaaatataggaataggaaaaatataagaattgagatggtggatattttgaatcctataggaattgaaaacaaaggaactgagataagaatgcctttggtagcaccataggaaaaataaaggaatcactttgctgtgtttttgaatttgaaacaagatagccgttgcatagtggcagcaagccaaccagaaactagaaaaacggcgcgaaaggtagcagacgcgggtgaaaagtagcccgacgcgcgaacattcccgccaggaatcgttccaagaggtctgacctcttggtaaatttcctataaaatcagaccacggaacggcaatcctatggattctttcctttattttttttgggaaccaaagggacagataggaaaaaatccttagcaacagtgatcctacgaatttcctttgccaaccctccgttccaaagggggcctcaatgttttgatgggatgctgattggggactcgattcgtacatgtggctttatacagctaaaactgttcttctcgcaagttacgtttgcgaagccaaaaagtagccggaactcaagcatcgaggcgtttgcggtctgtgagaactactcacctcctgaagggttcaaggaggaagacctataccacctgctagagaaagtgggtactccctcaggagctggcgatctagattgcagaagcggatggctggagggaccaaacaaggtgtacatcccgttcctggcctgcggggatctgagcggctacgactccgaccgctcgtacccgctgcccagcagcacggacggtggctcgtaccggagcctggaccccgtgcagcctcccatcgccccgccttacaagaccgccctgcagatgaagaaggcttccagccacggcgccggcgcggacgccatcaagccgtccgcagactcctgagccgcagaccgtttccgtttaccaccttgcgcggtggaagttgctttcgctgggtcctggacctggctctctagtctctctctacagaaacagaaccttcatctacgaaactaaaaaaaaaggaaaaaggattggaaacattgttgtggtaattttgagctggggatctgtgcagcacgtaactggttactgctgattaggctgagatcactgtttgtgtcctttgcatatttttgccttgtcttcggcaaccggaattccgggtgggcagcgtctcgtgcggtcgtgccctcaagg

SEQ ID NO: 56253 - DNA, 1113 bp, Zea Mays
cttggatcacctgaatttatatgagagggcgaagtcatttcagagtattgcaggaaatgttctggagaggggcgtatccgtgtcagaaaggagatcaaagtaaaaatccctccaggagtgagcaaaggcagtactcttcgtgtacgtggggaaggtgatgctggaccaaaaggtgggcctcctggagatctctttgtttgccttgatatagaggagccatcagatatcaagagggatggtataaacttgtattcaactgtgtcaataagctatcttgaagctattttgggcactgttatgcaagtcagaactgttgatggaaccagtgaccttcgaatacctccaggtatccaacctggtgatgtaattgtcttagcgaagcaaggagttccatcattgaataagccgtctatacgtggtgatcatctcttcactgttaaagtcgcaataccgaagcgcataagtgggcgtgaaagagaattacttgaggaacttgcatctttgagtaatggtcgctttgcacgaacagacactaagccaaaacctgcccagccaaaagccatacatcaagagaaagaagttggtgctagtcaagaagatacaagcaaatctaaagaagcagagggtgactggttgaagaaacttacagattttgctgggtccattgttaatggcgctgcgaagtggctgaacgacaacctgtaggctgtaaatatttactgcaggatagaagattgtcttacatggtgctgtagtccaatcaaagttcttagattcattgggggtccccacgagctcgtatattcgttttattggagagctgcaagattttcaggctgagtggcaaccgagggagtgaaagttgtcaactaatatcgtcgcggcgttggtcccttgtcattcttgccaagcaattatttttatgtagttggagtccttttcagtctggcaagcggcgtagaagtctgaagctgtgggatgctgatcccaaaccccgggactagacaaacactgtacttgaggttttggattaatcaaattcaccgatatcgaattgcaaacttatccaacttacaagatgcgatggaactatttattagaaatacgtttcgg

SEQ ID NO: 56254 - DNA, 1180 bp, Zea Mays
ccttggatcacctgaatttatatgagagggcgaagtcatttcagagtattgcaggaaatgttctggagaggggcgtatccgtgtcagaaaggagatcaaagtaaaaatccctccaggagtgagcaaaggcagtactcttcgtgtacgtggggaaggtgatgctggaccaaaaggtgggcctcctggagatctctttgtttgccttgatatagaggagccatcagatatcaagagggatggtataaacttgtattcaactgtgtcaataagctatcttgaagctattttgggcactgttatgcaagtcagaactgttgatggaaccagtgaccttcgaatacctccaggtatccaacctggtgatgtaattgtcttagcgaagcaaggagttccatcattgaataagccgtctatacgtggtgatcatctcttcactgttaaagtcgcaataccgaagcgcataagtgggcgtgaaagagaattacttgaggaacttgcatctttgagtaatggtcgctttgcacgaacagacactaagccaaaacctgcccagccaaaagccatacatcaagagaaagaagttggtgctagtcaagaagatacaagcaaatctaaagaagcagagggtgactggttgaagaaacttacagattttgctggatgcataacctctgttgaaatttgagccatcctaactgtgttagttgtgttcgagaaaaataaaaggtccattgttaatggcgctgcgaagtggctgaacgacaacctgtaggctgtaaatatttactgcaggatagaagattgtcttacatggtgctgtagtccaatcaaagttcttagattcattgggggtccccacgagctcgtatattcgttttattggagagctgcaagattttcaggctgagtggcaaccgagggagtgaaagttgtcaactaatatcgtcgcggcgttggtcccttgtcattcttgccaagcaattatttttatgtagttggagtccttttcagtctggcaagcggcgtagaagtctgaagctgtgggatgctgatcccaaaccccgggactagacaaacactgtacttgaggttttggattaatcaaattcaccgatatcgaattgcaaacttatccaacttacaagatgcgatggaactatttattagaaatacgtttcgg

SEQ ID NO: 56255 - DNA, 1406 bp, Zea Mays
cctgaatgtaatatgcagcatacactttcattatttggtactgccgtactggcataagcaaaatgtttggatccccagaataataggctgcttgatatgatgtgattctggggttcacagaggcgatatttggaacagagaaagatattatattatctcatttggaaacatgtgatacatgtggtggttctggatcaaaggctggctccaagatgagaatatgttccacatgtggtgggcgagggcaagtaatgcgaactgagcaaacaccatttggtctgttctcccaggtttctatttgccccacttgtgcaggagagggcgaagtcatttcagagtattgcaggaaatgttctggagaggggcgtatccgtgtcagaaaggagatcaaagtaaaaatccctccaggagtgagcaaaggcagtactcttcgtgtacgtggggaaggtgatgctggaccaaaaggtgggcctcctggagatctctttgtttgccttgatatagaggagccatcagatatcaagagggatggtataaacttgtattcaactgtgtcaataagctatcttgaagctattttgggcactgttatgcaagtcagaactgttgatggaaccagtgaccttcgaatacctccaggtatccaacctggtgatgtaattgtcttagcgaagcaaggagttccatcattgaataagccgtctatacgtggtgatcatctcttcactgttaaagtcgcaataccgaagcgcataagtgggcgtgaaagagaattacttgaggaacttgcatctttgagtaatggtcgctttgcacgaacagacactaagccaaaacctgcccagccaaaagccatacatcaagagaaagaagttggtgctagtcaagaagatacaagcaaatctaaagaagcagagggtgactggttgaagaaacttacagattttgctgggtccattgttaatggcgctgcgaagtggctgaacgacaacctgtaggctgtaaatatttactgcaggatagaagattgtcttacatggtgctgtagtccaatcaaagttcttagattcattgggggtccccacgagctcgtatattcgttttattggagagctgcaagattttcaggctgagtggcaaccgagggagtgaaagttgtcaactaatatcgtcgcggcgttggtcccttgtcattcttgccaagcaattatttttatgtagttggagtccttttcagtctggcaagcggcgtagaagtctgaagctgtgggatgctgatcccaaaccccgggactagacaaacactgtacttgaggttttggattaatcaaattcaccgatatcgaattgcaaacttatccaacttacaagatgcgatggaactatttattagaaatacgtttcgg

SEQ ID NO: 56256 - DNA, 1349 bp, Zea Mays
gttgacgtgagatgacacatgggcactttgatcaatatgatgtgattctggggttcacagaggcgatatttggaacagagaaagatattatattatctcatttggaaacatgtgatacatgtggtggttctggatcaaaggctggctccaagatgagaatatgttccacatgtggtgggcgagggcaagtaatgcgaactgagcaaacaccatttggtctgttctcccaggtttctatttgccccacttgtgcaggagagggcgaagtcatttcagagtattgcaggaaatgttctggagaggggcgtatccgtgtcagaaaggagatcaaagtaaaaatccctccaggagtgagcaaaggcagtactcttcgtgtacgtggggaaggtgatgctggaccaaaaggtgggcctcctggagatctctttgtttgccttgatatagaggagccatcagatatcaagagggatggtataaacttgtattcaactgtgtcaataagctatcttgaagctattttgggcactgttatgcaacaggtcagaactgttgatggaaccagtgaccttcgaatacctccaggtatccaacctggtgatgtaattgtcttagcgaagcaaggagttccatcattgaataagccgtctatacgtggtgatcatctcttcactgttaaagtcgcaataccgaagcgcataagtgggcgtgaaagagaattacttgaggaacttgcatctttgagtaatggtcgctttgcacgaacagacactaagccaaaacctgcccagccaaaagccatacatcaagagaaagaagttggtgctagtcaagaagatacaagcaaatctaaagaagcagagggtgactggttgaagaaacttacagattttgctgggtccattgttaatggcgctgcgaagtggctgaacgacaacctgtaggctgtaaatatttactgcaggatagaagattgtcttacatggtgctgtagtccaatcaaagttcttagattcattgggggtccccacgagctcgtatattcgttttattggagagctgcaagattttcaggctgagtggcaaccgagggagtgaaagttgtcaactaatatcgtcgcggcgttggtcccttgtcattcttgccaagcaattatttttatgtagttggagtccttttcagtctggcaagcggcgtagaagtctgaagctgtgggatgctgatcccaaaccccgggactagacaaacactgtacttgaggttttggattaatcaaattcaccgatatcgaattgcaaacttatccaacttacaagatgcgatggaactatttattagaaatacgtttcgg

SEQ ID NO: 56257 - DNA, 2375 bp, Zea Mays
ccgtgtcttcttccttccatccctaaaaactgccctccgctcgcgcgacacggaccatgcatcccgattactatctgccgagccgaccagcggcaccagaacccacaaggttcactcatggcgcccacgtccatgctcccgttcgcgccctccaatacgtcgctgccctattcctcccgcgccacaactgccgccgcgttcgctcctcgtgggctccaccacgccgcggccggaaggagcggcggcggccaacggctcgcgtgcgctgcgcctcggcgccgccgcggagggggtcttgtggtcagggcgtcggccgactactacgcgacgctgggcgtgccgcgcgccgccagtaacagagacatcaaggccgcgtaccggaagctcgcgcgccagtatcatcctgatgtcaataaggagcctggagcgactgaaaagtttaaagagataagtgcagcatatgaggtgctgtcagatgaaaagaagagggcgttgtatgaccaatatggtgaagctggtgttaagagtgcagttggaggctccggtggagcttacacaaccaatccatttgatctgtttgagacattttttggagcaagcatgggtggtttttctggcatggaccagagcgcgtttaggacaagcaggcgaagcactgctatacagggtgaagacatcagatatgatgtgattctggggttcacagaggcgatatttggaacagagaaagatattatattatctcatttggaaacatgtgatacatgtggtggttctggatcaaaggctggctccaagatgagaatatgttccacatgtggtgggcgagggcaagtaatgcgaactgagcaaacaccatttggtctgttctcccaggaaagctatgtatcatttgattgaagatgaaaaaaggcacagagaagaaacaccgaaacacaacacagtcacaccacaataacaacatacacatggtttctaggaacttaaaacaagtgtactatggacaacaaaaggacgaccacagcacagtgctaattaccaggggtgatagaatagcccaatggcccagttcctgtgatccccaaccctagcagcacaccagtcagttccttctttaatcactggtctgaccaccataataactgagcggcattgctaaaaacagagttgttatgatgcttccacagttcccaagcagcaaggatgataagagtattaaggtgttcctgcgcgttcgagaaaaaaaaaagaggattaaggtttctatttgccccacttgtgcaggagagggcgaagtcatttcagagtattgcaggaaatgttctggagaggggcgtatccgtgtcagaaaggagatcaaagtaaaaatccctccaggagtgagcaaaggcagtactcttcgtgtacgtggggaaggtgatgctggaccaaaaggtgggcctcctggagatctctttgtttgccttgatatagaggagccatcagatatcaagagggatggtataaacttgtattcaactgtgtcaataagctatcttgaagctattttgggcactgttatgcaagtcagaactgttgatggaaccagtgaccttcgaatacctccaggtatccaacctggtgatgtaattgtcttagcgaagcaaggagttccatcattgaataagccgtctatacgtggtgatcatctcttcactgttaaagtcgcaataccgaagcgcataagtgggcgtgaaagagaattacttgaggaacttgcatctttgagtaatggtcgctttgcacgaacagacactaagccaaaacctgcccagccaaaagccatacatcaagagaaagaagttggtgctagtcaagaagatacaagcaaatctaaagaagcagagggtgactggttgaagaaacttacagattttgctgggtccattgttaatggcgctgcgaagtggctgaacgacaacctgtaggctgtaaatatttactgcaggatagaagattgtcttacatggtgctgtagtccaatcaaagttcttagattcattgggggtccccacgagctcgtatattcgttttattggagagctgcaagattttcaggctgagtggcaaccgagggagtgaaagttgtcaactaatatcgtcgcggcgttggtcccttgtcattcttgccaagcaattatttttatgtagttggagtccttttcagtctggcaagcggcgtagaagtctgaagctgtgggatgctgatcccaaaccccgggactagacaaacactgtacttgaggttttggattaatcaaattcaccgatatcgaattgcaaacttatccaacttacaagatgcgatggaactatttattagaaatacgtttcgg

SEQ ID NO: 56258 - DNA, 2887 bp, Zea Mays
aagaaaggaaagcggtgcgagcggaggaggcgaccgaagcgccacttgcttgagtagcgaagcgcgagagcaatggcgtcgctgtcgtgcgcctccacgctgccctggacccccgcctcctccccgcggccctcggcggaccgccgcctcacggcctctcgccgggctccgtcgctggtcatcgtcgcccaggggaaggtgaagaaacaccctcaggtcatattgacagatgacatagaagaggtggggaagaaaggggatacaatgaaggtgcgagctggattctaccgcaactccttgcttcccaagggcaaggctgcgcttctaaccccagcagtccacaagcaaaatacaatagtggcatctgagaatgaaaatccacctttaatgccggcaatcatgactcctggtggtgcgcttgatctcgcaactgtactactgggaaatcgtataatcttcattggccaatatattaactcccaggtggcccaacgtgtgatatcacagcttgtaacacttgctgccatcgatgaagaggctgatattctgatatatcttaactgccctggtggaagtctctattcgatcttagcgatttatgattgcatgtcctggataaagcccaaagttgggacagtgtgctttggtgttgttgctagtcaagcagcaattatccttgcaggtggcgagaagggaatgcgctatgcaatgccaaatgctagagtaatgattcatcaacctcaaggtggatctgagggtaatgtggaggaggtgaggcgacaggttggagaaaccatctatgctcgtgataaagttgataaaatgtttgctgctttcaccgggcaaccacttgacatggtgcagcagtggacagagagggatcggttcatgtcttcttcagaggccatggatttcggattgcttgatgctttactggaaacaagatactagagaagggacacaacccacattctattagcagactagaaatactgcagaactggagccaaagttagatgcttgccgtccatctcgattaaagccctggaatgacagatgtttaccgaagaacaagatttgcttccattgcatttatggttgtaccattcaccagcttatggtggcacgtaggatggcattgtcatgcactcatgctaaaacgatgaagactgtttaatgtagacctagatgatctttgcggatgggagaaaagtgccagtttgcaaacttatagcccaggaaaggagaagtggtttaagaaatcgtttggattcaacatattggatttatgtatcatcctgatgtcaataaggagcctggagcgactgaaaagtttaaagagataagtgcagcatatgaggtgctgtcagatgaaaagaagagggcgttgtatgaccaatatggtgaagctggtgttaagagtgcagttggaggctccggtggagcttacacaaccaatccatttgatctgtttgagacattttttggagcaagcatgggtggtttttctggcatggaccagagcgcgtttaggacaagcaggcgaagcactgctatacagggtgaagacatcagatatgatgtgattctggggttcacagaggcgatatttggaacagagaaagatattatattatctcatttggaaacatgtgatacatgtggtggttctggatcaaaggctggctccaagatgagaatatgttccacatgtggtgggcgagggcaagtaatgcgaactgagcaaacaccatttggtctgttctcccaggtttctatttgccccacttgtgcaggagagggcgaagtcatttcagagtattgcaggaaatgttctggagaggggcgtatccgtgtcagaaaggagatcaaagtaaaaatccctccaggagtgagcaaaggcagtactcttcgtgtacgtggggaaggtgatgctggaccaaaaggtgggcctcctggagatctctttgtttgccttgatatagaggagccatcagatatcaagagggatggtataaacttgtattcaactgtgtcaataagctatcttgaagctattttgggcactgttatgcaagtcagaactgttgatggaaccagtgaccttcgaatacctccaggtatccaacctggtgatgtaattgtcttagcgaagcaaggagttccatcattgaataagccgtctatacgtggtgatcatctcttcactgttaaagtcgcaataccgaagcgcataagtgggcgtgaaagagaattacttgaggaacttgcatctttgagtaatggtcgctttgcacgaacagacactaagccaaaacctgcccagccaaaagccatacatcaagagaaagaagttggtgctagtcaagaagatacaagcaaatctaaagaagcagagggtgactggttgaagaaacttacagattttgctgggtccattgttaatggcgctgcgaagtggctgaacgacaacctgtaggctgtaaatatttactgcaggatagaagattgtcttacatggtgctgtagtccaatcaaagttcttagattcattgggggtccccacgagctcgtatattcgttttattggagagctgcaagattttcaggctgagtggcaaccgagggagtgaaagttgtcaactaatatcgtcgcggcgttggtcccttgtcattcttgccaagcaattatttttatgtagttggagtccttttcagtctggcaagcggcgtagaagtctgaagctgtgggatgctgatcccaaaccccgggactagacaaacactgtacttgaggttttggattaatcaaattcaccgatatcgaattgcaaacttatccaacttacaagatgcgatggaactatttattagaaatacgtttcgg

SEQ ID NO: 56259 - DNA, 1577 bp, Zea Mays
aagaaaggaaagcggtgcgagcggaggaggcgaccgaagcgccacttgcttgagtagcgaagcgcgagagcaatggcgtcgctgtcgtgcgcctccacgctgccctggacccccgcctcctccccgcggccctcggcggaccgccgcctcacggcctctcgccgggctccgtcgctggtcatcgtcgcccaggggaaggtcatattgacagatgacatagaagaggtggggaagaaaggggatacaatgaaggtgcgagctggattctaccgcaactccttgcttcccaagggcaaggctgcgcttctaaccccagcagtccacaagcaaaatacaatagtggcatctgagaatgaaaatccacctttaatgccggcaatcatgactcctggtggtgcgcttgatctcgcaactgtactactgggaaatcgtataatcttcattggccaatatattaactcccaggtggcccaacgtgtgatatcacagcttgtaacacttgctgccatcgatgaagaggctgatattctgatatatcttaactgccctggtggaagtctctattcgatcttagcgatttatgattgcatgtcctggataaagcccaaagttgggacagtgtgctttggtgttgttgctagtcaagcagcaattatccttgcaggtggcgagaagggaatgcgctatgcaatgccaaatgctagagtaatgattcatcaacctcaaggtggatctgagggtaatgtggaggaggtgaggcgacaggttggagaaaccatctatgctcgtgataaagttgataaaatgtttgctgctttcaccgggcaaccacttgacatggtgcagcagtggacagagagggatcggttcatgtcttcttcagaggccatggatttcggattgcttgatgctttactggaaacaagatactagagaagggacacaacccacattctattagcagactagaaatactgcagaactggagccaaagttagatgcttgccgtccatctcgattaaagccctggaatgacagatgtttaccgaagaacaagatttgcttccattgcatttatggttgtaccattcaccagcttatggtggcacgtaggatggcattgtcatgcactcatgctaaaacgatgaagactgtttaatgtagacctagatgatctttgcggatgggagaaaagtgccagtttgcaaacttatagcccaggaaaggagaagtggtttaagaaatcgtttggattcaacatattggatttatggtgagaccgtcacatgatttttatttgtatgtgggcaactactcgtgttagcgttcaggaaaactcatacattcggatgttgcaaatacgtcttcaaggattttgataagggccccgtttggtttggatactttgaattgaattttattctaataatcataatttggacacagatcaattaagctggtatgtttttttttataaatatatctgtatactattgttggccgacgtatcataactctatatgttgcatcccttgataatatgatatacctataattttaagtacaaagattactct

SEQ ID NO: 56260 - DNA, 1467 bp, Zea Mays
aagaaaggaaagcggtgcgagcggaggaggcgaccgaagcgccacttgcttgagtagcgaagcgcgagagcaatggcgtcgctgtcgtgcgcctccacgctgccctggacccccgcctcctccccgcggccctcggcggaccgccgcctcacggcctctcgccgggctccgtcgctggtcatcgtcgcccaggggaaggtgaagaaacaccctcaggcaaaatacaatagtggcatctgagaatgaaaatccacctttaatgccggcaatcatgactcctggtggtgcgcttgatctcgcaactgtactactgggaaatcgtataatcttcattggccaatatattaactcccaggtggcccaacgtgtgatatcacagcttgtaacacttgctgccatcgatgaagaggctgatattctgatatatcttaactgccctggtggaagtctctattcgatcttagcgatttatgattgcatgtcctggataaagcccaaagttgggacagtgtgctttggtgttgttgctagtcaagcagcaattatccttgcaggtggcgagaagggaatgcgctatgcaatgccaaatgctagagtaatgattcatcaacctcaaggtggatctgagggtaatgtggaggaggtgaggcgacaggttggagaaaccatctatgctcgtgataaagttgataaaatgtttgctgctttcaccgggcaaccacttgacatggtgcagcagtggacagagagggatcggttcatgtcttcttcagaggccatggatttcggattgcttgatgctttactggaaacaagatactagagaagggacacaacccacattctattagcagactagaaatactgcagaactggagccaaagttagatgcttgccgtccatctcgattaaagccctggaatgacagatgtttaccgaagaacaagatttgcttccattgcatttatggttgtaccattcaccagcttatggtggcacgtaggatggcattgtcatgcactcatgctaaaacgatgaagactgtttaatgtagacctagatgatctttgcggatgggagaaaagtgccagtttgcaaacttatagcccaggaaaggagaagtggtttaagaaatcgtttggattcaacatattggatttatggtgagaccgtcacatgatttttatttgtatgtgggcaactactcgtgttagcgttcaggaaaactcatacattcggatgttgcaaatacgtcttcaaggattttgataagggccccgtttggtttggatactttgaattgaattttattctaataatcataatttggacacagatcaattaagctggtatgtttttttttataaatatatctgtatactattgttggccgacgtatcataactctatatgttgcatcccttgataatatgatatacctataattttaagtacaaagattactct

SEQ ID NO: 56261 - DNA, 2314 bp, Zea Mays
ctagggccagtatcggggccttgttggcttcaacatcaaaggcaatttttaacaaaaggaaagagttccaatggcagaagattgacgcgtttctaaaattggcttcagcaaggaccaacttcaagtataacagtgaagttttgccagagcctgacatgaagtccatgaatgtggctagccttgtggagatcagtgatgcatattcacttgaccgtgctatagctacaccagagagagcattgcatactgcaaacctgtgtgtgaggcttttattatctaaggagagcattgtgattaggagacttattatgacagcgaatgcaaaatctcttgcccgtgatctgatctccagagatgctttgatgttccgggtgctccttagtaaggttattgcggatgttgtctaccaatggatgttgagtgccacaggcttgaaacgagttatggagaccaagatccagacgcccatgaccacaggaaagaacgagggacatctggtgctggctgaagaaccatcgaccctgatggtactccaggcggcagtaaaagaccgaaggattcagctcatgttcaccaagtttgtgagggagttgagagaggagcccgtcttgatgattagggtgagctggaacgtgttcctcatctcggtctcatctgccgctgtaggcctgcaccgtttcttggtgttcttcttgaaggaggatggtgccaggttcttggatgacaaggtcaagaaaatgaagatttggctgatggagttctcgaagcggacggctaatctggagattcaaggaattctgtgaatgttggtggcttttggttgaaggatttaatagctgcttcgcactctggtttttggagttactttctgcatcgagtgaatccagttcctgtttacgctggctgtctgagcttgcttggctgctggtgttcccagagatttataaaaacagggttttcctccgtcattccgccgcagctagtatataatagatggttcttggttgttcatgtactgtgtagctgtatataatagaaacattgcaggatcagtgagtaattctgtggccgagtaaagtgcagtggtggaaggcatgtgttacctactggatataaatatgatgatgtgaatgttcagttgaaaaacttgggtgacatgaactgatgaactatagctgatgcctccactttagaaatttagctgttttagtttgtctaaaatcaaacctttctttgacaagtaacttgcataaactcgggcgaaatcgtttgggtagatcatagatgtttgtaaatttgtccgattattaacatgaacagtggtagccggtgtaatcatttcccaccacaaaaggtcagtgcgaaatgggctgtaaggctggatccgacgacacattggaccctttatgtcaagtcatgggcccgtcgtactgggaacccacggcccacgatggggcaattgcttcgtgtccattgcgtctctcttctcgacggagctcgagtcgggtctgagaggtggacggagtttcggattcggaggtgatctgacctgtgaggggctgaggaggaggaggaggaggaggaggaggagggatggggcggcggcagaagcggcaggctttgatggcggcattcgcgttggcgctgctcatgggcaccgccgtctacttccgcatctgggcccgccagtccagcgacccctacttcaccgctgacgaccgcgaggagctccggaggcaatttgaacaagcaaacctagaagccatggatgaatctgccgaatggaggatgcaatatgacaaagaagtagagaaaaacaggcagttgcatgatgagctttcaaaggttaaggcctcattagctggcacagcccggcgtcttgagttgttgcagaaggataacgagttgcagaagaggcagactgaatcgctgaggcagcaatgcaattgcactctccattgaaagttatgcaagattaaggacatggaaggagtttttcagcttctttggcggattagctatttttttccaacaccaagggaggaaaaccagattgagttctaggaatgagaactggcatatgaaaatgattgagaacatatatagtgtatagaccatagtgttcgtcctttataccaatggtgagctgcacagttcatccaaagtgatcggtgggaacttcattggtgacaatgcaaagcgcagaagtcaaaacgtaaaagatggcgccaagtttgaaatctgggaccgtgccaatacttattggcaggaaacttaataatccatattgtattatcgatacttgcaattcctt

SEQ ID NO: 56262 - DNA, 4454 bp, Zea Mays
ctcagacgctcctagtcaccactcgctgtcctcggcttctcctaaaagctcgacgcgatggcgacgctggtgcggccgcccgcgctgcacgtccgcgccgtgagcggcggcgggaacaaggacagggtggcgccgcagcggccttggtggggcgggaacaagcccatctcaccgcgccagtcgggcgggagcggggcgcgaggaggcgcgggcggcggcggcgtcgcgctggaccaggtgctaggtgtgctccgccgcgacggcgaattcgtccaggccgccgtcggcgccccgctccgcgacgtcttctggctccgcttccttgagaagaagcagcggaagcagcagcagccgagacctaagcacaagcctttccggcagcagcaggaagaggaggaggtggtagtggtggacgagtcgcccccggccttcccgcccccctcgtacccgtcagggttgtcgtgcgtggagctaatggcggccgacttccaggccctcaaggtgtacgccggtagcgcgcggcactctctcgcgcgccgattcctcggtagcaatagcaagggaaagtctgaacagcaacctaaacccaaaccccaggagcagcagaaagagcagcaacatatacttcaggccccagccttccctccgccctcctacccaccagtaggattatcctgtatggagttgatgatggctgaccttgaagccctgaaactgtacatcaactactattcggccatcctgactacgccgctcccccagcattatgatcctgacctccttgcccagtacttcgcctcacgtccgcatatccttgcctctcgcgtcattcagatactcttcacatttctctcagctgtggtgaagatgcggatttcaaaaagagctcagttaaccacagatgctacctatagtagtggtaacagcggcaacgggtttgatgatactcaatatatggtcggccaacttctcaaggagacatttcttaaccttgggcctacttttattaaagttggacaatcactttctacaagacctgatatcataggttcagagatttgtgaggcccttgctgagttgcatgaaagggttcctactttcccaagagaggatgcaatgaagatcattgagggagaatttgggtgccctgtgtcgcatatgttcagttatgtttcagatgagcctgtagcatctgcttcctttggacaggtctaccaggggcgcacagttgatggttctcttgttgcaataaaggttcagcggccagaccttctaccttctgtactgagagacatctatattctacgccttgggcttgctttcatacggaagatagccaagcgaagaagtaacatttctctttatggtgatgagttgggtagaggtttcgtcggcgagttggactacaatattgaagctgctaatgctaccaaatttatggaggttcattccagatatcctttcatgctagttcctaaggttcttaaacaacttactcgaaagagggttttaacaatggagtgggtggctggtgagaaccccaaggatttgctttctttgtctaaaggagtttctgaaaaatttactcaagcttcagataatcagaagttggaagcaaaatctcgccttcttgacctggtcaataaaggtgtagaggcatcgctagtgcagcttcttgagacaggcttgttgcatgctgatcctcatcctggtaacttgcgttatactcctgaaggccgtgttgggtttctagattttggtttgctgtgcatgatggagaggaaacatcagcgtgctatgcttgcaagcatagtgcacatagtaaatggtgattgggcttccgtcgtttatgatttgactgaaatggatgtagttccaccaaaaaccaatctacgtcgtgtgacaatggatttagaggatgcattaggcgaggtaacctttgaagatggcattccagaaatcaagtttagtaaggtgcttggaaaaatttggtctgtggcatttaaatatcacttccgtatgccaccttactacacacttgttctccggtcacttgcctctttggaaggactagccgtggcagcagatgggactttcaaaacatttcaagcagcatacccatatgttgttcggaagcttctgtccgaaaattcacttgaaacaagaagactcttgaatcaggcaatttttaacaaaaggaaagagttccaatggcagaagattgacgcgtttctaaaattggcttcagcaaggaccaacttcaagtataacagtgaagttttgccagagcctgacatgaagtccatgaatgtggctagccttgtggagatcagtgatgcatattcacttgaccgtgctatagctacaccagagagagcattgcatactgcaaacctgtgtgtgaggcttttattatctaaggagagcattgtgattaggagacttattatgacagcgaatgcaaaatctcttgcccgtgatctgatctccagagatgctttgatgttccgggtgctccttagtaaggttattgcggatgttgtctaccaatggatgttgagtgccacaggcttgaaacgagttatggagaccaagatccagacgcccatgaccacaggaaagaacgagggacatctggtgctggctgaagaaccatcgaccctgatggtactccaggcggcagtaaaagaccgaaggattcagctcatgttcaccaagtttgtgagggagttgagagaggagcccgtcttgatgattagggtgagctggaacgtgttcctcatctcggtctcatctgccgctgtaggcctgcaccgtttcttggtgttcttcttgaaggaggatggtgccaggttcttggatgacaaggtcaagaaaatgaagatttggctgatggagttctcgaagcggacggctaatctggagattcaaggaattctgtgaatgttggtggcttttggttgaaggatttaatagctgcttcgcactctggtttttggagttactttctgcatcgagtgaatccagttcctgtttacgctggctgtctgagcttgcttggctgctggtgttcccagagatttataaaaacagggttttcctccgtcattccgccgcagctagtatataatagatggttcttggttgttcatgtactgtgtagctgtatataatagaaacattgcaggatcagtgagtaattctgtggccgagtaaagtgcagtggtggaaggcatgtgttacctactggatataaatatgatgatgtgaatgttcagttgaaaaacttgggtgacatgaactgatgaactatagctgatgcctccactttagaaatttagctgttttagtttgtctaaaatcaaacctttctttgacaagtaacttgcataaactcgggcgaaatcgtttgggtagatcatagatgtttgtaaatttgtccgattattaacatgaacagtggtagccggtgtaatcatttcccaccacaaaaggtcagtgcgaaatgggctgtaaggctggatccgacgacacattggaccctttatgtcaagtcatgggcccgtcgtactgggaacccacggcccacgatggggcaattgcttcgtgtccattgcgtctctcttctcgacggagctcgagtcgggtctgagaggtggacggagtttcggattcggaggtgatctgacctgtgaggggctgaggaggaggaggaggaggaggaggaggagggatggggcggcggcagaagcggcaggctttgatggcggcattcgcgttggcgctgctcatgggcaccgccgtctacttccgcatctgggcccgccagtccagcgacccctacttcaccgctgacgaccgcgaggagctccggaggcaatttgaacaagcaaacctagaagccatggatgaatctgccgaatggaggatgcaatatgacaaagaagtagagaaaaacaggcagttgcatgatgagctttcaaaggttaaggcctcattagctggcacagcccggcgtcttgagttgttgcagaaggataacgagttgcagaagaggcagactgaatcgctgaggcagcaatgcaattgcactctccattgaaagttatgcaagattaaggacatggaaggagtttttcagcttctttggcggattagctatttttttccaacaccaagggaggaaaaccagattgagttctaggaatgagaactggcatatgaaaatgattgagaacatatatagtgtatagaccatagtgttcgtcctttataccaatggtgagctgcacagttcatccaaagtgatcggtgggaacttcattggtgacaatgcaaagcgcagaagtcaaaacgtaaaagatggcgccaagtttgaaatctgggaccgtgccaatacttattggcaggaaacttaataatccatattgtattatcgatacttgcaattcctt

SEQ ID NO: 56263 - DNA, 4425 bp, Zea Mays
cccgtctcgaccaccagcaccagttcagcccatccaccgccaccacctcagacgctcctagtcaccactcgctgtcctcggcttctcctaaaagctcgacgcgatggcgacgctggtgcggccgcccgcgctgcacgtccgcgccgtgagcggcggcgggaacaaggacagggtggcgccgcagcggccttggtggggcgggaacaagcccatctcaccgcgccagtcgggcgggagcggggcgcgaggaggcgcgggcggcggcggcgtcgcgctggaccaggtgctaggtgtgctccgccgcgacggcgaattcgtccaggccgccgtcggcgccccgctccgcgacgtcttctggctccgcttccttgagaagaagcagcggaagcagcagcagccgagacctaagcacaagcctttccggcagcagcaggaagaggaggaggtggtagtggtggacgagtcgcccccggccttcccgcccccctcgtacccgtcagggttgtcgtgcgtggagctaatggcggccgacttccaggccctcaaggtgtacgccggtagcgcgcggcactctctcgcgcgccgattcctcggtagcaatagcaagggaaagtctgaacagcaacctaaacccaaaccccaggagcagcagaaagagcagcaacatatacttcaggccccagccttccctccgccctcctacccaccaggattatcctgtatggagttgatgatggctgaccttgaagccctgaaactgtacatcaactactattcggccatcctgactacgccgctcccccagcattatgatcctgacctccttgcccagtacttcgcctcacgtccgcatatccttgcctctcgcgtcattcagatactcttcacatttctctcagctgtggtgaagatgcggatttcaaaaagagctcagttaaccacagatgctacctatagtagtggtaacagcggcaacgggtttgatgatactcaatatatggtcggccaacttctcaaggagacatttcttaaccttgggcctacttttattaaagttggacaatcactttctacaagacctgatatcataggttcagagatttgtgaggcccttgctgagttgcatgaaagggttcctactttcccaagagaggatgcaatgaagatcattgagggagaatttgggtgccctgtgtcgcatatgttcagttatgtttcagatgagcctgtagcatctgcttcctttggacaggtctaccaggggcgcacagttgatggttctcttgttgcaataaaggttcagcggccagaccttctaccttctgtactgagagacatctatattctacgccttgggcttgctttcatacggaagatagccaagcgaagaagtaacatttctctttatggtgatgagttgggtagaggtttcgtcggcgagttggactacaatattgaagctgctaatgctaccaaatttatggaggttcattccagatatcctttcatgctagttcctaaggttcttaaacaacttactcgaaagagggttttaacaatggagtgggtggctggtgagaaccccaaggatttgctttctttgtctaaaggagtttctgaaaaatttactcaagcttcagataatcagaagttggaagcaaaatctcgccttcttgacctggtcaataaaggtgtagaggcatcgctagtgcagcttcttgagacaggcttgttgcatgctgatcctcatcctggtaacttgcgttatactcctgaaggccgtgttgggtttctagattttggtttgctgtgcatgatggagaggaaacatcagcgtgctatgcttgcaagcatagtgcacatagtaaatggtgattgggcttccgtcgtttatgatttgactgaaatggatgtagttccaccaaaaaccaatctacgtcgtgtgacaatggtgcttggaaaaatttggtctgtggcatttaaatatcacttccgtatgccaccttactacacacttgttctccggtcacttgcctctttggaagccgtggcagcagatgggactttcaaaacatttcaagcagcatacccatatgttgttcggaagcttctgtccgaaaattcacttgaaacaagaagactcttgaatcaggcaatttttaacaaaaggaaagagttccaatggcagaagattgacgcgtttctaaaattggcttcagcaaggaccaacttcaagtataacagtgaagttttgccagagcctgacatgaagtccatgaatgtggctagccttgtggagatcagtgatgcatattcacttgaccgtgctatagctacaccagagagagcattgcatactgcaaacctgtgtgtgaggcttttattatctaaggagagcattgtgattaggagacttattatgacagcgaatgcaaaatctcttgcccgtgatctgatctccagagatgctttgatgttccgggtgctccttagtaaggttattgcggatgttgtctaccaatggatgttgagtgccacaggcttgaaacgagttatggagaccaagatccagacgcccatgaccacaggaaagaacgagggacatctggtgctggctgaagaaccatcgaccctgatggtactccaggcggcagtaaaagaccgaaggattcagctcatgttcaccaagtttgtgagggagttgagagaggagcccgtcttgatgattagggtgagctggaacgtgttcctcatctcggtctcatctgccgctgtaggcctgcaccgtttcttggtgttcttcttgaaggaggatggtgccaggttcttggatgacaaggtcaagaaaatgaagatttggctgatggagttctcgaagcggacggctaatctggagattcaaggaattctgtgaatgttggtggcttttggttgaaggatttaatagctgcttcgcactctggtttttggagttactttctgcatcgagtgaatccagttcctgtttacgctggctgtctgagcttgcttggctgctggtgttcccagagatttataaaaacagggttttcctccgtcattccgccgcagctagtatataatagatggttcttggttgttcatgtactgtgtagctgtatataatagaaacattgcaggatcagtgagtaattctgtggccgagtaaagtgcagtggtggaaggcatgtgttacctactggatataaatatgatgatgtgaatgttcagttgaaaaacttgggtgacatgaactgatgaactatagctgatgcctccactttagaaatttagctgttttagtttgtctaaaatcaaacctttctttgacaagtaacttgcataaactcgggcgaaatcgtttgggtagatcatagatgtttgtaaatttgtccgattattaacatgaacagtggtagccggtgtaatcatttcccaccacaaaaggtcagtgcgaaatgggctgtaaggctggatccgacgacacattggaccctttatgtcaagtcatgggcccgtcgtactgggaacccacggcccacgatggggcaattgcttcgtgtccattgcgtctctcttctcgacggagctcgagtcgggtctgagaggtggacggagtttcggattcggaggtgatctgacctgtgaggggctgaggaggaggaggaggaggaggaggaggagggatggggcggcggcagaagcggcaggctttgatggcggcattcgcgttggcgctgctcatgggcaccgccgtctacttccgcatctgggcccgccagtccagcgacccctacttcaccgctgacgaccgcgaggagctccggaggcaatttgaacaagcaaacctagaagccatggatgaatctgccgaatggaggatgcaatatgacaaagaagtagagaaaaacaggcagttgcatgatgagctttcaaaggttaaggcctcattagctggcacagcccggcgtcttgagttgttgcagaaggataacgagttgcagaagaggcagactgaatcgctgaggcagcaatgcaattgcactctccattgaaagttatgcaagattaaggacatggaaggagtttttcagcttctttggcggattagctatttttttccaacaccaagggaggaaaaccagattgagttctaggaatgagaactggcatatgaaaatgattgagaacatatatagtgtatagaccatagtgttcgtcctttataccaatggtgagctgcacagttcatccaaagtgatcggtgggaacttcattggtgacaatgcaaagcgcagaagtcaaaacgtaaaagatggcgccaagtttgaaatctgggaccgtgccaatacttattggcaggaaacttaataatccatattgtattatcgatacttgcaattcctt

SEQ ID NO: 56264 - DNA, 4751 bp, Zea Mays
cccgtctcgaccaccagcaccagttcagcccatccaccgccaccacctcagacgctcctagtcaccactcgctgtcctcggcttctcctaaaagctcgacgcgatggcgacgctggtgcggccgcccgcgctgcacgtccgcgccgtgagcggcggcgggaacaaggacagggtggcgccgcagcggccttggtggggcgggaacaagcccatctcaccgcgccagtcgggcgggagcggggcgcgaggaggcgcgggcggcggcggcgtcgcgctggaccaggtgctaggtgtgctccgccgcgacggcgaattcgtccaggccgccgtcggcgccccgctccgcgacgtcttctggctccgcttccttgagaagaagcagcggaagcagcagcagccgagacctaagcacaagcctttccggcagcagcaggaagaggaggaggtggtagtggtggacgagtcgcccccggccttcccgcccccctcgtacccgtcagggttgtcgtgcgtggagctaatggcggccgacttccaggccctcaaggtgtacgccggtagcgcgcggcactctctcgcgcgccgattcctcggtagcaatagcaagggaaagtctgaacagcaacctaaacccaaaccccaggagcagcagaaagagcagcaacatatacttcaggccccagccttccctccgccctcctacccaccaggattatcctgtatggagttgatgatggctgaccttgaagccctgaaactgtacatcaactactattcggccatcctgactacgccgctcccccagcattatgatcctgacctccttgcccagtacttcgcctcacgtccgcatatccttgcctctcgcgtcattcagatactcttcacatttctctcagctgtggtgaagatgcggatttcaaaaagagctcagttaaccacagatgctacctatagtagtggtaacagcggcaacgggtttgatgatactcaatatatggtcggccaacttctcaaggagacatttcttaaccttgggcctacttttattaaagttggacaatcactttctacaagacctgatatcataggttcagagatttgtgaggcccttgctgagttgcatgaaagggttcctactttcccaagagaggatgcaatgaagatcattgagggagaatttgggtgccctgtgtcgcatatgttcagttatgtttcagatgagcctgtagcatctgcttcctttggacaggtctaccaggggcgcacagttgatggttctcttgttgcaataaaggttcagcggccagaccttctaccttctgtactgagagacatctatattctacgccttgggcttgctttcatacggaagatagccaagcgaagaagtaacatttctctttatggtgatgagttgggtagaggtttcgtcggcgagttggactacaatattgaagctgctaatgctaccaaatttatggaggttcattccagatatcctttcatgctagttcctaaggttcttaaacaacttactcgaaagagggttttaacaatggagtgggtggctggtgagaaccccaaggatttgctttctttgtctaaaggagtttctgaaaaatttactcaagcttcagataatcagaagttggaagcaaaatctcgccttcttgacctggtcaataaaggtgtagaggcatcgctagtgcagcttcttgagacaggcttgttgcatgctgatcctcatcctggtaacttgcgttatactcctgaaggccgtgttgggtttctagattttggtttgctgtgcatgatggagaggaaacatcagcgtgctatgcttgcaagcatagtgcacatagtaaatggtgattgggcttccgtcgtttatgatttgactgaaatggatgtagttccaccaaaaaccaatctacgtcgtgtgacaatggatttagaggatgcattaggcgaggtaacctttgaagatggcattccagaaatcaagtttagtaaggcgggtacttcactctattataggttcaattcagtgcagtggtggcttgatatcttcgtacctatattttatttcaaaagaagcaccgtacctaatgcagttcttttcacattgcttttgcccttgtttattgctgcatataccttttaggtgcttggaaaaatttggtctgtggcatttaaatatcacttccgtatgccaccttactacacacttgttctccggtcacttgcctctttggaaggttagcttgttcagttgaagttgagataccaaactaattcaatacatatgcatagaggcttatttcttttcaaagatgcatatcttgatgccaactatttttgagggatatattattttgtttcctttcttactgataggactagccgtggcagcagatgggactttcaaaacatttcaagcagcatacccatatgttgttcggaagcttctgtccgaaaattcacttgaaacaagaagactcttgaatcaggcaatttttaacaaaaggaaagagttccaatggcagaagattgacgcgtttctaaaattggcttcagcaagagcctgacatgaagtccatgaatgtggctagccttgtggagatcagtgatgcatattcacttgaccgtgctatagctacaccagagagagcattgcatactgcaaacctgtgtgtgaggcttttattatctaaggagagcattgtgattaggagacttattatgacagcgaatgcaaaatctcttgcccgtgatctgatctccagagatgctttgatgttccgggtgctccttagtaaggttattgcggatgttgtctaccaatggatgttgagtgccacaggcttgaaacgagttatggagaccaagatccagacgcccatgaccacaggaaagaacgagggacatctggtgctggctgaagaaccatcgaccctgatggtactccaggcggcagtaaaagaccgaaggattcagctcatgttcaccaagtttgtgagggagttgagagaggagcccgtcttgatgattagggtgagctggaacgtgttcctcatctcggtctcatctgccgctgtaggcctgcaccgtttcttggtgttcttcttgaaggaggatggtgccaggttcttggatgacaaggtcaagaaaatgaagatttggctgatggagttctcgaagcggacggctaatctggagattcaaggaattctgtgaatgttggtggcttttggttgaaggatttaatagctgcttcgcactctggtttttggagttactttctgcatcgagtgaatccagttcctgtttacgctggctgtctgagcttgcttggctgctggtgttcccagagatttataaaaacagggttttcctccgtcattccgccgcagctagtatataatagatggttcttggttgttcatgtactgtgtagctgtatataatagaaacattgcaggatcagtgagtaattctgtggccgagtaaagtgcagtggtggaaggcatgtgttacctactggatataaatatgatgatgtgaatgttcagttgaaaaacttgggtgacatgaactgatgaactatagctgatgcctccactttagaaatttagctgttttagtttgtctaaaatcaaacctttctttgacaagtaacttgcataaactcgggcgaaatcgtttgggtagatcatagatgtttgtaaatttgtccgattattaacatgaacagtggtagccggtgtaatcatttcccaccacaaaaggtcagtgcgaaatgggctgtaaggctggatccgacgacacattggaccctttatgtcaagtcatgggcccgtcgtactgggaacccacggcccacgatggggcaattgcttcgtgtccattgcgtctctcttctcgacggagctcgagtcgggtctgagaggtggacggagtttcggattcggaggtgatctgacctgtgaggggctgaggaggaggaggaggaggaggaggaggagggatggggcggcggcagaagcggcaggctttgatggcggcattcgcgttggcgctgctcatgggcaccgccgtctacttccgcatctgggcccgccagtccagcgacccctacttcaccgctgacgaccgcgaggagctccggaggcaatttgaacaagcaaacctagaagccatggatgaatctgccgaatggaggatgcaatatgacaaagaagtagagaaaaacaggcagttgcatgatgagctttcaaaggttaaggcctcattagctggcacagcccggcgtcttgagttgttgcagaaggataacgagttgcagaagaggcagactgaatcgctgaggcagcaatgcaattgcactctccattgaaagttatgcaagattaaggacatggaaggagtttttcagcttctttggcggattagctatttttttccaacaccaagggaggaaaaccagattgagttctaggaatgagaactggcatatgaaaatgattgagaacatatatagtgtatagaccatagtgttcgtcctttataccaatggtgagctgcacagttcatccaaagtgatcggtgggaacttcattggtgacaatgcaaagcgcagaagtcaaaacgtaaaagatggcgccaagtttgaaatctgggaccgtgccaatacttattggcaggaaacttaataatccatattgtattatcgatacttgcaattcctt

SEQ ID NO: 56265 - DNA, 4403 bp, Zea Mays
cccgtctcgaccaccagcaccagttcagcccatccaccgccaccacctcagacgctcctagtcaccactcgctgtcctcggcttctcctaaaagctcgacgcgatggcgacgctggtgcggccgcccgcgctgcacgtccgcgccgtgagcggcggcgggaacaaggacagggtggcgccgcagcggccttggtggggcgggaacaagcccatctcaccgcgccagtcgggcgggagcggggcgcgaggaggcgcgggcggcggcggcgtcgcgctggaccaggtgctaggtgtgctccgccgcgacggcgaattcgtccaggccgccgtcggcgccccgctccgcgacgtcttctggctccgcttccttgagaagaagcagcggaagcagcagcagccgagacctaagcacaagcctttccggcagcagcaggaagaggaggaggtggtagtggtggacgagtcgcccccggccttcccgcccccctcgtacccgtcagggttgtcgtgcgtggagctaatggcggccgacttccaggccctcaaggtgtacgccggtagcgcgcggcactctctcgcgcgccgattcctcggtagcaatagcaagggaaagtctgaacagcaacctaaacccaaaccccaggagcagcagaaagagcagcaacatatacttcaggccccagccttccctccgccctcctacccaccaggattatcctgtatggagttgatgatggctgaccttgaagccctgaaactgtacatcaactactattcggccatcctgactacgccgctcccccagcattatgatcctgacctccttgcccagtacttcgcctcacgtccgcatatccttgcctctcgcgtcattcagatactcttcacatttctctcagctgtggtgaagatgcggatttcaaaaagagctcagttaaccacagatgctacctatagtagtggtaacagcggcaacgggtttgatgatactcaatatatggtcggccaacttctcaaggagacatttcttaaccttgggcctacttttattaaagttggacaatcactttctacaagacctgatatcataggttcagagatttgtgaggcccttgctgagttgcatgaaagggttcctactttcccaagagaggatgcaatgaagatcattgagggagaatttgggtgccctgtgtcgcatatgttcagttatgtttcagatgagcctgtagcatctgcttcctttggacaggtctaccaggggcgcacagttgatggttctcttgttgcaataaaggttcagcggccagaccttctaccttctgtactgagagacatctatattctacgccttgggcttgctttcatacggaagatagccaagcgaagaagtaacatttctctttatggtgatgagttgggtagaggtttcgtcggcgagttggactacaatattgaagctgctaatgctaccaaatttatggaggttcattccagatatcctttcatgctagttcctaaggttcttaaacaacttactcgaaagagggttttaacaatggagtgggtggctggtgagaaccccaaggatttgctttctttgtctaaaggagtttctgaaaaatttactcaagcttcagataatcagaagttggaagcaaaatctcgccttcttgacctggtcaataaaggtgtagaggcatcgctagtgcagcttcttgagacaggcttgttgcatgctgatcctcatcctggtaacttgcgttatactcctgaaggccgtgttgggtttctagattttggtttgctgtgcatgatggagaggaaacatcagcgtgctatgcttgcaagcatagtgcacatagtaaatggtgattgggcttccgtcgtttatgatttgactgaaatggatgtagttccaccaaaaaccaatctacgtcgtgtgacaatggatttagaggatgcattaggcgaggtaacctttgaagatggcattccagaaatcaagtttagtaaggactagccgtggcagcagatgggactttcaaaacatttcaagcagcatacccatatgttgttcggaagcttctgtccgaaaattcacttgaaacaagaagactcttgaatcaggcaatttttaacaaaaggaaagagttccaatggcagaagattgacgcgtttctaaaattggcttcagcaaggaccaacttcaagtataacagtgaagttttgccagagcctgacatgaagtccatgaatgtggctagccttgtggagatcagtgatgcatattcacttgaccgtgctatagctacaccagagagagcattgcatactgcaaacctgtgtgtgaggcttttattatctaaggagagcattgtgattaggagacttattatgacagcgaatgcaaaatctcttgcccgtgatctgatctccagagatgctttgatgttccgggtgctccttagtaaggttattgcggatgttgtctaccaatggatgttgagtgccacaggcttgaaacgagttatggagaccaagatccagacgcccatgaccacaggaaagaacgagggacatctggtgctggctgaagaaccatcgaccctgatggtactccaggcggcagtaaaagaccgaaggattcagctcatgttcaccaagtttgtgagggagttgagagaggagcccgtcttgatgattagggtgagctggaacgtgttcctcatctcggtctcatctgccgctgtaggcctgcaccgtttcttggtgttcttcttgaaggaggatggtgccaggttcttggatgacaaggtcaagaaaatgaagatttggctgatggagttctcgaagcggacggctaatctggagattcaaggaattctgtgaatgttggtggcttttggttgaaggatttaatagctgcttcgcactctggtttttggagttactttctgcatcgagtgaatccagttcctgtttacgctggctgtctgagcttgcttggctgctggtgttcccagagatttataaaaacagggttttcctccgtcattccgccgcagctagtatataatagatggttcttggttgttcatgtactgtgtagctgtatataatagaaacattgcaggatcagtgagtaattctgtggccgagtaaagtgcagtggtggaaggcatgtgttacctactggatataaatatgatgatgtgaatgttcagttgaaaaacttgggtgacatgaactgatgaactatagctgatgcctccactttagaaatttagctgttttagtttgtctaaaatcaaacctttctttgacaagtaacttgcataaactcgggcgaaatcgtttgggtagatcatagatgtttgtaaatttgtccgattattaacatgaacagtggtagccggtgtaatcatttcccaccacaaaaggtcagtgcgaaatgggctgtaaggctggatccgacgacacattggaccctttatgtcaagtcatgggcccgtcgtactgggaacccacggcccacgatggggcaattgcttcgtgtccattgcgtctctcttctcgacggagctcgagtcgggtctgagaggtggacggagtttcggattcggaggtgatctgacctgtgaggggctgaggaggaggaggaggaggaggaggaggagggatggggcggcggcagaagcggcaggctttgatggcggcattcgcgttggcgctgctcatgggcaccgccgtctacttccgcatctgggcccgccagtccagcgacccctacttcaccgctgacgaccgcgaggagctccggaggcaatttgaacaagcaaacctagaagccatggatgaatctgccgaatggaggatgcaatatgacaaagaagtagagaaaaacaggcagttgcatgatgagctttcaaaggttaaggcctcattagctggcacagcccggcgtcttgagttgttgcagaaggataacgagttgcagaagaggcagactgaatcgctgaggcagcaatgcaattgcactctccattgaaagttatgcaagattaaggacatggaaggagtttttcagcttctttggcggattagctatttttttccaacaccaagggaggaaaaccagattgagttctaggaatgagaactggcatatgaaaatgattgagaacatatatagtgtatagaccatagtgttcgtcctttataccaatggtgagctgcacagttcatccaaagtgatcggtgggaacttcattggtgacaatgcaaagcgcagaagtcaaaacgtaaaagatggcgccaagtttgaaatctgggaccgtgccaatacttattggcaggaaacttaataatccatattgtattatcgatacttgcaattcctt

SEQ ID NO: 56266 - DNA, 4438 bp, Zea Mays
cggctgtcccgtctcgaccaccagcaccagttcagcccatccaccgccaccacctcagacgctcctagtcaccactcgctgtcctcggcttctcctaaaagctcgacgcgatggcgacgctggtgcggccgcccgcgctgcacgtccgcgccgtgagcggcggcgggaacaaggacagggtggcgccgcagcggccttggtggggcgggaacaagcccatctcaccgcgccagtcgggcgggagcggggcgcgaggaggcgcgggcggcggcggcgtcgcgctggaccaggtgctaggtgtgctccgccgcgacggcgaattcgtccaggccgccgtcggcgccccgctccgcgacgtcttctggctccgcttccttgagaagaagcagcggaagcagcagcagccgagacctaagcacaagcctttccggcagcagcaggaagaggaggaggtggtagtggtggacgagtcgcccccggccttcccgcccccctcgtacccgtcagggttgtcgtgcgtggagctaatggcggccgacttccaggccctcaaggtgtacgccggtagcgcgcggcactctctcgcgcgccgattcctcggtagcaatagcaagggaaagtctgaacagcaacctaaacccaaaccccaggagcagcagaaagagcagcaacatatacttcaggccccagccttccctccgccctcctacccaccaggattatcctgtatggagttgatgatggctgaccttgaagccctgaaactgtacatcaactactattcggccatcctgactacgccgctcccccagcattatgatcctgacctccttgcccagtacttcgcctcacgtccgcatatccttgcctctcgcgtcattcagatactcttcacatttctctcagctgtggtgaagatgcggatttcaaaaagagctcagttaaccacagatgctacctatagtagtggtaacagcggcaacgggtttgatgatactcaatatatggtcggccaacttctcaaggagacatttcttaaccttgggcctacttttattaaagttggacaatcactttctacaagacctgatatcataggttcagagatttgtgaggcccttgctgagttgcatgaaagggttcctactttcccaagagaggatgcaatgaagatcattgagggagaatttgggtgccctgtgtcgcatatgttcagttatgtttcagatgagcctgtagcatctgcttcctttggacaggtctaccaggggcgcacagttgatggttctcttgttgcaataaaggttcagcggccagaccttctaccttctgtactgagagacatctatattctacgccttgggcttgctttcatacggaagatagccaagcgaagaagtaacatttctctttatggtgatgagttgggtagaggtttcgtcggcgagttggactacaatattgaagctgctaatgctaccaaatttatggaggttcattccagatatcctttcatgctagttcctaaggttcttaaacaacttactcgaaagagggttttaacaatggagtgggtggctggtgagaaccccaaggatttgctttctttgtctaaaggagtttctgaaaaatttactcaagcttcagataatcagaagttggaagcaaaatctcgccttcttgacctggtcaataaaggtgtagaggcatcgctagtgcagcttcttgagacaggcttgttgcatgctgatcctcatcctggtaacttgcgttatactcctgaaggccgtgttgggtttctagattttggtttgctgtgcatgatggagaggaaacatcagcgtgctatgcttgcaagcatagtgcacatagtaaatggtgattgggcttccgtcgtttatgatttgactgaaatggatgtagttccaccaaaaaccaatctacgtcgtgtgacaatggtgcttggaaaaatttggtctgtggcatttaaatatcacttccgtatgccaccttactacacacttgttctccggtcacttgcctctttggaaggactagccgtggcagcagatgggactttcaaaacatttcaagcagcatacccatatgttgttcggaagcttctgtccgaaaattcacttgaaacaagaagactcttgaatcaggcaatttttaacaaaaggaaagagttccaatggcagaagattgacgcgtttctaaaattggcttcagcaaggaccaacttcaagtataacagtgaagttttgccagagcctgacatgaagtccatgaatgtggctagccttgtggagatcagtgatgcatattcacttgaccgtgctatagctacaccagagagagcattgcatactgcaaacctgtgtgtgaggcttttattatctaaggagagcattgtgattaggagacttattatgacagcgaatgcaaaatctcttgcccgtgatctgatctccagagatgctttgatgttccgggtgctccttagtaaggttattgcggatgttgtctaccaatggatgttgagtgccacaggcttgaaacgagttatggagaccaagatccagacgcccatgaccacaggaaagaacgagggacatctggtgctggctgaagaaccatcgaccctgatggtactccaggcggcagtaaaagaccgaaggattcagctcatgttcaccaagtttgtgagggagttgagagaggagcccgtcttgatgattagggtgagctggaacgtgttcctcatctcggtctcatctgccgctgtaggcctgcaccgtttcttggtgttcttcttgaaggaggatggtgccaggttcttggatgacaaggtcaagaaaatgaagatttggctgatggagttctcgaagcggacggctaatctggagattcaaggaattctgtgaatgttggtggcttttggttgaaggatttaatagctgcttcgcactctggtttttggagttactttctgcatcgagtgaatccagttcctgtttacgctggctgtctgagcttgcttggctgctggtgttcccagagatttataaaaacagggttttcctccgtcattccgccgcagctagtatataatagatggttcttggttgttcatgtactgtgtagctgtatataatagaaacattgcaggatcagtgagtaattctgtggccgagtaaagtgcagtggtggaaggcatgtgttacctactggatataaatatgatgatgtgaatgttcagttgaaaaacttgggtgacatgaactgatgaactatagctgatgcctccactttagaaatttagctgttttagtttgtctaaaatcaaacctttctttgacaagtaacttgcataaactcgggcgaaatcgtttgggtagatcatagatgtttgtaaatttgtccgattattaacatgaacagtggtagccggtgtaatcatttcccaccacaaaaggtcagtgcgaaatgggctgtaaggctggatccgacgacacattggaccctttatgtcaagtcatgggcccgtcgtactgggaacccacggcccacgatggggcaattgcttcgtgtccattgcgtctctcttctcgacggagctcgagtcgggtctgagaggtggacggagtttcggattcggaggtgatctgacctgtgaggggctgaggaggaggaggaggaggaggaggaggagggatggggcggcggcagaagcggcaggctttgatggcggcattcgcgttggcgctgctcatgggcaccgccgtctacttccgcatctgggcccgccagtccagcgacccctacttcaccgctgacgaccgcgaggagctccggaggcaatttgaacaagcaaacctagaagccatggatgaatctgccgaatggaggatgcaatatgacaaagaagtagagaaaaacaggcagttgcatgatgagctttcaaaggttaaggcctcattagctggcacagcccggcgtcttgagttgttgcagaaggataacgagttgcagaagaggcagactgaatcgctgaggcagcaatgcaattgcactctccattgaaagttatgcaagattaaggacatggaaggagtttttcagcttctttggcggattagctatttttttccaacaccaagggaggaaaaccagattgagttctaggaatgagaactggcatatgaaaatgattgagaacatatatagtgtatagaccatagtgttcgtcctttataccaatggtgagctgcacagttcatccaaagtgatcggtgggaacttcattggtgacaatgcaaagcgcagaagtcaaaacgtaaaagatggcgccaagtttgaaatctgggaccgtgccaatacttattggcaggaaacttaataatccatattgtattatcgatacttgcaattcctt

SEQ ID NO: 56267 - DNA, 4450 bp, Zea Mays
ccctgcccggctgtcccgtctcgaccaccagcaccagttcagcccatccaccgccaccacctcagacgctcctagtcaccactcgctgtcctcggcttctcctaaaagctcgacgcgatggcgacgctggtgcggccgcccgcgctgcacgtccgcgccgtgagcggcggcgggaacaaggacagggtggcgccgcagcggccttggtggggcgggaacaagcccatctcaccgcgccagtcgggcgggagcggggcgcgaggaggcgcgggcggcggcggcgtcgcgctggaccaggtgctaggtgtgctccgccgcgacggcgaattcgtccaggccgccgtcggcgccccgctccgcgacgtcttctggctccgcttccttgagaagaagcagcggaagcagcagcagccgagacctaagcacaagcctttccggcagcagcaggaagaggaggaggtggtagtggtggacgagtcgcccccggccttcccgcccccctcgtacccgtcagggttgtcgtgcgtggagctaatggcggccgacttccaggccctcaaggtgtacgccggtagcgcgcggcactctctcgcgcgccgattcctcggtagcaatagcaagggaaagtctgaacagcaacctaaacccaaaccccaggagcagcagaaagagcagcaacatatacttcaggccccagccttccctccgccctcctacccaccaggattatcctgtatggagttgatgatggctgaccttgaagccctgaaactgtacatcaactactattcggccatcctgactacgccgctcccccagcattatgatcctgacctccttgcccagtacttcgcctcacgtccgcatatccttgcctctcgcgtcattcagatactcttcacatttctctcagctgtggtgaagatgcggatttcaaaaagagctcagttaaccacagatgctacctatagtagtggtaacagcggcaacgggtttgatgatactcaatatatggtcggccaacttctcaaggagacatttcttaaccttgggcctacttttattaaagttggacaatcactttctacaagacctgatatcataggttcagagatttgtgaggttaggcccttgctgagttgcatgaaagggttcctactttcccaagagaggatgcaatgaagatcattgagggagaatttgggtgccctgtgtcgcatatgttcagttatgtttcagatgagcctgtagcatctgcttcctttggacaggtctaccaggggcgcacagttgatggttctcttgttgcaataaaggttcagcggccagaccttctaccttctgtactgagagacatctatattctacgccttgggcttgctttcatacggaagatagccaagcgaagaagtaacatttctctttatggtgatgagttgggtagaggtttcgtcggcgagttggactacaatattgaagctgctaatgctaccaaatttatggaggttcattccagatatcctttcatgctagttcctaaggttcttaaacaacttactcgaaagagggttttaacaatggagtgggtggctggtgagaaccccaaggatttgctttctttgtctaaaggagtttctgaaaaatttactcaagcttcagataatcagaagttggaagcaaaatctcgccttcttgacctggtcaataaaggtgtagaggcatcgctagtgcagcttcttgagacaggcttgttgcatgctgatcctcatcctggtaacttgcgttatactcctgaaggccgtgttgggtttctagattttggtttgctgtgcatgatggagaggaaacatcagcgtgctatgcttgcaagcatagtgcacatagtaaatggtgattgggcttccgtcgtttatgatttgactgaaatggatgtagttccaccaaaaaccaatctacgtcgtgtgacaatggtgcttggaaaaatttggtctgtggcatttaaatatcacttccgtatgccaccttactacacacttgttctccggtcacttgcctctttggaaggactagccgtggcagcagatgggactttcaaaacatttcaagcagcatacccatatgttgttcggaagcttctgtccgaaaattcacttgaaacaagaagactcttgaatcaggcaatttttaacaaaaggaaagagttccaatggcagaagattgacgcgtttctaaaattggcttcagcaaggaccaacttcaagtataacagtgaagttttgccagagcctgacatgaagtccatgaatgtggctagccttgtggagatcagtgatgcatattcacttgaccgtgctatagctacaccagagagagcattgcatactgcaaacctgtgtgtgaggcttttattatctaaggagagcattgtgattaggagacttattatgacagcgaatgcaaaatctcttgcccgtgatctgatctccagagatgctttgatgttccgggtgctccttagtaaggttattgcggatgttgtctaccaatggatgttgagtgccacaggcttgaaacgagttatggagaccaagatccagacgcccatgaccacaggaaagaacgagggacatctggtgctggctgaagaaccatcgaccctgatggtactccaggcggcagtaaaagaccgaaggattcagctcatgttcaccaagtttgtgagggagttgagagaggagcccgtcttgatgattagggtgagctggaacgtgttcctcatctcggtctcatctgccgctgtaggcctgcaccgtttcttggtgttcttcttgaaggaggatggtgccaggttcttggatgacaaggtcaagaaaatgaagatttggctgatggagttctcgaagcggacggctaatctggagattcaaggaattctgtgaatgttggtggcttttggttgaaggatttaatagctgcttcgcactctggtttttggagttactttctgcatcgagtgaatccagttcctgtttacgctggctgtctgagcttgcttggctgctggtgttcccagagatttataaaaacagggttttcctccgtcattccgccgcagctagtatataatagatggttcttggttgttcatgtactgtgtagctgtatataatagaaacattgcaggatcagtgagtaattctgtggccgagtaaagtgcagtggtggaaggcatgtgttacctactggatataaatatgatgatgtgaatgttcagttgaaaaacttgggtgacatgaactgatgaactatagctgatgcctccactttagaaatttagctgttttagtttgtctaaaatcaaacctttctttgacaagtaacttgcataaactcgggcgaaatcgtttgggtagatcatagatgtttgtaaatttgtccgattattaacatgaacagtggtagccggtgtaatcatttcccaccacaaaaggtcagtgcgaaatgggctgtaaggctggatccgacgacacattggaccctttatgtcaagtcatgggcccgtcgtactgggaacccacggcccacgatggggcaattgcttcgtgtccattgcgtctctcttctcgacggagctcgagtcgggtctgagaggtggacggagtttcggattcggaggtgatctgacctgtgaggggctgaggaggaggaggaggaggaggaggaggagggatggggcggcggcagaagcggcaggctttgatggcggcattcgcgttggcgctgctcatgggcaccgccgtctacttccgcatctgggcccgccagtccagcgacccctacttcaccgctgacgaccgcgaggagctccggaggcaatttgaacaagcaaacctagaagccatggatgaatctgccgaatggaggatgcaatatgacaaagaagtagagaaaaacaggcagttgcatgatgagctttcaaaggttaaggcctcattagctggcacagcccggcgtcttgagttgttgcagaaggataacgagttgcagaagaggcagactgaatcgctgaggcagcaatgcaattgcactctccattgaaagttatgcaagattaaggacatggaaggagtttttcagcttctttggcggattagctatttttttccaacaccaagggaggaaaaccagattgagttctaggaatgagaactggcatatgaaaatgattgagaacatatatagtgtatagaccatagtgttcgtcctttataccaatggtgagctgcacagttcatccaaagtgatcggtgggaacttcattggtgacaatgcaaagcgcagaagtcaaaacgtaaaagatggcgccaagtttgaaatctgggaccgtgccaatacttattggcaggaaacttaataatccatattgtattatcgatacttgcaattcctt

SEQ ID NO: 56268 - DNA, 4356 bp, Zea Mays
ccctgcccggctgtcccgtctcgaccaccagcaccagttcagcccatccaccgccaccacctcagacgctcctagtcaccactcgctgtcctcggcttctcctaaaagctcgacgcgatggcgacgctggtgcggccgcccgcgctgcacgtccgcgccgtgagcggcggcgggaacaaggacagggtggcgccgcagcggccttggtggggcgggaacaagcccatctcaccgcgccagtcgggcgggagcggggcgcgaggaggcgcgggcggcggcggcgtcgcgctggaccaggtgctaggtgtgctccgccgcgacggcgaattcgtccaggccgccgtcggcgccccgctccgcgacgtcttctggctccgcttccttgagaagaagcagcggaagcagcagcagccgagacctaagcacaagcctttccggcagcagcaggaagaggaggaggtggtagtggtggacgagtcgcccccggccttcccgcccccctcgtacccgtcagggttgtcgtgcgtggagctaatggcggccgacttccaggccctcaaggtgtacgccggtagcgcgcggcactctctcgcgcgccgattcctcggtagcaatagcaagggaaagtctgaacagcaacctaaacccaaaccccaggagcagcagaaagagcagcaacatatacttcaggccccagccttccctccgccctcctacccaccaggattatcctgtatggagttgatgatggctgaccttgaagccctgaaactgtacatcaactactattcggccatcctgactacgccgctcccccagcattatgatcctgacctccttgcccagtacttcgcctcacgtccgcatatccttgcctctcgcgtcattcagatactcttcacatttctctcagctgtggtgaagatgcggatttcaaaaagagctcagttaaccacagatgctacctatagtagtggtaacagcggcaacgggtttgatgatactcaatatatggtcggccaacttctcaaggagacatttcttaaccttgggcctacttttattaaagttggacaatcactttctacaagacctgatatcataggttcagagatttgtgaggttaggcccttgctgagttgcatgaaagggttcctactttcccaagagaggatgcaatgaagatcattgagggagaatttgggtgccctgtgtcgcatatgttcagttatgtttcagatgagcctgtagcatctgcttcctttggacaggtctaccaggggcgcacagttgatggttctcttgttgcaataaaggttcagcggccagaccttctaccttctgtactgagagacatctatattctacgccttgggcttgctttcatacggaagatagccaagcgaagaagtaacatttctctttatggtgatgagttgggtagaggtttcgtcggcgagttggactacaatattgaagctgctaatgctaccaaatttatggaggttcattccagatatcctttcatgctagttcctaaggttcttaaacaacttactcgaaagagggttttaacaatggagtgggtggctggtgagaaccccaaggatttgctttctttgtctaaaggagtttctgaaaaatttactcaagcttcagataatcagaagttggaagcaaaatctcgccttcttgacctggtcaataaaggtgtagaggcatcgctagtgcagcttcttgagacaggcttgttgcatgctgatcctcatcctggtaacttgcgttatactcctgaaggccgtgttgggtttctagattttggtttgctgtgcatgatggagaggaaacatcagcgtgctatgcttgcaagcatagtgcacatagtaaatggtgattgggcttccgtcgtttatgatttgactgaaatggatgtagttccaccaaaaaccaatctacgtcgtgtgacaatggactagccgtggcagcagatgggactttcaaaacatttcaagcagcatacccatatgttgttcggaagcttctgtccgaaaattcacttgaaacaagaagactcttgaatcaggcaatttttaacaaaaggaaagagttccaatggcagaagattgacgcgtttctaaaattggcttcagcaaggaccaacttcaagtataacagtgaagttttgccagagcctgacatgaagtccatgaatgtggctagccttgtggagatcagtgatgcatattcacttgaccgtgctatagctacaccagagagagcattgcatactgcaaacctgtgtgtgaggcttttattatctaaggagagcattgtgattaggagacttattatgacagcgaatgcaaaatctcttgcccgtgatctgatctccagagatgctttgatgttccgggtgctccttagtaaggttattgcggatgttgtctaccaatggatgttgagtgccacaggcttgaaacgagttatggagaccaagatccagacgcccatgaccacaggaaagaacgagggacatctggtgctggctgaagaaccatcgaccctgatggtactccaggcggcagtaaaagaccgaaggattcagctcatgttcaccaagtttgtgagggagttgagagaggagcccgtcttgatgattagggtgagctggaacgtgttcctcatctcggtctcatctgccgctgtaggcctgcaccgtttcttggtgttcttcttgaaggaggatggtgccaggttcttggatgacaaggtcaagaaaatgaagatttggctgatggagttctcgaagcggacggctaatctggagattcaaggaattctgtgaatgttggtggcttttggttgaaggatttaatagctgcttcgcactctggtttttggagttactttctgcatcgagtgaatccagttcctgtttacgctggctgtctgagcttgcttggctgctggtgttcccagagatttataaaaacagggttttcctccgtcattccgccgcagctagtatataatagatggttcttggttgttcatgtactgtgtagctgtatataatagaaacattgcaggatcagtgagtaattctgtggccgagtaaagtgcagtggtggaaggcatgtgttacctactggatataaatatgatgatgtgaatgttcagttgaaaaacttgggtgacatgaactgatgaactatagctgatgcctccactttagaaatttagctgttttagtttgtctaaaatcaaacctttctttgacaagtaacttgcataaactcgggcgaaatcgtttgggtagatcatagatgtttgtaaatttgtccgattattaacatgaacagtggtagccggtgtaatcatttcccaccacaaaaggtcagtgcgaaatgggctgtaaggctggatccgacgacacattggaccctttatgtcaagtcatgggcccgtcgtactgggaacccacggcccacgatggggcaattgcttcgtgtccattgcgtctctcttctcgacggagctcgagtcgggtctgagaggtggacggagtttcggattcggaggtgatctgacctgtgaggggctgaggaggaggaggaggaggaggaggaggagggatggggcggcggcagaagcggcaggctttgatggcggcattcgcgttggcgctgctcatgggcaccgccgtctacttccgcatctgggcccgccagtccagcgacccctacttcaccgctgacgaccgcgaggagctccggaggcaatttgaacaagcaaacctagaagccatggatgaatctgccgaatggaggatgcaatatgacaaagaagtagagaaaaacaggcagttgcatgatgagctttcaaaggttaaggcctcattagctggcacagcccggcgtcttgagttgttgcagaaggataacgagttgcagaagaggcagactgaatcgctgaggcagcaatgcaattgcactctccattgaaagttatgcaagattaaggacatggaaggagtttttcagcttctttggcggattagctatttttttccaacaccaagggaggaaaaccagattgagttctaggaatgagaactggcatatgaaaatgattgagaacatatatagtgtatagaccatagtgttcgtcctttataccaatggtgagctgcacagttcatccaaagtgatcggtgggaacttcattggtgacaatgcaaagcgcagaagtcaaaacgtaaaagatggcgccaagtttgaaatctgggaccgtgccaatacttattggcaggaaacttaataatccatattgtattatcgatacttgcaattcctt

SEQ ID NO: 56269 - DNA, 4366 bp, Zea Mays
gtggactccccgacgccctgcccggctgtcccgtctcgaccaccagcaccagttcagcccatccaccgccaccacctcagacgctcctagtcaccactcgctgtcctcggcttctcctaaaagctcgacgcgatggcgacgctggtgcggccgcccgcgctgcacgtccgcgccgtgagcggcggcgggaacaaggacagggtggcgccgcagcggccttggtggggcgggaacaagcccatctcaccgcgccagtcgggcgggagcggggcgcgaggaggcgcgggcggcggcggcgtcgcgctggaccaggtgctaggtgtgctccgccgcgacggcgaattcgtccaggccgccgtcggcgccccgctccgcgacgtcttctggctccgcttccttgagaagaagcagcggaagcagcagcagccgagacctaagcacaagcctttccggcagcagcaggaagaggaggaggtggtagtggtggacgagtcgcccccggccttcccgcccccctcgtacccgtcagggttgtcgtgcgtggagctaatggcggccgacttccaggccctcaaggtgtacgccggtagcgcgcggcactctctcgcgcgccgattcctcggtagcaatagcaagggaaagtctgaacagcaacctaaacccaaaccccaggagcagcagaaagagcagcaacatatacttcaggccccagccttccctccgccctcctacccaccaggattatcctgtatggagttgatgatggctgaccttgaagccctgaaactgtacatcaactactattcggccatcctgactacgccgctcccccagcattatgatcctgacctccttgcccagtacttcgcctcacgtccgcatatccttgcctctcgcgtcattcagatactcttcacatttctctcagctgtggtgaagatgcggatttcaaaaagagctcagttaaccacagatgctacctatagtagtggtaacagcggcaacgggtttgatgatactcaatatatggtcggccaacttctcaaggagacatttcttaaccttgggcctacttttattaaagttggacaatcactttctacaagacctgatatcataggttcagagatttgtgaggcccttgctgagttgcatgaaagggttcctactttcccaagagaggatgcaatgaagatcattgagggagaatttgggtgccctgtgtcgcatatgttcagttatgtttcagatgagcctgtagcatctgcttcctttggacaggtctaccaggggcgcacagttgatggttctcttgttgcaataaaggttcagcggccagaccttctaccttctgtactgagagacatctatattctacgccttgggcttgctttcatacggaagatagccaagcgaagaagtaacatttctctttatggtgatgagttgggtagaggtttcgtcggcgagttggactacaatattgaagctgctaatgctaccaaatttatggaggttcattccagatatcctttcatgctagttcctaaggttcttaaacaacttactcgaaagagggttttaacaatggagtgggtggctggtgagaaccccaaggatttgctttctttgtctaaaggagtttctgaaaaatttactcaagcttcagataatcagaagttggaagcaaaatctcgccttcttgacctggtcaataaaggtgtagaggcatcgctagtgcagcttcttgagacaggcttgttgcatgctgatcctcatcctggtaacttgcgttatactcctgaaggccgtgttgggtttctagattttggtttgctgtgcatgatggagaggaaacatcagcgtgctatgcttgcaagcatagtgcacatagtaaatggtgattgggcttccgtcgtttatgatttgactgaaatggatgtagttccaccaaaaaccaatctacgtcgtgtgacaatggactagccgtggcagcagatgggactttcaaaacatttcaagcagcatacccatatgttgttcggaagcttctgtccgaaaattcacttgaaacaagaagactcttgaatcaggcaatttttaacaaaaggaaagagttccaatggcagaagattgacgcgtttctaaaattggcttcagcaaggaccaacttcaagtataacagtgaagttttgccagagcctgacatgaagtccatgaatgtggctagccttgtggagatcagtgatgcatattcacttgaccgtgctatagctacaccagagagagcattgcatactgcaaacctgtgtgtgaggcttttattatctaaggagagcattgtgattaggagacttattatgacagcgaatgcaaaatctcttgcccgtgatctgatctccagagatgctttgatgttccgggtgctccttagtaaggttattgcggatgttgtctaccaatggatgttgagtgccacaggcttgaaacgagttatggagaccaagatccagacgcccatgaccacaggaaagaacgagggacatctggtgctggctgaagaaccatcgaccctgatggtactccaggcggcagtaaaagaccgaaggattcagctcatgttcaccaagtttgtgagggagttgagagaggagcccgtcttgatgattagggtgagctggaacgtgttcctcatctcggtctcatctgccgctgtaggcctgcaccgtttcttggtgttcttcttgaaggaggatggtgccaggttcttggatgacaaggtcaagaaaatgaagatttggctgatggagttctcgaagcggacggctaatctggagattcaaggaattctgtgaatgttggtggcttttggttgaaggatttaatagctgcttcgcactctggtttttggagttactttctgcatcgagtgaatccagttcctgtttacgctggctgtctgagcttgcttggctgctggtgttcccagagatttataaaaacagggttttcctccgtcattccgccgcagctagtatataatagatggttcttggttgttcatgtactgtgtagctgtatataatagaaacattgcaggatcagtgagtaattctgtggccgagtaaagtgcagtggtggaaggcatgtgttacctactggatataaatatgatgatgtgaatgttcagttgaaaaacttgggtgacatgaactgatgaactatagctgatgcctccactttagaaatttagctgttttagtttgtctaaaatcaaacctttctttgacaagtaacttgcataaactcgggcgaaatcgtttgggtagatcatagatgtttgtaaatttgtccgattattaacatgaacagtggtagccggtgtaatcatttcccaccacaaaaggtcagtgcgaaatgggctgtaaggctggatccgacgacacattggaccctttatgtcaagtcatgggcccgtcgtactgggaacccacggcccacgatggggcaattgcttcgtgtccattgcgtctctcttctcgacggagctcgagtcgggtctgagaggtggacggagtttcggattcggaggtgatctgacctgtgaggggctgaggaggaggaggaggaggaggaggaggagggatggggcggcggcagaagcggcaggctttgatggcggcattcgcgttggcgctgctcatgggcaccgccgtctacttccgcatctgggcccgccagtccagcgacccctacttcaccgctgacgaccgcgaggagctccggaggcaatttgaacaagcaaacctagaagccatggatgaatctgccgaatggaggatgcaatatgacaaagaagtagagaaaaacaggcagttgcatgatgagctttcaaaggttaaggcctcattagctggcacagcccggcgtcttgagttgttgcagaaggataacgagttgcagaagaggcagactgaatcgctgaggcagcaatgcaattgcactctccattgaaagttatgcaagattaaggacatggaaggagtttttcagcttctttggcggattagctatttttttccaacaccaagggaggaaaaccagattgagttctaggaatgagaactggcatatgaaaatgattgagaacatatatagtgtatagaccatagtgttcgtcctttataccaatggtgagctgcacagttcatccaaagtgatcggtgggaacttcattggtgacaatgcaaagcgcagaagtcaaaacgtaaaagatggcgccaagtttgaaatctgggaccgtgccaatacttattggcaggaaacttaataatccatattgtattatcgatacttgcaattcctt

SEQ ID NO: 56270 - DNA, 4587 bp, Zea Mays
cgcggacgcgacggcgaggtgacccgatgacgtgcgcagcgtagcagcagccaacagtggactccccgacgccctgcccggctgtcccgtctcgaccaccagcaccagttcagcccatccaccgccaccacctcagacgctcctagtcaccactcgctgtcctcggcttctcctaaaagctcgacgcgatggcgacgctggtgcggccgcccgcgctgcacgtccgcgccgtgagcggcggcgggaacaaggacagggtggcgccgcagcggccttggtggggcgggaacaagcccatctcaccgcgccagtcgggcgggagcggggcgcgaggaggcgcgggcggcggcggcgtcgcgctggaccaggtgctaggtgtgctccgccgcgacggcgaattcgtccaggccgccgtcggcgccccgctccgcgacgtcttctggctccgcttccttgagaagaagcagcggaagcagcagcagccgagacctaagcacaagcctttccggcagcagcaggaagaggaggaggtggtagtggtggacgagtcgcccccggccttcccgcccccctcgtacccgtcagggttgtcgtgcgtggagctaatggcggccgacttccaggccctcaaggtgtacgccggtagcgcgcggcactctctcgcgcgccgattcctcggtagcaatagcaagggaaagtctgaacagcaacctaaacccaaaccccaggagcagcagaaagagcagcaacatatacttcaggccccagccttccctccgccctcctacccaccaggattatcctgtatggagttgatgatggctgaccttgaagccctgaaactgtacatcaactactattcggccatcctgactacgccgctcccccagcattatgatcctgacctccttgcccagtacttcgcctcacgtccgcatatccttgcctctcgcgtcattcagatactcttcacatttctctcagctgtggtgaagatgcggatttcaaaaagagctcagttaaccacagatgctacctatagtagtggtaacagcggcaacgggtttgatgatactcaatatatggtcggccaacttctcaaggagacatttcttaaccttgggcctacttttattaaagttggacaatcactttctacaagacctgatatcataggttcagagatttgtgaggttaggcccttgctgagttgcatgaaagggttcctactttcccaagagaggatgcaatgaagatcattgagggagaatttgggtgccctgtgtcgcatatgttcagttatgtttcagatgagcctgtagcatctgcttcctttggacaggtctaccaggggcgcacagttgatggttctcttgttgcaataaaggttcagcggccagaccttctaccttctgtactgagagacatctatattctacgccttgggcttgctttcatacggaagatagccaagcgaagaagtaacatttctctttatggtgatgagttgggtagaggtttcgtcggcgagttggactacaatattgaagctgctaatgctaccaaatttatggaggttcattccagatatcctttcatgctagttcctaaggttcttaaacaacttactcgaaagagggttttaacaatggagtgggtggctggtgagaaccccaaggatttgctttctttgtctaaaggagtttctgaaaaatttactcaagcttcagataatcagaagttggaagcaaaatctcgccttcttgacctggtcaataaaggtgtagaggcatcgctagtgcagcttcttgagacaggcttgttgcatgctgatcctcatcctggtaacttgcgttatactcctgaaggccgtgttgggtttctagattttggtttgctgtgcatgatggagaggaaacatcagcgtgctatgcttgcaagcatagtgcacatagtaaatggtgattgggcttccgtcgtttatgatttgactgaaatggatgtagttccaccaaaaaccaatctacgtcgtgtgacaatggatttagaggatgcattaggcgaggtaacctttgaagatggcattccagaaatcaagtttagtaaggtgcttggaaaaatttggtctgtggcatttaaatatcacttccgtatgccaccttactacacacttgttctccggtcacttgcctctttggaaggactagccgtggcagcagatgggactttcaaaacatttcaagcagcatacccatatgttgttcggaagcttctgtccgaaaattcacttgaaacaagaagactcttgaatcaggcaatttttaacaaaaggaaagagttccaatggcagaagattgacgcgtttctaaaattggcttcagcaaggaccaacttcaagtataacagtgaagttttgccagagcctgacatgaagtccatgaatgtggctagccttgtggagatcagtgatgcatattcacttgaccgtgctatagctacaccagagagagcattgcatactgcaaacctgtgtgtgaggcttttattatctaaggagagcattgtgattaggagacttattatgacagcgaatgcaaaatctcttgcccgtgatctgatctccagagatgctttgatgttccgggtgctccttagtaaggttattgcggatgttgtctaccaatggatgttgagtgccacaggcttgaaacgagttatggagaccaagatccagacgcccatgaccacaggaaagaacgagggacatctggtgctggctgaagaaccatcgaccctgatggtactccaggcggcagtaaaagaccgaaggattcagctcatgttcaccaagtttgtgagggagttgagagaggagcccgtcttgatgattagggtgagctggaacgtgttcctcatctcggtctcatctgccgctgtaggcctgcaccgtttcttggtgttcttcttgaaggaggatggtgccaggttcttggatgacaaggtcaagaaaatgaagatttggctgatggagttctcgaagcggacggctaatctggagattcaaggaattctgtgaatgttggtggcttttggttgaaggatttaatagctgcttcgcactctggtttttggagttactttctgcatcgagtgaatccagttcctgtttacgctggctgtctgagcttgcttggctgctggtgttcccagagatttataaaaacagggttttcctccgtcattccgccgcagctagtatataatagatggttcttggttgttcatgtactgtgtagctgtatataatagaaacattgcaggatcagtgagtaattctgtggccgagtaaagtgcagtggtggaaggcatgtgttacctactggatataaatatgatgatgtgaatgttcagttgaaaaacttgggtgacatgaactgatgaactatagctgatgcctccactttagaaatttagctgttttagtttgtctaaaatcaaacctttctttgacaagtaacttgcataaactcgggcgaaatcgtttgggtagatcatagatgtttgtaaatttgtccgattattaacatgaacagtggtagccggtgtaatcatttcccaccacaaaaggtcagtgcgaaatgggctgtaaggctggatccgacgacacattggaccctttatgtcaagtcatgggcccgtcgtactgggaacccacggcccacgatggggcaattgcttcgtgtccattgcgtctctcttctcgacggagctcgagtcgggtctgagaggtggacggagtttcggattcggaggtgatctgacctgtgaggggctgaggaggaggaggaggaggaggaggaggagggatggggcggcggcagaagcggcaggctttgatggcggcattcgcgttggcgctgctcatgggcaccgccgtctacttccgcatctgggcccgccagtccagcgacccctacttcaccgctgacgaccgcgaggagctccggaggcaatttgaacaagcaaacctagaagccatggatgaatctgccgaatggaggatgcaatatgacaaagaagtagagaaaaacaggcagttgcatgatgagctttcaaaggttaaggcctcattagctggcacagcccggcgtcttgagttgttgcagaaggataacgagttgcagaagaggcagactgaatcgctgaggcagcaatgcaattgcactctccattgaaagttatgcaagattaaggacatggaaggagtttttcagcttctttggcggattagctatttttttccaacaccaagggaggaaaaccagattgagttctaggaatgagaactggcatatgaaaatgattgagaacatatatagtgtatagaccatagtgttcgtcctttataccaatggtgagctgcacagttcatccaaagtgatcggtgggaacttcattggtgacaatgcaaagcgcagaagtcaaaacgtaaaagatggcgccaagtttgaaatctgggaccgtgccaatacttattggcaggaaacttaataatccatattgtattatcgatacttgcaattcctt

SEQ ID NO: 56271 - DNA, 4582 bp, Zea Mays
cgcggacgcgacggcgaggtgacccgatgacgtgcgcagcgtagcagcagccaacagtggactccccgacgccctgcccggctgtcccgtctcgaccaccagcaccagttcagcccatccaccgccaccacctcagacgctcctagtcaccactcgctgtcctcggcttctcctaaaagctcgacgcgatggcgacgctggtgcggccgcccgcgctgcacgtccgcgccgtgagcggcggcgggaacaaggacagggtggcgccgcagcggccttggtggggcgggaacaagcccatctcaccgcgccagtcgggcgggagcggggcgcgaggaggcgcgggcggcggcggcgtcgcgctggaccaggtgctaggtgtgctccgccgcgacggcgaattcgtccaggccgccgtcggcgccccgctccgcgacgtcttctggctccgcttccttgagaagaagcagcggaagcagcagcagccgagacctaagcacaagcctttccggcagcagcaggaagaggaggaggtggtagtggtggacgagtcgcccccggccttcccgcccccctcgtacccgtcagggttgtcgtgcgtggagctaatggcggccgacttccaggccctcaaggtgtacgccggtagcgcgcggcactctctcgcgcgccgattcctcggtagcaatagcaagggaaagtctgaacagcaacctaaacccaaaccccaggagcagcagaaagagcagcaacatatacttcaggccccagccttccctccgccctcctacccaccaggattatcctgtatggagttgatgatggctgaccttgaagccctgaaactgtacatcaactactattcggccatcctgactacgccgctcccccagcattatgatcctgacctccttgcccagtacttcgcctcacgtccgcatatccttgcctctcgcgtcattcagatactcttcacatttctctcagctgtggtgaagatgcggatttcaaaaagagctcagttaaccacagatgctacctatagtagtggtaacagcggcaacgggtttgatgatactcaatatatggtcggccaacttctcaaggagacatttcttaaccttgggcctacttttattaaagttggacaatcactttctacaagacctgatatcataggttcagagatttgtgaggcccttgctgagttgcatgaaagggttcctactttcccaagagaggatgcaatgaagatcattgagggagaatttgggtgccctgtgtcgcatatgttcagttatgtttcagatgagcctgtagcatctgcttcctttggacaggtctaccaggggcgcacagttgatggttctcttgttgcaataaaggttcagcggccagaccttctaccttctgtactgagagacatctatattctacgccttgggcttgctttcatacggaagatagccaagcgaagaagtaacatttctctttatggtgatgagttgggtagaggtttcgtcggcgagttggactacaatattgaagctgctaatgctaccaaatttatggaggttcattccagatatcctttcatgctagttcctaaggttcttaaacaacttactcgaaagagggttttaacaatggagtgggtggctggtgagaaccccaaggatttgctttctttgtctaaaggagtttctgaaaaatttactcaagcttcagataatcagaagttggaagcaaaatctcgccttcttgacctggtcaataaaggtgtagaggcatcgctagtgcagcttcttgagacaggcttgttgcatgctgatcctcatcctggtaacttgcgttatactcctgaaggccgtgttgggtttctagattttggtttgctgtgcatgatggagaggaaacatcagcgtgctatgcttgcaagcatagtgcacatagtaaatggtgattgggcttccgtcgtttatgatttgactgaaatggatgtagttccaccaaaaaccaatctacgtcgtgtgacaatggatttagaggatgcattaggcgaggtaacctttgaagatggcattccagaaatcaagtttagtaaggtgcttggaaaaatttggtctgtggcatttaaatatcacttccgtatgccaccttactacacacttgttctccggtcacttgcctctttggaaggactagccgtggcagcagatgggactttcaaaacatttcaagcagcatacccatatgttgttcggaagcttctgtccgaaaattcacttgaaacaagaagactcttgaatcaggcaatttttaacaaaaggaaagagttccaatggcagaagattgacgcgtttctaaaattggcttcagcaaggaccaacttcaagtataacagtgaagttttgccagagcctgacatgaagtccatgaatgtggctagccttgtggagatcagtgatgcatattcacttgaccgtgctatagctacaccagagagagcattgcatactgcaaacctgtgtgtgaggcttttattatctaaggagagcattgtgattaggagacttattatgacagcgaatgcaaaatctcttgcccgtgatctgatctccagagatgctttgatgttccgggtgctccttagtaaggttattgcggatgttgtctaccaatggatgttgagtgccacaggcttgaaacgagttatggagaccaagatccagacgcccatgaccacaggaaagaacgagggacatctggtgctggctgaagaaccatcgaccctgatggtactccaggcggcagtaaaagaccgaaggattcagctcatgttcaccaagtttgtgagggagttgagagaggagcccgtcttgatgattagggtgagctggaacgtgttcctcatctcggtctcatctgccgctgtaggcctgcaccgtttcttggtgttcttcttgaaggaggatggtgccaggttcttggatgacaaggtcaagaaaatgaagatttggctgatggagttctcgaagcggacggctaatctggagattcaaggaattctgtgaatgttggtggcttttggttgaaggatttaatagctgcttcgcactctggtttttggagttactttctgcatcgagtgaatccagttcctgtttacgctggctgtctgagcttgcttggctgctggtgttcccagagatttataaaaacagggttttcctccgtcattccgccgcagctagtatataatagatggttcttggttgttcatgtactgtgtagctgtatataatagaaacattgcaggatcagtgagtaattctgtggccgagtaaagtgcagtggtggaaggcatgtgttacctactggatataaatatgatgatgtgaatgttcagttgaaaaacttgggtgacatgaactgatgaactatagctgatgcctccactttagaaatttagctgttttagtttgtctaaaatcaaacctttctttgacaagtaacttgcataaactcgggcgaaatcgtttgggtagatcatagatgtttgtaaatttgtccgattattaacatgaacagtggtagccggtgtaatcatttcccaccacaaaaggtcagtgcgaaatgggctgtaaggctggatccgacgacacattggaccctttatgtcaagtcatgggcccgtcgtactgggaacccacggcccacgatggggcaattgcttcgtgtccattgcgtctctcttctcgacggagctcgagtcgggtctgagaggtggacggagtttcggattcggaggtgatctgacctgtgaggggctgaggaggaggaggaggaggaggaggaggagggatggggcggcggcagaagcggcaggctttgatggcggcattcgcgttggcgctgctcatgggcaccgccgtctacttccgcatctgggcccgccagtccagcgacccctacttcaccgctgacgaccgcgaggagctccggaggcaatttgaacaagcaaacctagaagccatggatgaatctgccgaatggaggatgcaatatgacaaagaagtagagaaaaacaggcagttgcatgatgagctttcaaaggttaaggcctcattagctggcacagcccggcgtcttgagttgttgcagaaggataacgagttgcagaagaggcagactgaatcgctgaggcagcaatgcaattgcactctccattgaaagttatgcaagattaaggacatggaaggagtttttcagcttctttggcggattagctatttttttccaacaccaagggaggaaaaccagattgagttctaggaatgagaactggcatatgaaaatgattgagaacatatatagtgtatagaccatagtgttcgtcctttataccaatggtgagctgcacagttcatccaaagtgatcggtgggaacttcattggtgacaatgcaaagcgcagaagtcaaaacgtaaaagatggcgccaagtttgaaatctgggaccgtgccaatacttattggcaggaaacttaataatccatattgtattatcgatacttgcaattcctt

SEQ ID NO: 56272 - DNA, 741 bp, Zea Mays
ggaaaaccaaggcaaggctgctgggtctggaacggaatgccgtgtgacccagcatcctccgttcctcttcctccccttcacccagtcaattccgatcccaccaattcacgcagacgcgtctgtccatttaccaggacaacaaaggcccagccaaggccagcagcagcagcagcagcgcatccgaagatgtccttgtaaactgcgaagcttctgcagcctccctccctagtcccttcaattccctcttagcaaagcaattcttctgtgcagtcttgtaattcgattcagaaacaacagtccaaattgaagcccctcttttttgtgcagtcttttttttcattttctatcccaggaatggagtttgaactttgaagacgcctgattgagctgtgcaactacaggcatgtgcatgggaatgggatgatgaaccaaccgggtacggcaatgaagaagaagccggccggccggccggccggctactatcagaaaatgggacgactcgaggaagcaaaaggcaaaacagagaagagaggccaaaaacaagcacacatgatgcgattcttgctcctgccagcgatcagtcagattttttttctagttcatcgtattcacgcatttaccaatacccatccatgtggcttgcaggcgaaaatggctagtttttgcacatgataagcaccgccggcgatcgactgatgactcacctgtgagttcgccggaaacggtcgactgacggctcac

SEQ ID NO: 56273 - DNA, 5554 bp, Zea Mays
agacaatccaacggcttgccctcgttctttaaaatccgtgttcaccattctccccctaataaatcacacaggtctccggcgaagtctcctcccgaccgccctccgcatctcgtcgacgacgaaaggaaaacctcacaaatcctctggatgcggggtctagccgcctccgccctgtagcaccagtcggatcgaagaagcacaagcgcttcgggtcggcgcgcacctctccctcatggtggcggcgcgaggggcccgatctgggggctcggttgcggcggcggcgctggtctcggttcttctcgtgggttgcctcgtcgcgggcggccagggggcggagatccgtcgccagaaaaacgtgcaggctgcgctccgggccaagtgggctggcacgccgctgctgctcgaagccagctgtaggcaacgttggctgctagaggacctggcgggcgacgggccgacgtcattggcgaccgactctgaatgtgggagagcggagggggtgctcgggcactggaagagggaggcgggtgttggaggacaccgtcctggcggcgctggaggtggaggagggggtggaggagaggagggagaatggaaggatctattttgggattttattgacctctggaaggatctagagaaaggctctgaatgtttaacagcaaaatgctgtgcccagaagattgttgaggatgcccacatactactcaatgaaccgctctcttcaatttttgagttttctcttacccttcgatcagcatcaccaaaattagtgctttaccggcaacttgcaaaggagtcattatcttcgtttcctattgatgattcaccagagaacatttctggtcatggcactggaaaaacttttgatggggctgtggatcctggctcttctggaggaacttgctgctgggtagacactgggaatgttctattgttcaattcagccgatctgcatgaatggcttgggggattgggcaagctagctatggattctactgaacagcctgaactctttgaatttgaccatatatatcgtcgcacaaatattactgctccagttgctatattttatggggctgttgggacaaaatgcttcaaagagctgcatgttcaactagtagaagcatcaaagcagggaaaaatcaggtatgctctgcgtcctgtcctaccatctggatgtgagactacgtccaccttttgtggttcagttggtgctgtagatgcagtcaccttgagtggttatggggtggagcttgccctaaaaaacatggaatacaaagctatggatgacactgctataaagaagggtgttcctctagaagatcctaaaacagaggacctcagtcaagaagtcagagggtttatattttccaagattttggaacgcaagccagagctaaatgctgagataatggccttcagagattatctgttgtcatcggcagtgtctgatacacttgaagtctgggaactcaaagatctgggtcatcagacagcacagcgaatcgttcaagcatcagaccctttacagtcaatgcaggaaatcaatcaaaatttcccaagtatagtttcttcactatcacgaatgaagcttgacgattccatcaaagacgaaattattgcaaatcagcggatggttccacctggcaagtcattgatggctttgaatggtgctttgatcaatatcgaggatcttgatctttacctgttaatggatatggtccatggagaattatccctggctgatcagttcgtccggttaaagttgcctcaaagtgctgtcctcaagatcctgtcagctcctccaccagcagaatctaattctttccgtgtggacttccggtcttctcatgtgcattaccttaataacttggaggaagatgccatgtatagaagatggagaagcaacatccaggagctcttgatgccggtcttccctggtcagatgcggtacatccgtaaaaaatctgtttccactctgtttatgtgcttgatcctgcttcagcctgtggtgcagagaccattgacatgatggtatctctatatcaagatagtgtccctataaggtttggtatcataatgtattcttcaagattcatcaatgttgttgaaggaagtgatggcactcttacaaataatgatggagaagacacttccattttgataacaaggctttttcttgtacatcaaagaaacatactcaacacagttggcattccaatttctcggcaatatacataaatcaaggaatggtgaagatgactacaatgaagagcttgttgaggctcatcatgttgaaggggcatttgttgattcactattatcaactgctaaatctcatccacaagatgtgctgctaaagttgcaaaaagagaacatgtacaagcaggaagctgaagaaagctctcattttgttcacaagcttgggttgtatagactccagtgttgtctgttgatgaacggacttgtccatgaagcaagtgaggaagcgaccatgaatgctatgaatgatgaacttcctaggattcaagaacaagtttattatgggcatatccagtcccatacagatattttagagaagtttttgtcagaaaatagctacaagcggtacaacccatcaattactggcaagaatgcagagaagaaatttgtttcgctctttgcatcgtaccatcaggacagctttatatttaatgacatgaagtacttacagtctcctggaactacagatgatgcaaaacctgttactcatctacttgccattgatctttcatcaaaagttggaacaaaattgctttatgaggccatactttacctgatggacggatctgatagagctcgtgttggtctgctactttatgtccacactggtggttcatcacctattttacttctgaaagatattttcgatagaactatttcttctttcagctataaagaaaaggtattagtcttcctgcatgggctcttgaaattttatgatgcccaacctttgcccgcctcatctgttgctgatgattggactagaactatgatggaaaaggtctataccttagctgctgaaactgctttgcctgttgatgactataaagcgtggtttaaaagtttctctgctgatacagttctcaaagggatggataagttatctgacttcttatttgggcaattggggcttgtgtttggtagtaatgctgtgatcaccaatggacgggtttttattatgaatgaagggaaatcatttctagccaatgatttaggtctccttgagtctatggagtatgatttgagaacgaaatacatatttgaaataattgaagaggttgagtttgccagtgttgaccctgatgacctaacaaaccaattctacagcgacattgccatgttgatctcatcgtcgatgtctgttcgtgaaaggacatctgaaagagcccattttgagattttacatgcggaacatagtgctatcaaattgaataatgcaaattcaagtattcacattgatgctgtcattgatccgctaagtcccactgggcaaaaacttgccccacttctacgcatactctggaaacaaattcagccgagcatgaggattgtacttaatcctattagttccctcgcagatcttcctttaaaaaacttctacagatttgttcttccatccatggatgattttagcagtacagatcattctgtacacggacctaaagctttctttgcaaatatgccactgtcaaaaacacttacaatgaacatagatgttccagaaccatggcttgttgaatcagttattgccatccatgatttagacaacattcttttagagaatcttggcgatgtcagaactttgcaggcagtatttgaacttgaagctctcctcttgacaggtcattgcatggaaaaggaccgggaccctccccgtggtctgcagtttatccttggtactaaacaaagaccacacttagtagacacacttgtcatggccaacttgggttactggcagatgaaagtctcccctggtgtatggtacctacaattggctcctggtcgtagtgccgatctgtatgagctacctccgaaactcattgccattgatagcttgagaggcaaactaatgcatattgaagtgcaaaagaagaaaggcaaggagcatgaggacttgctaaatgctgccgatgactaccacttccaggaaaagacggataacaaaggctggaataagaaccttttgaaatgggcttctagtcttatcactggtgatgcttcatcaaaaagtaaagctgataaaaccactgaccgtaaggatgcaagacaaggggaaaccataaatatattctctgttgcttctgggcatctgtatgagcgtttcctcaaaataatgattttgagtgttctaaaaaagacacagaggccagtgaagttttggttcattaagaattatctatctccacagttcaaggatgtcataccgcacatggctcgggaatatgaattcgagtatgagctcgtcacatataaatggccaacatggttacacaagcagaaagagaagcaaaggattatatgggcatataagatcttatttctggatgtcatttttccactttcactgaggaaggtgatttttgttgatgctgatcaaattgtgagagcagacatgggagaattgtatgacatgaacctgaagggtcgcccgcttgcatatactccattctgtgataacaacaaggatatggatggttttcgattttggaagcaaggtttttggaaagatcatctgcgaggaagaccgtaccatatcagtgcgctttatgttgttgatttggccaaatttcggcaaactgcttctggggatactcttcgtgtcttctatgaacaactcagcaaggaccccaatagtctctccaatcttgatcaggatctcccgaattatgcccaacatacggtgcctatattctctcttcctcaagaatggctgtggtgtgaatcttggtgtggaaatgccacaaaagcaagagcaaagaccattgatctatgcaacaatccaatgacaaaggagccaaagcttcagggtgctagaagaatagttccggagtggactggtcttgacagtgaagcacggcagttcactgcacgaatcttgggtgatgatgtcgagcctgcagatgccacacctccgccatcggaggcaccgaagcctgaagatgatcaggatgtgaaagatgagctatgatcgcaagatgtttccaggcttggtcttactgaatgaaagtttggtgactcgacagtcatcagttcagaacacaggcacacagctagtggagcgcagagggatagtttaacgcaggtgcaaatttgtcaaaacactacacctggaatcctagactacgttgattcagttcatccctctctcactctagcaaggaagggaggaggattggaaggagatggccagcaaaaagaccatagggatcaagtagaagaccacaagatgaggattgagaaggaggagccttctctccctagcaagaaagagctagaaaggtatttcaag

SEQ ID NO: 56274 - DNA, 5485 bp, Zea Mays
ctttatttatgaaaaaaaacttgtgaaggaaaaaaggccaacttccatccaaatatgaaacctgaaaactgataaaaataatcggccgttcagagacaatccaacggcttgccctcgttctttaaaatccgtgttcaccattctccccctaataaatcacacaggtctccggcgaagtctcctcccgaccgccctccgcatctcgtcgacgacgaaaggaaaacctcacaaatcctctggatgcggggtctagccgcctccgccctgtagcaccagtcggatcgaagaagcacaagcgcttcgggtcggcgcgcacctctccctcatggtggcggcgcgaggggcccgatctgggggctcggttgcggcggcggcgctggtctcggttcttctcgtgggttgcctcgtcgcgggcggccagggggcggagatccgtcgccagaaaaacgtgcaggctgcgctccgggccaagtgggctggcacgccgctgctgctcgaagccagtgaattgctttcgacagaatggaaggatctattttgggattttattgacctctggaaggatctagagaaaggctctgaatgtttaacagcaaaatgctgtgcccagaagattgttgaggatgcccacatactactcaatgaaccgctctcttcaatttttgagttttctcttacccttcgatcagcatcaccaaaattagtgctttaccggcaacttgcaaaggagtcattatcttcgtttcctattgatgattcaccagagaacatttctggtcatggcactggaaaaacttttgatggggctgtggatcctggctcttctggaggaacttgctgctgggtagacactgggaatgttctattgttcaattcagccgatctgcatgaatggcttgggggattgggcaagctagctatggattctactgaacagcctgaactctttgaatttgaccatatatatcgtcgcacaaatattactgctccagttgctatattttatggggctgttgggacaaaatgcttcaaagagctgcatgttcaactagtagaagcatcaaagcagggaaaaatcaggtatgctctgcgtcctgtcctaccatctggatgtgagactacgtccaccttttgtggttcagttggtgctgtagatgcagtcaccttgagtggttatggggtggagcttgccctaaaaaacatggaatacaaagctatggatgacactgctataaagaagggtgttcctctagaagatcctaaaacagaggacctcagtcaagaagtcagagggtttatattttccaagattttggaacgcaagccagagctaaatgctgagataatggccttcagagattatctgttgtcatcggcagtgtctgatacacttgaagtctgggaactcaaagatctgggtcatcagacagcacagcgaatcgttcaagcatcagaccctttacagtcaatgcaggaaatcaatcaaaatttcccaagtatagtttcttcactatcacgaatgaagcttgacgattccatcaaagacgaaattattgcaaatcagcggatggttccacctggcaagtcattgatggctttgaatggtgctttgatcaatatcgaggatcttgatctttacctgttaatggatatggtccatggagaattatccctggctgatcagttcgtccggttaaagttgcctcaaagtgctgtcctcaagatcctgtcagctcctccaccagcagaatctaattctttccgtgtggacttccggtcttctcatgtgcattaccttaataacttggaggaagatgccatgtatagaagatggagaagcaacatccaggagctcttgatgccggtcttccctggtcagatgcggtacatccgtaaaaaatctgtttccactctgtttatgtgcttgatcctgcttcagcctgtggtgcagagaccattgacatgatggtatctctatatcaagatagtgtccctataaggtttggtatcataatgtattcttcaagattcatcaatgttgttgaaggaagtgatggcactcttacaaataatgatggagaagacacttccattttgataacaaggctttttcttgtacatcaaagaaacatactcaacacagttggcattccaatttctcggcaatatacataaatcaaggaatggtgaagatgactacaatgaagagcttgttgaggctcatcatgttgaaggggcatttgttgattcactattatcaactgctaaatctcatccacaagatgtgctgctaaagttgcaaaaagagaacatgtacaagcaggaagctgaagaaagctctcattttgttcacaagcttgggttgtatagactccagtgttgtctgttgatgaacggacttgtccatgaagcaagtgaggaagcgaccatgaatgctatgaatgatgaacttcctaggattcaagaacaagtttattatgggcatatccagtcccatacagatattttagagaagtttttgtcagaaaatagctacaagcggtacaacccatcaattactggcaagaatgcagagaagaaatttgtttcgctctttgcatcgtaccatcaggacagctttatatttaatgacatgaagtacttacagtctcctggaactacagatgatgcaaaacctgttactcatctacttgccattgatctttcatcaaaagttggaacaaaattgctttatgaggccatactttacctgatggacggatctgatagagctcgtgttggtctgctactttatgtccacactggtggttcatcacctattttacttctgaaagatattttcgatagaactatttcttctttcagctataaagaaaaggtattagtcttcctgcatgggctcttgaaattttatgatgcccaacctttgcccgcctcatctgttgctgatgattggactagaactatgatggaaaaggtctataccttagctgctgaaactgctttgcctgttgatgactataaagcgtggtttaaaagtttctctgctgatacagttctcaaagggatggataagttatctgacttcttatttgggcaattggggcttgtgtttggtagtaatgctgtgatcaccaatggacgggtttttattatgaatgaagggaaatcatttctagccaatgatttaggtctccttgagtctatggagtatgatttgagaacgaaatacatatttgaaataattgaagaggttgagtttgccagtgttgaccctgatgacctaacaaaccaattctacagcgacattgccatgttgatctcatcgtcgatgtctgttcgtgaaaggacatctgaaagagcccattttgagattttacatgcggaacatagtgctatcaaattgaataatgcaaattcaagtattcacattgatgctgtcattgatccgctaagtcccactgggcaaaaacttgccccacttctacgcatactctggaaacaaattcagccgagcatgaggattgtacttaatcctattagttccctcgcagatcttcctttaaaaaacttctacagatttgttcttccatccatggatgattttagcagtacagatcattctgtacacggacctaaagctttctttgcaaatatgccactgtcaaaaacacttacaatgaacatagatgttccagaaccatggcttgttgaatcagttattgccatccatgatttagacaacattcttttagagaatcttggcgatgtcagaactttgcaggcagtatttgaacttgaagctctcctcttgacaggtcattgcatggaaaaggaccgggaccctccccgtggtctgcagtttatccttggtactaaacaaagaccacacttagtagacacacttgtcatggccaacttgggttactggcagatgaaagtctcccctggtgtatggtacctacaattggctcctggtcgtagtgccgatctgtatgagctacctccgaaactcattgccattgatagcttgagaggcaaactaatgcatattgaagtgcaaaagaagaaaggcaaggagcatgaggacttgctaaatgctgccgatgactaccacttccaggaaaagacggataacaaaggctggaataagaaccttttgaaatgggcttctagtcttatcactggtgatgcttcatcaaaaagtaaagctgataaaaccactgaccgtaaggatgcaagacaaggggaaaccataaatatattctctgttgcttctgggcatctgtatgagcgtttcctcaaaataatgattttgagtgttctaaaaaagacacagaggccagtgaagttttggttcattaagaattatctatctccacagttcaaggatgtcataccgcacatggctcgggaatatgaattcgagtatgagctcgtcacatataaatggccaacatggttacacaagcagaaagagaagcaaaggattatatgggcatataagatcttatttctggatgtcatttttccactttcactgaggaaggtgatttttgttgatgctgatcaaattgtgagagcagacatgggagaattgtatgacatgaacctgaagggtcgcccgcttgcatatactccattctgtgataacaacaaggatatggatggttttcgattttggaagcaaggtttttggaaagatcatctgcgaggaagaccgtaccatatcagtgcgctttatgttgttgatttggccaaatttcggcaaactgcttctggggatactcttcgtgtcttctatgaacaactcagcaaggaccccaatagtctctccaatcttgatcaggatctcccgaattatgcccaacatacggtgcctatattctctcttcctcaagaatggctgtggtgtgaatcttggtgtggaaatgccacaaaagcaagagcaaagaccattgatctatgcaacaatccaatgacaaaggagccaaagcttcagggtgctagaagaatagttccggagtggactggtcttgacagtgaagcacggcagttcactgcacgaatcttgggtgatgatgtcgagcctgcagatgccacacctccgccatcggaggcaccgaagcctgaagatgatcaggatgtgaaagatgagctatgatcgcaagatgtttccaggcttggtcttactgaatgaaagtttggtgactcgacagtcatcagttcagaacacaggcacacagctagtggagcgcagagggatagtttaacgcaggtgcaaatttgtcaaaacactacacctggaatcctagactacgttgattcagttcatccctctctcactctagcaaggaagggaggaggattggaaggagatggccagcaaaaagaccatagggatcaagtagaagaccacaagatgaggattgagaaggaggagccttctctccctagcaagaaagagctagaaaggtatttcaag

SEQ ID NO: 56275 - DNA, 4122 bp, Zea Mays
gaacatgccaggctcaaggcccacgcacagttgcctcaaagtgctgtcctcaagatcctgtcagctcctccaccagcagaatctaattctttccgtgtggacttccggtcttctcatgtgcattaccttaataacttggaggaagatgccatgtatagaagatggagaagcaacatccaggagctcttgatgccggtcttccctggtcagatgcggtacatccgtaaaaaatctgtttccactctgtttatgtgcttgatcctgcttcagcctgtggtgcagagaccattgacatgatggtatctctatatcaagatagtgtccctataaggtttggtatcataatgtattcttcaagattcatcaatgttgttgaaggaagtgatggcactcttacaaataatgatggagaagacacttccattttgataacaaggctttttcttgtacatcaaagaaacatactcaacacagttggcattccaatttctcggcaatatacataaatcaaggaatggtgaagatgactacaatgaagagcttgttgaggctcatcatgttgaaggggcatttgttgattcactattatcaactgctaaatctcatccacaagatgtgctgctaaagttgcaaaaagagaacatgtacaagcaggaagctgaagaaagctctcattttgttcacaagcttgggttgtatagactccagtgttgtctgttgatgaacggacttgtccatgaagcaagtgaggaagcgaccatgaatgctatgaatgatgaacttcctaggattcaagaacaagtttattatgggcatatccagtcccatacagatattttagagaagtttttgtcagaaaatagctacaagcggtacaacccatcaattactggcaagaatgcagagaagaaatttgtttcgctctttgcatcgtaccatcaggacagctttatatttaatgacatgaagtacttacagtctcctggaactacagatgatgcaaaacctgttactcatctacttgccattgatctttcatcaaaagttggaacaaaattgctttatgaggccatactttacctgatggacggatctgatagagctcgtgttggtctgctactttatgtccacactggtggttcatcacctattttacttctgaaagatattttcgatagaactatttcttctttcagctataaagaaaaggtattagtcttcctgcatgggctcttgaaattttatgatgcccaacctttgcccgcctcatctgttgctgatgattggactagaactatgatggaaaaggtctataccttagctgctgaaactgctttgcctgttgatgactataaagcgtggtttaaaagtttctctgctgatacagttctcaaagggatggataagttatctgacttcttatttgggcaattggggcttgtgtttggtagtaatgctgtgatcaccaatggacgggtttttattatgaatgaagggaaatcatttctagccaatgatttaggtctccttgagtctatggagtatgatttgagaacgaaatacatatttgaaataattgaagaggttgagtttgccagtgttgaccctgatgacctaacaaaccaattctacagcgacattgccatgttgatctcatcgtcgatgtctgttcgtgaaaggacatctgaaagagcccattttgagattttacatgcggaacatagtgctatcaaattgaataatgcaaattcaagtattcacattgatgctgtcattgatccgctaagtcccactgggcaaaaacttgccccacttctacgcatactctggaaacaaattcagccgagcatgaggattgtacttaatcctattagttccctcgcagatcttcctttaaaaaacttctacagatttgttcttccatccatggatgattttagcagtacagatcattctgtacacggacctaaagctttctttgcaaatatgccactgtcaaaaacacttacaatgaacatagatgttccagaaccatggcttgttgaatcagttattgccatccatgatttagacaacattcttttagagaatcttggcgatgtcagaactttgcaggcagtatttgaacttgaagctctcctcttgacaggtcattgcatggaaaaggaccgggaccctccccgtggtctgcagtttatccttggtactaaacaaagaccacacttagtagacacacttgtcatggccaacttgggttactggcagatgaaagtctcccctggtgtatggtacctacaattggctcctggtcgtagtgccgatctgtatgagctacctccgaaactcattgccattgatagcttgagaggcaaactaatgcatattgaagtgcaaaagaagaaaggcaaggagcatgaggacttgctaaatgctgccgatgactaccacttccaggaaaagacggataacaaaggctggaataagaaccttttgaaatgggcttctagtcttatcactggtgatgcttcatcaaaaagtaaagctgataaaaccactgaccgtaaggatgcaagacaaggggaaaccataaatatattctctgttgcttctgggcatctgtatgagcgtttcctcaaaataatgattttgagtgttctaaaaaagacacagaggccagtgaagttttggttcattaagaattatctatctccacagttcaaggatgtcataccgcacatggctcgggaatatgaattcgagtatgagctcgtcacatataaatggccaacatggttacacaagcagaaagagaagcaaaggattatatgggcatataagatcttatttctggatgtcatttttccactttcactgaggaaggtgatttttgttgatgctgatcaaattgtgagagcagacatgggagaattgtatgacatgaacctgaagggtcgcccgcttgcatatactccattctgtgataacaacaaggatatggatggttttcgattttggaagcaaggtttttggaaagatcatctgcgaggaagaccgtaccatatcagtgcgctttatgttgttgatttggccaaatttcggcaaactgcttctggggatactcttcgtgtcttctatgaacaactcagcaaggaccccaatagtctctccaatcttgatcaggatctcccgaattatgcccaacatacggtgcctatattctctcttcctcaagaatggctgtggtgtgaatcttggtgtggaaatgccacaaaagcaagagcaaagaccattgatctatgcaacaatccaatgacaaaggagccaaagcttcagggtgctagaagaatagttccggagtggactggtcttgacagtgaagcacggcagttcactgcacgaatcttgggtgatgatgtcgagcctgcagatgccacacctccgccatcggaggcaccgaagcctgaagatgatcaggatgtgaaagatgagctatgatcgcaagatgtttccaggcttggtcttactgaatgaaagtttggtgactcgacagtcatcagttcagaacacaggcacacagctagtggagcgcagagggatagtttaacgcaggtgcaaatttgtcaaaacactacacctggaatcctagactacgttgattcaggtatttcgtttacagtaaggccttgttcgtttgtgtcggattggtgggtcggaatgatttctagccgggttgcttttctaatttatataaactttaattagctggaataattccgggtgcaatccgatgtaaacgaacaaggtctaatagtttcaagacctttaaccaaatcatatggcggggaagctgcgtccagtaataggttaacaaggcagccagctggggtgtagaactctgtctgctctcagctgcatacacatagactgtaatggtcaacaatttaagatctccttgagacattgtaaaatttatcggctgccagtcgaaaggcaacagcgaagctggcagctgaaatgcccgagaattttgtagcactcagcaaacggattttttaaacactcagtaagtcaataatgcctgtcgcatgtaacagcaggctattgtgggcatggcagctaacc

SEQ ID NO: 56276 - DNA, 5677 bp, Zea Mays
cgttctttaaaatccgtgttcaccattctccccctaataaatcacacaggtctccggcgaagtctcctcccgaccgccctccgcatctcgtcgacgacgaaaggaaaacctcacaaatcctctggatgcggggtctagccgcctccgccctgtagcaccagtcggatcgaagaagcacaagcgcttcgggtcggcgcgcacctctccctcatggtggcggcgcgaggggcccgatctgggggctcggttgcggcggcggcgctggtctcggttcttctcgtgggttgcctcgtcgcgggcggccagggggcggagatccgtcgccagaaaaacgtgcaggctgcgctccgggccaagtgggctggcacgccgctgctgctcgaagccagtgaattgctttcgacagaatggaaggatctattttgggattttattgacctctggaaggatctagagaaaggctctgaatgtttaacagcaaaatgctgtgcccagaagattgttgaggatgcccacatactactcaatgaaccgctctcttcaatttttgagttttctcttacccttcgatcagcatcaccaaaattagtgctttaccggcaacttgcaaaggagtcattatcttcgtttcctattgatgattcaccagagaacatttctggtcatggcactggaaaaacttttgatggggctgtggatcctggctcttctggaggaacttgctgctgggtagacactgggaatgttctattgttcaattcagccgatctgcatgaatggcttgggggattgggcaagctagctatggattctactgaacagcctgaactctttgaatttgaccatatatatcgtcgcacaaatattactgctccagttgctatattttatggggctgttgggacaaaatgcttcaaagagctgcatgttcaactagtagaagcatcaaagcagggaaaaatcaggtatgctctgcgtcctgtcctaccatctggatgtgagactacgtccaccttttgtggttcagttggtgctgtagatgcagtcaccttgagtggttatggggtggagcttgccctaaaaaacatggaatacaaagctatggatgacactgctataaagaagggtgttcctctagaagatcctaaaacagaggacctcagtcaagaagtcagagggtttatattttccaagattttggaacgcaagccagagctaaatgctgagataatggccttcagagattatctgttgtcatcggcagtgtctgatacacttgaagtctgggaactcaaagatctgggtcatcagacagcacagcgaatcgttcaagcatcagaccctttacagtcaatgcaggaaatcaatcaaaatttcccaagtatagtttcttcactatcacgaatgaagcttgacgattccatcaaagacgaaattattgcaaatcagcggatggttccacctggcaagtcattgatggctttgaatggtgctttgatcaatatcgaggatcttgatctttacctgttaatggatatggtccatggagaattatccctggctgatcagttcgtccggttaaagttgcctcaaagtgctgtcctcaagatcctgtcagctcctccaccagcagaatctaattctttccgtgtggacttccggtcttctcatgtgcattaccttaataacttggaggaagatgccatgtatagaagatggagaagcaacatccaggagctcttgatgccggtcttccctggtcagatgcggtacatccgtaaaaaatctgtttccactctgtttatgtgcttgatcctgcttcagcctgtggtgcagagaccattgacatgatggtatctctatatcaagatagtgtccctataaggtttggtatcataatgtattcttcaagattcatcaatgttgttgaaggaagtgatggcactcttacaaataatgatggagaagacacttccattttgataacaaggctttttcttgtacatcaaagaaacatactcaacacagttggcattccaatttctcggcaatatacataaatcaaggaatggtgaagatgactacaatgaagagcttgttgaggctcatcatgttgaaggggcatttgttgattcactattatcaactgctaaatctcatccacaagatgtgctgctaaagttgcaaaaagagaacatgtacaagcaggaagctgaagaaagctctcattttgttcacaagcttgggttgtatagactccagtgttgtctgttgatgaacggacttgtccatgaagcaagtgaggaagcgaccatgaatgctatgaatgatgaacttcctaggattcaagaacaagtttattatgggcatatccagtcccatacagatattttagagaagtttttgtcagaaaatagctacaagcggtacaacccatcaattactggcaagaatgcagagaagaaatttgtttcgctctttgcatcgtaccatcaggacagctttatatttaatgacatgaagtacttacagtctcctggaactacagatgatgcaaaacctgttactcatctacttgccattgatctttcatcaaaagttggaacaaaattgctttatgaggccatactttacctgatggacggatctgatagagctcgtgttggtctgctactttatgtccacactggtggttcatcacctattttacttctgaaagatattttcgatagaactatttcttctttcagctataaagaaaaggtattagtcttcctgcatgggctcttgaaattttatgatgcccaacctttgcccgcctcatctgttgctgatgattggactagaactatgatggaaaaggtctataccttagctgctgaaactgctttgcctgttgatgactataaagcgtggtttaaaagtttctctgctgatacagttctcaaagggatggataagttatctgacttcttatttgggcaattggggcttgtgtttggtagtaatgctgtgatcaccaatggacgggtttttattatgaatgaagggaaatcatttctagccaatgatttaggtctccttgagtctatggagtatgatttgagaacgaaatacatatttgaaataattgaagaggttgagtttgccagtgttgaccctgatgacctaacaaaccaattctacagcgacattgccatgttgatctcatcgtcgatgtctgttcgtgaaaggacatctgaaagagcccattttgagattttacatgcggaacatagtgctatcaaattgaataatgcaaattcaagtattcacattgatgctgtcattgatccgctaagtcccactgggcaaaaacttgccccacttctacgcatactctggaaacaaattcagccgagcatgaggattgtacttaatcctattagttccctcgcagatcttcctttaaaaaacttctacagatttgttcttccatccatggatgattttagcagtacagatcattctgtacacggacctaaagctttctttgcaaatatgccactgtcaaaaacacttacaatgaacatagatgttccagaaccatggcttgttgaatcagttattgccatccatgatttagacaacattcttttagagaatcttggcgatgtcagaactttgcaggcagtatttgaacttgaagctctcctcttgacagggtcattgcatggaaaaggaccgggaccctccccgtggtctgcagtttatccttggtactaaacaaagaccacacttagtagacacacttgtcatggccaacttgggttactggcagatgaaagtctcccctggtgtatggtacctacaattggctcctggtcgtagtgccgatctgtatgagctacctccgaaactcattgccattgatagcttgagaggcaaactaatgcatattgaagtgcaaaagaagaaaggcaaggagcatgaggacttgctaaatgctgccgatgactaccacttccaggaaaagacggataacaaaggctggaataagaaccttttgaaatgggcttctagtcttatcactggtgatgcttcatcaaaaagtaaagctgataaaaccactgaccgtaaggatgcaagacaaggggaaaccataaatatattctctgttgcttctgggcatctgtatgagcgtttcctcaaaataatgattttgagtgttctaaaaaagacacagaggccagtgaagttttggttcattaagaattatctatctccacagttcaaggatgtcataccgcacatggctcgggaatatgaattcgagtatgagctcgtcacatataaatggccaacatggttacacaagcagaaagagaagcaaaggattatatgggcatataagatcttatttctggatgtcatttttccactttcactgaggaaggtgatttttgttgatgctgatcaaattgtgagagcagacatgggagaattgtatgacatgaacctgaagggtcgcccgcttgcatatactccattctgtgataacaacaaggatatggatggttttcgattttggaagcaaggtttttggaaagatcatctgcgaggaagaccgtaccatatcagtgcgctttatgttgttgatttggccaaatttcggcaaactgcttctggggatactcttcgtgtcttctatgaacaactcagcaaggaccccaatagtctctccaatcttgatcaggatctcccgaattatgcccaacatacggtgcctatattctctcttcctcaagaatggctgtggtgtgaatcttggtgtggaaatgccacaaaagcaagagcaaagaccattgatctatgcaacaatccaatgacaaaggagccaaagcttcagggtgctagaagaatagttccggagtggactggtcttgacagtgaagcacggcagttcactgcacgaatcttgggtgatgatgtcgagcctgcagatgccacacctccgccatcggaggcaccgaagcctgaagatgatcaggatgtgaaagatgagctatgatcgcaagatgtttccaggcttggtcttactgaatgaaagtttggtgactcgacagtcatcagttcagaacacaggcacacagctagtggagcgcagagggatagtttaacgcaggtgcaaatttgtcaaaacactacacctggaatcctagactacgttgattcaggtatttcgtttacagtaaggccttgttcgtttgtgtcggattggtgggtcggaatgatttctagccgggttgcttttctaatttatataaactttaattagctggaataattccgggtgcaatccgatgtaaacgaacaaggtctaatagtttcaagacctttaaccaaatcatatggcggggaagctgcgtccagtaataggttaacaaggcagccagctggggtgtagaactctgtctgctctcagctgcatacacatagactgtaatggtcaacaatttaagatctccttgagacattgtaaaatttatcggctgccagtcgaaaggcaacagcgaagctggcagctgaaatgcccgagaattttgtagcactcagcaaacggattttttaaacactcagtaagtcaataatgcctgtcgcatgtaacagcaggctattgtgggcatggcagctaacc

SEQ ID NO: 56277 - DNA, 5860 bp, Zea Mays
agacaatccaacggcttgccctcgttctttaaaatccgtgttcaccattctccccctaataaatcacacaggtctccggcgaagtctcctcccgaccgccctccgcatctcgtcgacgacgaaaggaaaacctcacaaatcctctggatgcggggtctagccgcctccgccctgtagcaccagtcggatcgaagaagcacaagcgcttcgggtcggcgcgcacctctccctcatggtggcggcgcgaggggcccgatctgggggctcggttgcggcggcggcgctggtctcggttcttctcgtgggttgcctcgtcgcgggcggccagggggcggagatccgtcgccagaaaaacgtgcaggctgcgctccgggccaagtgggctggcacgccgctgctgctcgaagccagctgtaggcaacgttggctgctagaggacctggcgggcgacgggccgacgtcattggcgaccgactctgaatgtgggagagcggagggggtgctcgggcactggaagagggaggcgggtgttggaggacaccgtcctggcggcgctggaggtggaggagggggtggaggagaggagggagaatggaaggatctattttgggattttattgacctctggaaggatctagagaaaggctctgaatgtttaacagcaaaatgctgtgcccagaagattgttgaggatgcccacatactactcaatgaaccgctctcttcaatttttgagttttctcttacccttcgatcagcatcaccaaaattagtgctttaccggcaacttgcaaaggagtcattatcttcgtttcctattgatgattcaccagagaacatttctggtcatggcactggaaaaacttttgatggggctgtggatcctggctcttctggaggaacttgctgctgggtagacactgggaatgttctattgttcaattcagccgatctgcatgaatggcttgggggattgggcaagctagctatggattctactgaacagcctgaactctttgaatttgaccatatatatcgtcgcacaaatattactgctccagttgctatattttatggggctgttgggacaaaatgcttcaaagagctgcatgttcaactagtagaagcatcaaagcagggaaaaatcaggtatgctctgcgtcctgtcctaccatctggatgtgagactacgtccaccttttgtggttcagttggtgctgtagatgcagtcaccttgagtggttatggggtggagcttgccctaaaaaacatggaatacaaagctatggatgacactgctataaagaagggtgttcctctagaagatcctaaaacagaggacctcagtcaagaagtcagagggtttatattttccaagattttggaacgcaagccagagctaaatgctgagataatggccttcagagattatctgttgtcatcggcagtgtctgatacacttgaagtctgggaactcaaagatctgggtcatcagacagcacagcgaatcgttcaagcatcagaccctttacagtcaatgcaggaaatcaatcaaaatttcccaagtatagtttcttcactatcacgaatgaagcttgacgattccatcaaagacgaaattattgcaaatcagcggatggttccacctggcaagtcattgatggctttgaatggtgctttgatcaatatcgaggatcttgatctttacctgttaatggatatggtccatggagaattatccctggctgatcagttcgtccggttaaagttgcctcaaagtgctgtcctcaagatcctgtcagctcctccaccagcagaatctaattctttccgtgtggacttccggtcttctcatgtgcattaccttaataacttggaggaagatgccatgtatagaagatggagaagcaacatccaggagctcttgatgccggtcttccctggtcagatgcggtacatccgtaaaaaatctgtttccactctgtttatgtgcttgatcctgcttcagcctgtggtgcagagaccattgacatgatggtatctctatatcaagatagtgtccctataaggtttggtatcataatgtattcttcaagattcatcaatgttgttgaaggaagtgatggcactcttacaaataatgatggagaagacacttccattttgataacaaggctttttcttgtacatcaaagaaacatactcaacacagttggcattccaatttctcggcaatatacataaatcaaggaatggtgaagatgactacaatgaagagcttgttgaggctcatcatgttgaaggggcatttgttgattcactattatcaactgctaaatctcatccacaagatgtgctgctaaagttgcaaaaagagaacatgtacaagcaggaagctgaagaaagctctcattttgttcacaagcttgggttgtatagactccagtgttgtctgttgatgaacggacttgtccatgaagcaagtgaggaagcgaccatgaatgctatgaatgatgaacttcctaggattcaagaacaagtttattatgggcatatccagtcccatacagatattttagagaagtttttgtcagaaaatagctacaagcggtacaacccatcaattactggcaagaatgcagagaagaaatttgtttcgctctttgcatcgtaccatcaggacagctttatatttaatgacatgaagtacttacagtctcctggaactacagatgatgcaaaacctgttactcatctacttgccattgatctttcatcaaaagttggaacaaaattgctttatgaggccatactttacctgatggacggatctgatagagctcgtgttggtctgctactttatgtccacactggtggttcatcacctattttacttctgaaagatattttcgatagaactatttcttctttcagctataaagaaaaggtattagtcttcctgcatgggctcttgaaattttatgatgcccaacctttgcccgcctcatctgttgctgatgattggactagaactatgatggaaaaggtctataccttagctgctgaaactgctttgcctgttgatgactataaagcgtggtttaaaagtttctctgctgatacagttctcaaagggatggataagttatctgacttcttatttgggcaattggggcttgtgtttggtagtaatgctgtgatcaccaatggacgggtttttattatgaatgaagggaaatcatttctagccaatgatttaggtctccttgagtctatggagtatgatttgagaacgaaatacatatttgaaataattgaagaggttgagtttgccagtgttgaccctgatgacctaacaaaccaattctacagcgacattgccatgttgatctcatcgtcgatgtctgttcgtgaaaggacatctgaaagagcccattttgagattttacatgcggaacatagtgctatcaaattgaataatgcaaattcaagtattcacattgatgctgtcattgatccgctaagtcccactgggcaaaaacttgccccacttctacgcatactctggaaacaaattcagccgagcatgaggattgtacttaatcctattagttccctcgcagatcttcctttaaaaaacttctacagatttgttcttccatccatggatgattttagcagtacagatcattctgtacacggacctaaagctttctttgcaaatatgccactgtcaaaaacacttacaatgaacatagatgttccagaaccatggcttgttgaatcagttattgccatccatgatttagacaacattcttttagagaatcttggcgatgtcagaactttgcaggcagtatttgaacttgaagctctcctcttgacaggtcattgcatggaaaaggaccgggaccctccccgtggtctgcagtttatccttggtactaaacaaagaccacacttagtagacacacttgtcatggccaacttgggttactggcagatgaaagtctcccctggtgtatggtacctacaattggctcctggtcgtagtgccgatctgtatgagctacctccgaaactcattgccattgatagcttgagaggcaaactaatgcatattgaagtgcaaaagaagaaaggcaaggagcatgaggacttgctaaatgctgccgatgactaccacttccaggaaaagacggataacaaaggctggaataagaaccttttgaaatgggcttctagtcttatcactggtgatgcttcatcaaaaagtaaagctgataaaaccactgaccgtaaggatgcaagacaaggggaaaccataaatatattctctgttgcttctgggcatctgtatgagcgtttcctcaaaataatgattttgagtgttctaaaaaagacacagaggccagtgaagttttggttcattaagaattatctatctccacagttcaaggatgtcataccgcacatggctcgggaatatgaattcgagtatgagctcgtcacatataaatggccaacatggttacacaagcagaaagagaagcaaaggattatatgggcatataagatcttatttctggatgtcatttttccactttcactgaggaaggtgatttttgttgatgctgatcaaattgtgagagcagacatgggagaattgtatgacatgaacctgaagggtcgcccgcttgcatatactccattctgtgataacaacaaggatatggatggttttcgattttggaagcaaggtttttggaaagatcatctgcgaggaagaccgtaccatatcagtgcgctttatgttgttgatttggccaaatttcggcaaactgcttctggggatactcttcgtgtcttctatgaacaactcagcaaggaccccaatagtctctccaatcttgatcaggatctcccgaattatgcccaacatacggtgcctatattctctcttcctcaagaatggctgtggtgtgaatcttggtgtggaaatgccacaaaagcaagagcaaagaccattgatctatgcaacaatccaatgacaaaggagccaaagcttcagggtgctagaagaatagttccggagtggactggtcttgacagtgaagcacggcagttcactgcacgaatcttgggtgatgatgtcgagcctgcagatgccacacctccgccatcggaggcaccgaagcctgaagatgatcaggatgtgaaagatgagctatgatcgcaagatgtttccaggcttggtcttactgaatgaaagtttggtgactcgacagtcatcagttcagaacacaggcacacagctagtggagcgcagagggatagtttaacgcaggtgcaaatttgtcaaaacactacacctggaatcctagactacgttgattcaggtatttcgtttacagtaaggccttgttcgtttgtgtcggattggtgggtcggaatgatttctagccgggttgcttttctaatttatataaactttaattagctggaataattccgggtgcaatccgatgtaaacgaacaaggtctaatagtttcaagacctttaaccaaatcatatggcggggaagctgcgtccagtaataggttaacaaggcagccagctggggtgtagaactctgtctgctctcagctgcatacacatagactgtaatggtcaacaatttaagatctccttgagacattgtaaaatttatcggctgccagtcgaaaggcaacagcgaagctggcagctgaaatgcccgagaattttgtagcactcagcaaacggattttttaaacactcagtaagtcaataatgcctgtcgcatgtaacagcaggctattgtgggcatggcagctaacc

SEQ ID NO: 56278 - DNA, 5791 bp, Zea Mays
ctttatttatgaaaaaaaacttgtgaaggaaaaaaggccaacttccatccaaatatgaaacctgaaaactgataaaaataatcggccgttcagagacaatccaacggcttgccctcgttctttaaaatccgtgttcaccattctccccctaataaatcacacaggtctccggcgaagtctcctcccgaccgccctccgcatctcgtcgacgacgaaaggaaaacctcacaaatcctctggatgcggggtctagccgcctccgccctgtagcaccagtcggatcgaagaagcacaagcgcttcgggtcggcgcgcacctctccctcatggtggcggcgcgaggggcccgatctgggggctcggttgcggcggcggcgctggtctcggttcttctcgtgggttgcctcgtcgcgggcggccagggggcggagatccgtcgccagaaaaacgtgcaggctgcgctccgggccaagtgggctggcacgccgctgctgctcgaagccagtgaattgctttcgacagaatggaaggatctattttgggattttattgacctctggaaggatctagagaaaggctctgaatgtttaacagcaaaatgctgtgcccagaagattgttgaggatgcccacatactactcaatgaaccgctctcttcaatttttgagttttctcttacccttcgatcagcatcaccaaaattagtgctttaccggcaacttgcaaaggagtcattatcttcgtttcctattgatgattcaccagagaacatttctggtcatggcactggaaaaacttttgatggggctgtggatcctggctcttctggaggaacttgctgctgggtagacactgggaatgttctattgttcaattcagccgatctgcatgaatggcttgggggattgggcaagctagctatggattctactgaacagcctgaactctttgaatttgaccatatatatcgtcgcacaaatattactgctccagttgctatattttatggggctgttgggacaaaatgcttcaaagagctgcatgttcaactagtagaagcatcaaagcagggaaaaatcaggtatgctctgcgtcctgtcctaccatctggatgtgagactacgtccaccttttgtggttcagttggtgctgtagatgcagtcaccttgagtggttatggggtggagcttgccctaaaaaacatggaatacaaagctatggatgacactgctataaagaagggtgttcctctagaagatcctaaaacagaggacctcagtcaagaagtcagagggtttatattttccaagattttggaacgcaagccagagctaaatgctgagataatggccttcagagattatctgttgtcatcggcagtgtctgatacacttgaagtctgggaactcaaagatctgggtcatcagacagcacagcgaatcgttcaagcatcagaccctttacagtcaatgcaggaaatcaatcaaaatttcccaagtatagtttcttcactatcacgaatgaagcttgacgattccatcaaagacgaaattattgcaaatcagcggatggttccacctggcaagtcattgatggctttgaatggtgctttgatcaatatcgaggatcttgatctttacctgttaatggatatggtccatggagaattatccctggctgatcagttcgtccggttaaagttgcctcaaagtgctgtcctcaagatcctgtcagctcctccaccagcagaatctaattctttccgtgtggacttccggtcttctcatgtgcattaccttaataacttggaggaagatgccatgtatagaagatggagaagcaacatccaggagctcttgatgccggtcttccctggtcagatgcggtacatccgtaaaaaatctgtttccactctgtttatgtgcttgatcctgcttcagcctgtggtgcagagaccattgacatgatggtatctctatatcaagatagtgtccctataaggtttggtatcataatgtattcttcaagattcatcaatgttgttgaaggaagtgatggcactcttacaaataatgatggagaagacacttccattttgataacaaggctttttcttgtacatcaaagaaacatactcaacacagttggcattccaatttctcggcaatatacataaatcaaggaatggtgaagatgactacaatgaagagcttgttgaggctcatcatgttgaaggggcatttgttgattcactattatcaactgctaaatctcatccacaagatgtgctgctaaagttgcaaaaagagaacatgtacaagcaggaagctgaagaaagctctcattttgttcacaagcttgggttgtatagactccagtgttgtctgttgatgaacggacttgtccatgaagcaagtgaggaagcgaccatgaatgctatgaatgatgaacttcctaggattcaagaacaagtttattatgggcatatccagtcccatacagatattttagagaagtttttgtcagaaaatagctacaagcggtacaacccatcaattactggcaagaatgcagagaagaaatttgtttcgctctttgcatcgtaccatcaggacagctttatatttaatgacatgaagtacttacagtctcctggaactacagatgatgcaaaacctgttactcatctacttgccattgatctttcatcaaaagttggaacaaaattgctttatgaggccatactttacctgatggacggatctgatagagctcgtgttggtctgctactttatgtccacactggtggttcatcacctattttacttctgaaagatattttcgatagaactatttcttctttcagctataaagaaaaggtattagtcttcctgcatgggctcttgaaattttatgatgcccaacctttgcccgcctcatctgttgctgatgattggactagaactatgatggaaaaggtctataccttagctgctgaaactgctttgcctgttgatgactataaagcgtggtttaaaagtttctctgctgatacagttctcaaagggatggataagttatctgacttcttatttgggcaattggggcttgtgtttggtagtaatgctgtgatcaccaatggacgggtttttattatgaatgaagggaaatcatttctagccaatgatttaggtctccttgagtctatggagtatgatttgagaacgaaatacatatttgaaataattgaagaggttgagtttgccagtgttgaccctgatgacctaacaaaccaattctacagcgacattgccatgttgatctcatcgtcgatgtctgttcgtgaaaggacatctgaaagagcccattttgagattttacatgcggaacatagtgctatcaaattgaataatgcaaattcaagtattcacattgatgctgtcattgatccgctaagtcccactgggcaaaaacttgccccacttctacgcatactctggaaacaaattcagccgagcatgaggattgtacttaatcctattagttccctcgcagatcttcctttaaaaaacttctacagatttgttcttccatccatggatgattttagcagtacagatcattctgtacacggacctaaagctttctttgcaaatatgccactgtcaaaaacacttacaatgaacatagatgttccagaaccatggcttgttgaatcagttattgccatccatgatttagacaacattcttttagagaatcttggcgatgtcagaactttgcaggcagtatttgaacttgaagctctcctcttgacaggtcattgcatggaaaaggaccgggaccctccccgtggtctgcagtttatccttggtactaaacaaagaccacacttagtagacacacttgtcatggccaacttgggttactggcagatgaaagtctcccctggtgtatggtacctacaattggctcctggtcgtagtgccgatctgtatgagctacctccgaaactcattgccattgatagcttgagaggcaaactaatgcatattgaagtgcaaaagaagaaaggcaaggagcatgaggacttgctaaatgctgccgatgactaccacttccaggaaaagacggataacaaaggctggaataagaaccttttgaaatgggcttctagtcttatcactggtgatgcttcatcaaaaagtaaagctgataaaaccactgaccgtaaggatgcaagacaaggggaaaccataaatatattctctgttgcttctgggcatctgtatgagcgtttcctcaaaataatgattttgagtgttctaaaaaagacacagaggccagtgaagttttggttcattaagaattatctatctccacagttcaaggatgtcataccgcacatggctcgggaatatgaattcgagtatgagctcgtcacatataaatggccaacatggttacacaagcagaaagagaagcaaaggattatatgggcatataagatcttatttctggatgtcatttttccactttcactgaggaaggtgatttttgttgatgctgatcaaattgtgagagcagacatgggagaattgtatgacatgaacctgaagggtcgcccgcttgcatatactccattctgtgataacaacaaggatatggatggttttcgattttggaagcaaggtttttggaaagatcatctgcgaggaagaccgtaccatatcagtgcgctttatgttgttgatttggccaaatttcggcaaactgcttctggggatactcttcgtgtcttctatgaacaactcagcaaggaccccaatagtctctccaatcttgatcaggatctcccgaattatgcccaacatacggtgcctatattctctcttcctcaagaatggctgtggtgtgaatcttggtgtggaaatgccacaaaagcaagagcaaagaccattgatctatgcaacaatccaatgacaaaggagccaaagcttcagggtgctagaagaatagttccggagtggactggtcttgacagtgaagcacggcagttcactgcacgaatcttgggtgatgatgtcgagcctgcagatgccacacctccgccatcggaggcaccgaagcctgaagatgatcaggatgtgaaagatgagctatgatcgcaagatgtttccaggcttggtcttactgaatgaaagtttggtgactcgacagtcatcagttcagaacacaggcacacagctagtggagcgcagagggatagtttaacgcaggtgcaaatttgtcaaaacactacacctggaatcctagactacgttgattcaggtatttcgtttacagtaaggccttgttcgtttgtgtcggattggtgggtcggaatgatttctagccgggttgcttttctaatttatataaactttaattagctggaataattccgggtgcaatccgatgtaaacgaacaaggtctaatagtttcaagacctttaaccaaatcatatggcggggaagctgcgtccagtaataggttaacaaggcagccagctggggtgtagaactctgtctgctctcagctgcatacacatagactgtaatggtcaacaatttaagatctccttgagacattgtaaaatttatcggctgccagtcgaaaggcaacagcgaagctggcagctgaaatgcccgagaattttgtagcactcagcaaacggattttttaaacactcagtaagtcaataatgcctgtcgcatgtaacagcaggctattgtgggcatggcagctaacc

SEQ ID NO: 56279 - DNA, 1537 bp, Zea Mays
gaccgccctccgcatctcgtcgacgacgaaaggaaaacctcacaaatcctctggatgcggggtctagccgcctccgccctgtagcaccagtcggatcgaagaagcacaagcgcttcgggtcggcgcgcacctctccctcatggtggcggcgcgaggggcccgatctgggggctcggttgcggcggcggcgctggtctcggttcttctcgtgggttgcctcgtcgcgggcggccagggggcggagatccgtcgccagaaaaacgtgcaggctgcgctccgggccaagtgggctggcacgccgctgctgctcgaagccagtgaattgctttcgacagaatggaaggatctattttgggattttattgacctctggaaggatctagagaaaggctctgaatgtttaacagcaaaatgctgtgcccagaagattgttgaggatgcccacatactactcaatgaaccgctctcttcaatttttgagttttctcttacccttcgatcagcatcaccaaaattagtgctttaccggcaacttgcaaaggagtcattatcttcgtttcctattgatgattcaccagagaacatttctggtcatggcactggaaaaacttttgatggggctgtggatcctggctcttctggaggaacttgctgctgggtagacactgggaatgttctattgttcaattcagccgatctgcatgaatggcttgggggattgggcaagctagctatggattctactgaacagcctgaactctttgaatttgaccatatatatcgtcgcacaaatattactgctccagttgctatattttatggggctgttgggacaaaatgcttcaaagagctgcatgttcaactagtagaagcatcaaagcagggaaaaatcaggtatgctctgcgtcctgtcctaccatctggatgtgagactacgtccaccttttgtggttcagttggtgctgtagatgcagtcaccttgagtggttatggggtggagcttgccctaaaaaacatggaatacaaagctatggatgacactgctataaagaagggtgttcctctagaagatcctaaaacagaggacctcagtcaagaagtcagagggtttatattttccaagattttggaacgcaagccagagctaaatgctgagataatggccttcagagattatctgttgtcatcggcagtgtctgatacacttgaagtctgggaactcaaagatctgggtcatcagacagcacagcgaatcgttcaagcatcagaccctttacagtcaatgcaggaaatcaatcaaaatttcccaagtatagtttcttcactatcacgaatgaagcttgacgattccatcaaagacgaaattattgcaaatcagcggatggttccacctggcaagtcattgatggctttgaatggtgctttgatcaatatcgaggatcttgatctttacctgttaatggatatggtccatggagaattatccctggctgatcagttcgtccggttaaaggactacagtacatcttatttataa

SEQ ID NO: 56280 - DNA, 489 bp, Zea Mays
cgccttctcagtgatgcacatcggtatattttgcgatgcctgagcaaccatggaaccgtctcacattgtactgtactaacagctatttcagagattggacactcagcatatgttgattctccactcgggccagatgcgtttcgggaatatgaaaccttacttattcaggaccatgatgagcttcttaagaagtctgagaatttagacagacataaagaaagcattcataaagaggcgagtgattttacctctgacgttgataattattctaagtggggttctggggtgcattatggctctaattctgaattcagcccaacgaaaagggatttttttgatgacgaaatgggccaggtagaagcaagagggagaagactgtttgtagctgtgcgtcactttccgatgattttctctcctatttcctcaagggtttttgttttgccctctgaaggcataattgctgactcaagcctgtcgaatcatcatgag

SEQ ID NO: 56281 - DNA, 3003 bp, Zea Mays
ctttttgtggaggcacaacatccttttcagaacagccacggtactgttctcagatccctcatgcgttcttgctccaaacttgcatgttgcagcacagggactctgcggattcctgagagcccaccaccgccccgctttgggggcgccggcgccctgatgacagaattgcaaaaagcaaagtgttctgatcatgggcccgtcgcggacctgcaatcctgatcaaattgcaacgtcaggctgcagctacttgttgttgttagtatttggtttccctgaggtcatcgctcctttattcttcttttttcttctggatggtctgagggtagtcagcaatgactagttcagattaatgcatctaattcggtggataatacaagatcagtctgaccatgggctggctgcttatggcaacacgactgattgttgtagtggtagtttctcttcacaaaccatgttgcttagttatgaatttcagaacggctgatttctggcttccaagtccgaaactgcggcgtatgatcacggtttgtgaccagccatgacagcacttcaaatatagagtatttctgtatgaccaaaaaaacatgtgctatatgcttgaccacaatgaagcctggtcagggccacgctctcttcacagcagagtgctcgcacaccttccacttccactgtatttcagcaaacgttaagcacgggagcagcagctgcccggtatgccgtatcaaatggaaggagctcccgttccgaggtcccttgcctgctgaattgccccaaggaaatgcgaggatcaatccagttcatgggtaccagaatgggggccatatgaccataccgcggccacttccacttcctcgcgcacgctcttttggccggcttcatcatctggccacgctgctgcctgacgctgaccctggcactttcaacgacgacgaacccttggatttgtcgtgcgaagaggctaacggcactcagcagggctgtttgagaacggtagagataaaagcatatccagagttcacccaagtgcctgaaaatacatcagaaagaaacttcactgttctagttcacctcaaggcaccgcctgctcagcaccttctgcagtcatccagcgatctcggcgacggcaacggagtaagcacgactcgtgcccctgttgatctcatcacggttcttgatgtcagtggaagtatggctggtaccaagctcgcgttgttgaagagggctatggggtttgtcatccagaaccttgggtcctctgaccggctctccgtcatcgccttctcgtcgtccgcacgcaggctcttcccgctccgtaggatgaccgagtctggccggcagcagagcttgctggctgttaactcactgacggcaaacggagggaccaatatcgcagagggcctcaggaagggctccaaggtgatcgaagagcgtcagtcgaagaatccagtgtgcagcatcatccttctatcagatggccaggacacttacacggtctcgccgaccgctggtgtacacaaaggagcgacagagtattgcgcgctcttgccatccacgaccacgaatggcagccagcaggtgcccgttcacgtcttcggattcggcgccgaccatgactcggtctcgctgcactccatctcgcagacttctggcgggaccttctcgttcatcgagacagaggccaccatccaagacgcgttcgcgcagtgcattggcgggcttctgagcgtggtcgcgcagggtctgcatgtgaaggtcgagagcctccaccctgacgtgcacttcggctccatcaggtcaggcagctactctagcagagtctcggatgacagcaggaatggctccgtggacgttggggacctgtacgctgaggaggagcgggattttctcgtgtctgtgaacgttccgccaggctgtggcgagacggcgctcctcaaggttggctgcgtctacaaggacccgctgatgaaggagacggtgaacatgtccggcgtgcaggtgaagatctccaggccagcgttcgtctcggcgcagagcgtgtcggtcgaggtggaccgccagaagaaccgtctccacgccgccgaggtgatggccgaggcgaggttgtccgcggagcgcggtgacctggccaacgcggtctcgctgctcgaggactgccggaggatgatcacggggtcggcgtcgggacagtccggtgaccgtctgtgccaggcgctggacgcggagctgaaggagatgcaggaccggatggccagccggcagaggtacgaggcgtccggccgggcgtatgtgctctcgggcctgagctcccactcgtggcagcgggcgaccgcgcgcggagactcgacggacagcgcgagcctggtccaggcctaccagacctcgtccatggtggacatgctgctgcgctcgcagacgatgagccgcccgtcgacccctcgaccagctccgcagatcaggcacgcgaagtcgttccccgcacgcccgcagccaaggtaaactgcatgcagctgggtgttgccgccgagaaggatttttgtggcgggaggacggcaccagggtatagtttgtgtgggtataagaggggatgtaggtgtaaatttggtgtggggtggtggaggtaaatggtgagaggtatgatattttataattgggggtaggggggctggtatacgtcctgggggaactgggcaggatggtggcctatttatttttgttttgttttttaatatttggtggtgacttggtatactctagtattgtactagctcctttgtgtggtgatgtacataagggaagggtatacacttggactctttgaggagggatggatacctgatcctggtccttgtccttgcaaggtttgtttcctcaacctagaaatggaagaaatggaaaaaggtttgctgccttttactgcaaatggaattaatgatgatcttgggtgcgttttcttgtggatatatcacgtggcatctcctcttggttcatatggtttgcatcact

SEQ ID NO: 56282 - DNA, 2794 bp, Zea Mays
ccctagtccaccgccaccgccaccgccatactcttctctggccctcacccattcatcattcacttttttctcccttttctcctccatagcctgccctctcagcctcacttcacttctttttgtggaggcacaacatccttttcagaacagccacggtactgttctcagatccctcatgcgttcttgctccaaacttgcatgttgcagcacagggactctgcggattcctgagagcccaccaccgccccgctttgggggcgccggcgccctgatgacagaattgcaaaaagcaaagtgttctgatcatgggcccgtcgcggacctgcaatcctgatcaaattgcaacgtcaggctgcagctacttgttgttaaaacatgtgctatatgcttgaccacaatgaagcctggtcagggccacgctctcttcacagcagagtgctcgcacaccttccacttccactgtatttcagcaaacgttaagcacgggagcagcagctgcccggtatgccgtatcaaatggaaggagctcccgttccgaggtcccttgcctgctgaattgccccaaggaaatgcgaggatcaatccagttcatgggtaccagaatgggggccatatgaccataccgcggccacttccacttcctcgcgcacgctcttttggccggcttcatcatctggccacgctgctgcctgacgctgaccctggcactttcaacgacgacgaacccttggatttgtcgtgcgaagaggctaacggcactcagcagggctgtttgagaacggtagagataaaagcatatccagagttcacccaagtgcctgaaaatacatcagaaagaaacttcactgttctagttcacctcaaggcaccgcctgctcagcaccttctgcagtcatccagcgatctcggcgacggcaacggagtaagcacgactcgtgcccctgttgatctcatcacggttcttgatgtcagtggaagtatggctggtaccaagctcgcgttgttgaagagggctatggggtttgtcatccagaaccttgggtcctctgaccggctctccgtcatcgccttctcgtcgtccgcacgcaggctcttcccgctccgtaggatgaccgagtctggccggcagcagagcttgctggctgttaactcactgacggcaaacggagggaccaatatcgcagagggcctcaggaagggctccaaggtgatcgaagagcgtcagtcgaagaatccagtgtgcagcatcatccttctatcagatggccaggacacttacacggtctcgccgaccgctggtgtacacaaaggagcgacagagtattgcgcgctcttgccatccacgaccacgaatggcagccagcaggtgcccgttcacgtcttcggattcggcgccgaccatgactcggtctcgctgcactccatctcgcagacttctggcgggaccttctcgttcatcgagacagaggccaccatccaagacgcgttcgcgcagtgcattggcgggcttctgagcgtggtcgcgcagggtctgcatgtgaaggtcgagagcctccaccctgacgtgcacttcggctccatcaggtcaggcagctactctagcagagtctcggatgacagcaggaatggctccgtggacgttggggacctgtacgctgaggaggagcgggattttctcgtgtctgtgaacgttccgccaggctgtggcgagacggcgctcctcaaggttggctgcgtctacaaggacccgctgatgaaggagacggtgaacatgtccggcgtgcaggtgaagatctccaggccagcgttcgtctcggcgcagagcgtgtcggtcgaggtggaccgccagaagaaccgtctccacgccgccgaggtgatggccgaggcgaggttgtccgcggagcgcggtgacctggccaacgcggtctcgctgctcgaggactgccggaggatgatcacggggtcggcgtcgggacagtccggtgaccgtctgtgccaggcgctggacgcggagctgaaggagatgcaggaccggatggccagccggcagaggtacgaggcgtccggccgggcgtatgtgctctcgggcctgagctcccactcgtggcagcgggcgaccgcgcgcggagactcgacggacagcgcgagcctggtccaggcctaccagacctcgtccatggtggacatgctgctgcgctcgcagacgatgagccgcccgtcgacccctcgaccagctccgcagatcaggcacgcgaagtcgttccccgcacgcccgcagccaaggtaaactgcatgcagctgggtgttgccgccgagaaggatttttgtggcgggaggacggcaccagggtatagtttgtgtgggtataagaggggatgtaggtgtaaatttggtgtggggtggtggaggtaaatggtgagaggtatgatattttataattgggggtaggggggctggtatacgtcctgggggaactgggcaggatggtggcctatttatttttgttttgttttttaatatttggtggtgacttggtatactctagtattgtactagctcctttgtgtggtgatgtacataagggaagggtatacacttggactctttgaggagggatggatacctgatcctggtccttgtccttgcaaggtttgtttcctcaacctagaaatggaagaaatggaaaaaggtttgctgccttttactgcaaatggaattaatgatgatcttgggtgcgttttcttgtggatatatcacgtggcatctcctcttggttcatatggtttgcatcact

SEQ ID NO: 56283 - DNA, 3464 bp, Zea Mays
tcctgttctgagccgagctggacagttcactgctcaacctcagcggccgccactgccttgtcaatactatatacgtagtacatacgcacagggagacccacccagtggtctgtgagctgcctgagacagagagagagagagagagtctctgttcactcctcgctggctcgctcgccatcattcagctcttccccaaccttttccttctccccgccatagataggagctcgctttggtgctgttgctgcttttcctctttgttaaaaaaggctgctcactccgtcgtctcctgtcatccccctttctctcctctcgttgcactggcttggtttggtttggtttggtttggctgcgctgcgaaggtcaaatagccgtccatccataccatacggcatacgcctctctccctttctcttccctcttttctttaacctccctttcttgattttccaagctgctcgcatggccatggcctccgcggcggcgcctcctcctcctcctcctgccagccaccagaccgggcaaaagcgccgccaaatctgcctctgacctctccaccaaatacccaaccagcacccgacaacccgccaccttctctctctctctctctctctctctctctctctctctctctctctctctctctctctctctctctctctctctctctctctctctctctctctctctctcttctcacaaacacaagaagcttgctcagcttagtcagctcagcgcctcagcctcgtcttaaagctagcaccagtaggcgacgctgggtgggagccgagctgcgagcctgcgactgcgagggcataatggagagcagatggcggagggccaagatgtcgctggggctcaacctctgcgtctacgtgccccggacgctggaaggcgacgacgccgcctcgcccagcaccgcctcctccacggcggcgctcgtgtcgccggtggcctcctcctcgtccgccgcgacgagcaccgacaccacccccacggctgccgcgagcaacggcaaggccaacggcgccgccgccgccgccgccgcgctcatgcccaccaccccgacgccgacgtccgccgggctccgcctctccaaatccggcagcaaatccttcaagcacagggactctgcggattcctgagagcccaccaccgccccgctttgggggcgccggcgccctgatgacagaattgcaaaaagcaaagtgttctgatcatgggcccgtcgcggacctgcaatcctgatcaaattgcaacgtcaggctgcagctacttgttgttaaaacatgtgctatatgcttgaccacaatgaagcctggtcagggccacgctctcttcacagcagagtgctcgcacaccttccacttccactgtatttcagcaaacgttaagcacgggagcagcagctgcccggtatgccgtatcaaatggaaggagctcccgttccgaggtcccttgcctgctgaattgccccaaggaaatgcgaggatcaatccagttcatgggtaccagaatgggggccatatgaccataccgcggccacttccacttcctcgcgcacgctcttttggccggcttcatcatctggccacgctgctgcctgacgctgaccctggcactttcaacgacgacgaacccttggatttgtcgtgcgaagaggctaacggcactcagcagggctgtttgagaacggtagagataaaagcatatccagagttcacccaagtgcctgaaaatacatcagaaagaaacttcactgttctagttcacctcaaggcaccgcctgctcagcaccttctgcagtcatccagcgatctcggcgacggcaacggagtaagcacgactcgtgcccctgttgatctcatcacggttcttgatgtcagtggaagtatggctggtaccaagctcgcgttgttgaagagggctatggggtttgtcatccagaaccttgggtcctctgaccggctctccgtcatcgccttctcgtcgtccgcacgcaggctcttcccgctccgtaggatgaccgagtctggccggcagcagagcttgctggctgttaactcactgacggcaaacggagggaccaatatcgcagagggcctcaggaagggctccaaggtgatcgaagagcgtcagtcgaagaatccagtgtgcagcatcatccttctatcagatggccaggacacttacacggtctcgccgaccgctggtgtacacaaaggagcgacagagtattgcgcgctcttgccatccacgaccacgaatggcagccagcaggtgcccgttcacgtcttcggattcggcgccgaccatgactcggtctcgctgcactccatctcgcagacttctggcgggaccttctcgttcatcgagacagaggccaccatccaagacgcgttcgcgcagtgcattggcgggcttctgagcgtggtcgcgcagggtctgcatgtgaaggtcgagagcctccaccctgacgtgcacttcggctccatcaggctgtggcgagacggcgctcctcaaggttggctgcgtctacaaggacccgctgatgaaggagacggtgaacatgtccggcgtgcaggtgaagatctccaggccagcgttcgtctcggcgcagagcgtgtcggtcgaggtggaccgccagaagaaccgtctccacgccgccgaggtgatggccgaggcgaggttgtccgcggagcgcggtgacctggccaacgcggtctcgctgctcgaggactgccggaggatgatcacggggtcggcgtcgggacagtccggtgaccgtctgtgccaggcgctggacgcggagctgaaggagatgcaggaccggatggccagccggcagaggtacgaggcgtccggccgggcgtatgtgctctcgggcctgagctcccactcgtggcagcgggcgaccgcacgcgaagtcgttccccgcacgcccgcagccaaggtaaactgcatgcagctgggtgttgccgccgagaaggatttttgtggcgggaggacggcaccagggtatagtttgtgtgggtataagaggggatgtaggtgtaaatttggtgtggggtggtggaggtaaatggtgagaggtatgatattttataattgggggtaggggggctggtatacgtcctgggggaactgggcaggatggtggcctatttatttttgttttgttttttaatatttggtggtgacttggtatactctagtattgtactagctcctttgtgtggtgatgtacataagggaagggtatacacttggactctttgaggagggatggatacctgatcctggtccttgtccttgcaaggtttgtttcctcaacctagaaatggaagaaatggaaaaaggtttgctgccttttactgcaaatggaattaatgatgatcttgggtgcgttttcttgtggatatatcacgtggcatctcctcttggttcatatggtttgcatcact

SEQ ID NO: 56284 - DNA, 2169 bp, Zea Mays
gccgggccaaatggcggcggcgtcgacgggcttggaaccaggccagaatccagcgcggcctggagccgggggcgctgccgcgcgtcctggggcgctccgacccggttttggattcagtgactaggtaggcgggtgggagaggggcgctgccgcgccggaggcgttatggcgttgcgcgcgcgcgcgcggctgttggactggctggcggctcgtcgtcccgtccagaacgaactcgccgtacgtgcgcgcgcctgcccatggcggcgtcggtcgagcctgtgcacgttcccgtgagatccttcaacgacgacggcggcggttcggccgcggtccggccttggggcggcggaagcggcgccgaacgctggtcgggtgcctccgtactctgtagcaagtctaggctgtctagccagcttcaatgcggaggtccggctgctggactgtattgatctctagagacacgacgaagaatcaccggggatatcgaatcattgggcaagtacgtagtgtgtgattcatcggagtcggggcatcttgaatcctggattgtcagtcaaaatcaacctccctgcctgtgcctgcctccatctccatgccaaaacagcagcagagacagcgtggaatattcggatcccttggggaggctgggacccagtcccaccacctgaacaacacgaagctgcattaaaaggcgtccggcgggtggagaccagagcagcgcacaagcagcaacgccaacgccaacccaacccaaccctaacccgatctcaccgaggacacacagacaccagaccaccggagcggaccaagtacgagcatgggcggcgccgcggaggaggcgttgcggcgggagtacgtggtcggcgaggagatcgggcgcggccggttcgggacggtccgccgctgctacgccgccgccacgggggagccgttcgcgctcaagacgacgcccaaggcggcgctgcgggcggacccgctggacctggcgctggcggagcaggagcccaaggtgcaccacctggcgtctgccgccagccgccacgtggtcgcgctgcacgccgccttcgtggacgccgacgccgtgcacctggtgctggacctgtgcgcgggcggggacctgttcgcgctcgtctccgcgcggggcgcgctcccggagcccgaggcggcggagctgatggcgcagctcgccgacgcgctcgccggctgccaccgccgcggggtcgcgcaccgcgacgtcaagcccgacaacctcctcttcgacgccgccgccggcggcgcgctcaggctcggggacttcggctccgccgcctggttcggggacggcaggcccatgacggggctggtcgggacgccctactacgtcgcgcccgaggtggtggccggcagggagtacaccgagaaggtggacgtctggagcgccggggtcgtgctctacatgatgctctccgggaccgtgcccttctccggcgccaccgcgggggagatcttccaggccgtgctccgcgggaacctgcgcttccctccgcgcgccttcgccgccgtctcgcccgaggccaaggacctcctgcgccgcatgctctgcagggacgtctggcgcaggctctccgccgagcaagtcctgagtcacccatggattgtgactcgcggcggaagtgtgcctggcggtagactggtttagatgctccgcgccgcatccgatgaatctccatccgaagtgtacatagtggcgtcctccatccaatccaagaggagtagagaaggaccttttgctgttgatctcttcgctatggttctggcaaatgatcgtgaatttggacactagtgctgtagttggttaccagtagcacgcagaaagaagtaatcgttaggctaagcagggatttaggagggctgcctcttcctgggtttgctctgttctgcagtaatcctgtgctcgtcttagcttgtttgcattgcaacccaaacccatgtatgtgtatagcacagccttcttatggctgaggaagagacgactagctctgttcaggagaaaatgcttccgggttcactgtgactgtgagtttctactgtgttggaaccttgaatgaaatatacatcctgaatgtgttaggcttcaaacgattactccctccgtttctttttacttgttactggatagatgaatttaat

SEQ ID NO: 56285 - DNA, 1556 bp, Zea Mays
tgggagccagctgtttttcatcactgtttgacggacccgcgcgtgggacgagaccgaagccgccatcaaatcatcggcaccccttcgacccatagctcgagtcggcgcttgaattcgagagtctaccataccatcgccatctaccaagcaagctgcgccatcgaagatggatagcagagagagaaaggaactcgtcgtcgtcctaagctcgacatgccgtcctgtaggccgggcctgggatcccacaccggtgcgtgggcgtcgtcgtcgggccgccatgcatcagggcaccgctgcgtcgcgtagtccggatccacgtcgcccagacctgagcgtgaggtcacgagtcagctgaagaccaagttggtacctggaatctcaagtcccaggcaagttgtgcccttgatcacttctttttacccactcatgttctaattaatcataatgatctgcataggttaattttgatgggacccaataggttaccctagtttgactatctttataccttgttcaccaatgaatttttgggtagtacctgctattgctttatgtggttttgggtatagagatacacattattattcatgattatacttctattatcagttgttatttactgttcatgataagatcattatgttaattggaacatggagaaccacccgggaaaacagtgctaccacaagggtttaatgggacgcccttggccaactaactaggaaagctagtggaagactaccttacccgaaagggacaagggcagtagaggagtggtcagtgtagggaggtcctcgggttgattttgctgcgatggcggtcaggcgagggattcctgcattggagcttcctataaactgtagcgggttttctgaagctagtggaactttgtaaaggcctcgtagtgttaccctgtctcgcctcctcggaagaggtgtatgggattggccgtctcttggcagatgggtaacatgacttgtgggtaaagatgtgcaaccctttgcagagtgtaaaactggtatactagccgtgttcacggtcatgagcagctcggaccctcacatgattaatttatggaactaaattcaatttgtcatatgcattgcatcgcaggtgatgttgttacttttgttctactacttaattgggttggtatttacttatacttagtaattgctaataaaattttgaccaactttaaaagcaatgatcagcttcaaccatcctctttggtaagccttacacttcacgtgagctcccacctttggcgagttcatgcacattattcccacaacttgttgagctatgaacgtatgtgagctcactcttgctgtctcaccccccccccccacacaggtcaagaacatgtaccgcaggatgatgcgcatggaggatgctgcgatgtgttcgtgagagatctaggtcgtcgtcccccagtcaactttgggttgctggaccgttgtctccttataatgtaattatttatttattttgtacagaactcctgttatgtagtaaagatgtgacattcgatcatgtgtcatgattcatcatat

SEQ ID NO: 56286 - DNA, 1550 bp, Zea Mays
catccccctccctgcccatatttagccgttgtagcttccgccctctctctctccctctccaggctcttagaacacgaaacgtgaaggagacataggaggaggaggaggaggaggaggaggatcaatctgccccgttcttggctgcgaggcgatctttgtgccacccaccagcgcgcgaggggcttcattcacctgatcctcgcttcttcttctttcgtcccactggttcgcgttgattgcatttggaggagggggcagtcaagatgaggcttcggctcctggcctgctgctacaatgatccggagatgcggatcgatccggacaccgtctaccccatccgccccgactgccgcgacgacgcccccaagacgcgcttcaagccccggggagtccacccaacaatcaaaggagaagtttgggaatttttgctgggctgctatgaccctaaaagcactaccgaacagtgcaaccaattgcgacagcagcgaaggttagagtacgagcaactgaaagctaagtgccgagaaatggacacagctgttggtagtggaagggtaatcactatgcctgtagtaacagaagatggtcaacctatcgaaaaccctaacggaggggcatcaggttctgagcagaaaaatagtggggcaccactcccgaaagaagttattgattggaagcttaccctacaccagattggtctcgatgttaaccgtactgatcgtttgcttgtttattatgagagacaagagaacttggcaaggttgtgggacattcttgcagtgtattcatggattgataaagacatagggtattgtcagggaatgagtgatctttgttcaccaatatcaatcattctggaaaatgaagcagatgctttttggtgctttgagcgtctaatgcgcagggtgcgaggaaatttcaaaagtacttctacttccattggagttcgagctcaactaactaccttgtctaccataatgaaatctgttgacccaaagctgcatgaacatttagaaaatcttgatggaggggaatacttatttgccttccgaatgctgatggttcttttccgtagggaattctcatttgttgatacgatgtacctttgggaatgttcttgaggctagaaacaagaagttattgggtgaggcaaaaggtctagacgatgttgtcaagattttaaatgaaatcactggtagtctggatgcaaaaaaggcatgcagagaagcattgcagattcacgagaagtatcttaaaacggtaaaagcatcataaggacatgtacagcttcacttggatgggctatttatttattttttggactagagaagatataccacagaacttttgttatcctttgtttgtgtattgtgtaattctgacacatttgtaacattgcatttacacaaccaaaagaaaggacgaggatttcattcaaaaataaaaaaaagaaggggaaaaaggatgctgatcttgtaaagacgcgagacaaaatgtttataccataataacgtcatcatgattcttttctgttcgtcgtcagctctaat

SEQ ID NO: 56287 - DNA, 1817 bp, Zea Mays
cccgtctctctcctcccttcccttcctctttctctctcatccccctccctgcccatatttagccgttgtagcttccgccctctctctctccctctccaggctcttagaacacgaaacgtgaaggagacataggaggaggaggaggaggaggaggaggatcaatctgccccgttcttggctgcgaggcgatctttgtgccacccaccagcgcgcgaggggcttcattcacctgatcctcgcttcttcttctttcgtcccactggttcgcgttgattgcatttggaggagggggcagtcaagatgaggcttcggctcctggcctgctgctacaatgatccggagatgcggatcgatccggacaccgtctaccccatccgccccgactgccgcgacgacgcccccaagacgcgcttcaagccccggcctggcctgacccttagtccaaagagatggaagcttctccacaacgaggaaggctgcgtggacatagctggaatgatcaagagagtgcaacgtgggggagtccacccaacaatcaaaggagaagtttgggaatttttgctgggctgctatgaccctaaaagcactaccgaacagtgcaaccaattgcgacagcagcgaaggttagagtacgagcaactgaaagctaagtgccgagaaatggacacagctgttggtagtggaagggtaatcactatgcctgtagtaacagaagatggtcaacctatcgaaaaccctaacggaggggcatcaggttctgagcagaaaaatagtggggcaccactcccgaaagaagttattgattggaagcttaccctacaccagattggtctcgatgttaaccgtactgatcgtttgcttgtttattatgagagacaagagaacttggcaaggttgtgggacattcttgcagtgtattcatggattgataaagacatagggtattgtcagggaatgagtgatctttgttcaccaatatcaatcattctggaaaatgaagcagatgctttttggtgctttgagcgtctaatgcgcagggtgcgaggaaatttcaaaagtacttctacttccattggagttcgagctcaactaactaccttgtctaccataatgaaatctgttgacccaaagctgcatgaacatttagaaaatcttgatggaggggaatacttatttgccttccgaatgctgatggttcttttccgtagggaattctcatttgttgatacgatgtacctttgggaaagtgacactggcacatccagcgcaagcacaaaggatgaaagtgttctaggacagtgtggaaagtttgagcggaaaaaattgcaagcagctaagaaagatgaccagatccctctatctgtctttgttgttgctagtgttcttgaggctagaaacaagaagttattgggtgaggcaaaaggtctagacgatgttgtcaagattttaaatgaaatcactggtagtctggatgcaaaaaaggcatgcagagaagcattgcagattcacgagaagtatcttaaaacggtaaaagcatcataaggacatgtacagcttcacttggatgggctatttatttattttttggactagagaagatataccacagaacttttgttatcctttgtttgtgtattgtgtaattctgacacatttgtaacattgcatttacacaaccaaaagaaaggacgaggatttcattcaaaaataaaaaaaagaaggggaaaaaggatgctgatcttgtaaagacgcgagacaaaatgtttataccataataacgtcatcatgattcttttctgttcgtcgtcagctctaat

SEQ ID NO: 56288 - DNA, 1740 bp, Zea Mays
cggcgccgcctctgcatctcccgtctctctcctcccttcccttcctctttctctctcatccccctccctgcccatatttagccgttgtagcttccgccctctctctctccctctccaggctcttagaacacgaaacgtgaaggagacataggaggaggaggaggaggaggaggaggatcaatctgccccgttcttggctgcgaggcgatctttgtgccacccaccagcgcgcgaggggcttcattcacctgatcctcgcttcttcttctttcgtcccactggttcgcgttgattgcatttggaggagggggcagtcaagatgaggcttcggctcctggcctgctgctacaatgatccggagatgcggatcgatccggacaccgtctaccccatccgccccgactgccgcgacgacgcccccaagacgcgcttcaagccccggggagtccacccaacaatcaaaggagaagtttgggaatttttgctgggctgctatgaccctaaaagcactaccgaacagtgcaaccaattgcgacagcagcgaaggttagagtacgagcaactgaaagctaagtgccgagaaatggacacagctgttggtagtggaagggtaatcactatgcctgtagtaacagaagatggtcaacctatcgaaaaccctaacggaggggcatcaggttctgagcagaaaaatagtggggcaccactcccgaaagaagttattgattggaagcttaccctacaccagattggtctcgatgttaaccgtactgatcgtttgcttgtttattatgagagacaagagaacttggcaaggttgtgggacattcttgcagtgtattcatggattgataaagacatagggtattgtcagggaatgagtgatctttgttcaccaatatcaatcattctggaaaatgaagcagatgctttttggtgctttgagcgtctaatgcgcagggtgcgaggaaatttcaaaagtacttctacttccattggagttcgagctcaactaactaccttgtctaccataatgaaatctgttgacccaaagctgcatgaacatttagaaaatcttgatggaggggaatacttatttgccttccgaatgctgatggttcttttccgtagggaattctcatttgttgatacgatgtacctttgggaaagtgacactggcacatccagcgcaagcacaaaggatgaaagtgttctaggacagtgtggaaagtttgagcggaaaaaattgcaagcagctaagaaagatgaccagatccctctatctgtctttgttgttgctagtgttcttgaggctagaaacaagaagttattgggtgaggcaaaaggtctagacgatgttgtcaagattttaaatgaaatcactggtagtctggatgcaaaaaaggcatgcagagaagcattgcagattcacgagaagtatcttaaaacggtaaaagcatcataaggacatgtacagcttcacttggatgggctatttatttattttttggactagagaagatataccacagaacttttgttatcctttgtttgtgtattgtgtaattctgacacatttgtaacattgcatttacacaaccaaaagaaaggacgaggatttcattcaaaaataaaaaaaagaaggggaaaaaggatgctgatcttgtaaagacgcgagacaaaatgtttataccataataacgtcatcatgattcttttctgttcgtcgtcagctctaat

SEQ ID NO: 56289 - DNA, 1714 bp, Zea Mays
ggtagggtgagccggcgccgcctctgcatctcccgtctctctcctcccttcccttcctctttctctctcatccccctccctgcccatatttagccgttgtagcttccgccctctctctctccctctccaggctcttagaacacgaaacgtgaaggagacataggaggaggaggaggaggaggaggaggatcaatctgccccgttcttggctgcgaggcgatctttgtgccacccaccagcgcgcgaggggcttcattcacctgatcctcgcttcttcttctttcgtcccactggttcgcgttgattgcatttggaggagggggcagtcaagatgaggcttcggctcctggcctgctgctacaatgatccggagatgcggatcgatccggacaccgtctaccccatccgccccgactgccgcgacgacgcccccaagacgcgcttcaagccccggcctggcctgacccttagtccaaagagatggaagcttctccacaacgaggaaggctgcgtggacatagctggaatgatcaagagagtgcaacgtgggggagtccacccaacaatcaaaggagaagtttgggaatttttgctgggctgctatgaccctaaaagcactaccgaacagtgcaaccaattgcgacagcagcgaaggttagagtacgagcaactgaaagctaagtgccgagaaatggacacagctgttggtagtggaagggtaatcactatgcctgtagtaacagaagatggtcaacctatcgaaaaccctaacggaggggcatcaggttctgagcagaaaaatagtggggcaccactcccgaaagaagttattgattggaagcttaccctacaccagattggtctcgatgttaaccgtactgatcgtttgcttgtttattatgagagacaagagaacttggcaaggttgtgggacattcttgcagtgtattcatggattgataaagacatagggtattgtcagggaatgagtgatctttgttcaccaatatcaatcattctggaaaatgaagcagatgctttttggtgctttgagcgtctaatgcgcagggtgcgaggaaatttcaaaagtacttctacttccattggagttcgagctcaactaactaccttgtctaccataatgaaatctgttgacccaaagctgcatgaacatttagaaaatcttgatggaggggaatacttatttgccttccgaatgctgatggttcttttccgtagggaattctcatttgttgatacgatgtacctttgggaatgttcttgaggctagaaacaagaagttattgggtgaggcaaaaggtctagacgatgttgtcaagattttaaatgaaatcactggtagtctggatgcaaaaaaggcatgcagagaagcattgcagattcacgagaagtatcttaaaacggtaaaagcatcataaggacatgtacagcttcacttggatgggctatttatttattttttggactagagaagatataccacagaacttttgttatcctttgtttgtgtattgtgtaattctgacacatttgtaacattgcatttacacaaccaaaagaaaggacgaggatttcattcaaaaataaaaaaaagaaggggaaaaaggatgctgatcttgtaaagacgcgagacaaaatgtttataccataataacgtcatcatgattcttttctgttcgtcgtcagctctaat

SEQ ID NO: 56290 - DNA, 2066 bp, Zea Mays
cacattctgccaacctgcctggtagggtgagccggcgccgcctctgcatctcccgtctctctcctcccttcccttcctctttctctctcatccccctccctgcccatatttagccgttgtagcttccgccctctctctctccctctccaggctcttagaacacgaaacgtgaaggagacataggaggaggaggaggaggaggaggaggatcaatctgccccgttcttggctgcgaggcgatctttgtgccacccaccagcgcgcgaggggcttcattcacctgatcctcgcttcttcttctttcgtcccactggttcgcgttgattgcatttggaggagggggcagtcaagatgaggcttcggctcctggcctgctgctacaatgatccggagatgcggatcgatccggacaccgtctaccccatccgccccgactgccgcgacgacgcccccaagacgcgcttcaagccccggcctggcctgacccttagtccaaagagatggaagcttctccacaacgaggaaggctgcgtggacatagctggaatgatcaagagagtgcaacgtgggggagtccacccaacaatcaaaggagaagtttgggaatttttgctgggctgctatgaccctaaaagcactaccgaacagtgcaaccaattgcgacagcagcgaaggttagagtacgagcaactgaaagctaagtgccgagaaatggacacagctgttggtagtggaagggtaatcactatgcctgtagtaacagaagatggtcaacctatcgaaaaccctaacggaggggcatcaggttctgagcagaaaaatagtggggcaccactcccgaaagaagttattgattggaagcttaccctacaccagattggtaagcactgttgctcttttttcagcatctcctatatcttgggcttcccagagccttgcatcaggagggaggcaagagacagagcaatacccagctaaacctgcctattcaataatgatatgtaattcggcctgcgtttgggacaaggaggtctcgatgttaaccgtactgatcgtttgcttgtttattatgagagacaagagaacttggcaaggttgtgggacattcttgcagtgtattcatggattgataaagacatagggtattgtcagggaatgagtgatctttgttcaccaatatcaatcattctggaaaatgaagcagatgctttttggtgctttgagcgtctaatgcgcagggtgcgaggaaatttcaaaagtacttctacttccattggagttcgagctcaactaactaccttgtctaccataatgaaatctgttgacccaaagctgcatgaacatttagaaaatcttgatggaggggaatacttatttgccttccgaatgctgatggttcttttccgtagggaattctcatttgttgatacgatgtacctttgggaactcatgtggtctatggagtacaatcctaatctcttttcaatgttggagagtgacactggcacatccagcgcaagcacaaaggatgaaagtgttctaggacagtgtggaaagtttgagcggaaaaaattgcaagcagctaagaaagatgaccagatccctctatctgtctttgttgttgctagtgttcttgaggctagaaacaagaagttattgggtgaggcaaaaggtctagacgatgttgtcaagattttaaatgaaatcactggtagtctggatgcaaaaaaggcatgcagagaagcattgcagattcacgagaagtatcttaaaacggtaaaagcatcataaggacatgtacagcttcacttggatgggctatttatttattttttggactagagaagatataccacagaacttttgttatcctttgtttgtgtattgtgtaattctgacacatttgtaacattgcatttacacaaccaaaagaaaggacgaggatttcattcaaaaataaaaaaaagaaggggaaaaaggatgctgatcttgtaaagacgcgagacaaaatgtttataccataataacgtcatcatgattcttttctgttcgtcgtcagctctaat

SEQ ID NO: 56291 - DNA, 1881 bp, Zea Mays
agggagtcgcgcacattctgccaacctgcctggtagggtgagccggcgccgcctctgcatctcccgtctctctcctcccttcccttcctctttctctctcatccccctccctgcccatatttagccgttgtagcttccgccctctctctctccctctccaggctcttagaacacgaaacgtgaaggagacataggaggaggaggaggaggaggaggaggatcaatctgccccgttcttggctgcgaggcgatctttgtgccacccaccagcgcgcgaggggcttcattcacctgatcctcgcttcttcttctttcgtcccactggttcgcgttgattgcatttggaggagggggcagtcaagatgaggcttcggctcctggcctgctgctacaatgatccggagatgcggatcgatccggacaccgtctaccccatccgccccgactgccgcgacgacgcccccaagacgcgcttcaagccccggcctggcctgacccttagtccaaagagatggaagcttctccacaacgaggaaggctgcgtggacatagctggaatgatcaagagagtgcaacgtgggggagtccacccaacaatcaaaggagaagtttgggaatttttgctgggctgctatgaccctaaaagcactaccgaacagtgcaaccaattgcgacagcagcgaaggttagagtacgagcaactgaaagctaagtgccgagaaatggacacagctgttggtagtggaagggtaatcactatgcctgtagtaacagaagatggtcaacctatcgaaaaccctaacggaggggcatcaggttctgagcagaaaaatagtggggcaccactcccgaaagaagttattgattggaagcttaccctacaccagattgacaagagaacttggcaaggttgtgggacattcttgcagtgtattcatggattgataaagacatagggtattgtcagggaatgagtgatctttgttcaccaatatcaatcattctggaaaatgaagcagatgctttttggtgctttgagcgtctaatgcgcagggtgcgaggaaatttcaaaagtacttctacttccattggagttcgagctcaactaactaccttgtctaccataatgaaatctgttgacccaaagctgcatgaacatttagaaaatcttgatggaggggaatacttatttgccttccgaatgctgatggttcttttccgtagggaattctcatttgttgatacgatgtacctttgggaactcatgtggtctatggagtacaatcctaatctcttttcaatgttggagagtgacactggcacatccagcgcaagcacaaaggatgaaagtgttctaggacagtgtggaaagtttgagcggaaaaaattgcaagcagctaagaaagatgaccagatccctctatctgtctttgttgttgctagtgttcttgaggctagaaacaagaagttattgggtgaggcaaaaggtctagacgatgttgtcaagattttaaatgaaatcactggtagtctggatgcaaaaaaggcatgcagagaagcattgcagattcacgagaagtatcttaaaacggtaaaagcatcataaggacatgtacagcttcacttggatgggctatttatttattttttggactagagaagatataccacagaacttttgttatcctttgtttgtgtattgtgtaattctgacacatttgtaacattgcatttacacaaccaaaagaaaggacgaggatttcattcaaaaataaaaaaaagaaggggaaaaaggatgctgatcttgtaaagacgcgagacaaaatgtttataccataataacgtcatcatgattcttttctgttcgtcgtcagctctaat

SEQ ID NO: 56292 - DNA, 1888 bp, Zea Mays
gcgactctcggcagggagtcgcgcacattctgccaacctgcctggtagggtgagccggcgccgcctctgcatctcccgtctctctcctcccttcccttcctctttctctctcatccccctccctgcccatatttagccgttgtagcttccgccctctctctctccctctccaggctcttagaacacgaaacgtgaaggagacataggaggaggaggaggaggaggaggaggatcaatctgccccgttcttggctgcgaggcgatctttgtgccacccaccagcgcgcgaggggcttcattcacctgatcctcgcttcttcttctttcgtcccactggttcgcgttgattgcatttggaggagggggcagtcaagatgaggcttcggctcctggcctgctgctacaatgatccggagatgcggatcgatccggacaccgtctaccccatccgccccgactgccgcgacgacgcccccaagacgcgcttcaagccccggcctggcctgacccttagtccaaagagatggaagcttctccacaacgaggaaggctgcgtggacatagctggaatgatcaagagagtgcaacgtgggggagtccacccaacaatcaaaggagaagtttgggaatttttgctgggctgctatgaccctaaaagcactaccgaacagtgcaaccaattgcgacagcagcgaaggttagagtacgagcaactgaaagctaagtgccgagaaatggacacagctgttggtagtggaagggtaatcactatgcctgtagtaacagaagatggtcaacctatcgaaaaccctaacggaggggcatcaggttctgagcagaaaaatagtggggcaccactcccgaaagaagttattgattggaagcttaccctacaccagattgagaacttggcaaggttgtgggacattcttgcagtgtattcatggattgataaagacatagggtattgtcagggaatgagtgatctttgttcaccaatatcaatcattctggaaaatgaagcagatgctttttggtgctttgagcgtctaatgcgcagggtgcgaggaaatttcaaaagtacttctacttccattggagttcgagctcaactaactaccttgtctaccataatgaaatctgttgacccaaagctgcatgaacatttagaaaatcttgatggaggggaatacttatttgccttccgaatgctgatggttcttttccgtagggaattctcatttgttgatacgatgtacctttgggaactcatgtggtctatggagtacaatcctaatctcttttcaatgttggagagtgacactggcacatccagcgcaagcacaaaggatgaaagtgttctaggacagtgtggaaagtttgagcggaaaaaattgcaagcagctaagaaagatgaccagatccctctatctgtctttgttgttgctagtgttcttgaggctagaaacaagaagttattgggtgaggcaaaaggtctagacgatgttgtcaagattttaaatgaaatcactggtagtctggatgcaaaaaaggcatgcagagaagcattgcagattcacgagaagtatcttaaaacggtaaaagcatcataaggacatgtacagcttcacttggatgggctatttatttattttttggactagagaagatataccacagaacttttgttatcctttgtttgtgtattgtgtaattctgacacatttgtaacattgcatttacacaaccaaaagaaaggacgaggatttcattcaaaaataaaaaaaagaaggggaaaaaggatgctgatcttgtaaagacgcgagacaaaatgtttataccataataacgtcatcatgattcttttctgttcgtcgtcagctctaat

SEQ ID NO: 56293 - DNA, 1854 bp, Zea Mays
aacgaaataatgcgactctcggcagggagtcgcgcacattctgccaacctgcctggtagggtgagccggcgccgcctctgcatctcccgtctctctcctcccttcccttcctctttctctctcatccccctccctgcccatatttagccgttgtagcttccgccctctctctctccctctccaggctcttagaacacgaaacgtgaaggagacataggaggaggaggaggaggaggaggaggatcaatctgccccgttcttggctgcgaggcgatctttgtgccacccaccagcgcgcgaggggcttcattcacctgatcctcgcttcttcttctttcgtcccactggttcgcgttgattgcatttggaggagggggcagtcaagatgaggcttcggctcctggcctgctgctacaatgatccggagatgcggatcgatccggacaccgtctaccccatccgccccgactgccgcgacgacgcccccaagacgcgcttcaagccccggggagtccacccaacaatcaaaggagaagtttgggaatttttgctgggctgctatgaccctaaaagcactaccgaacagtgcaaccaattgcgacagcagcgaaggttagagtacgagcaactgaaagctaagtgccgagaaatggacacagctgttggtagtggaagggtaatcactatgcctgtagtaacagaagatggtcaacctatcgaaaaccctaacggaggggcatcaggttctgagcagaaaaatagtggggcaccactcccgaaagaagttattgattggaagcttaccctacaccagattggtctcgatgttaaccgtactgatcgtttgcttgtttattatgagagacaagagaacttggcaaggttgtgggacattcttgcagtgtattcatggattgataaagacatagggtattgtcagggaatgagtgatctttgttcaccaatatcaatcattctggaaaatgaagcagatgctttttggtgctttgagcgtctaatgcgcagggtgcgaggaaatttcaaaagtacttctacttccattggagttcgagctcaactaactaccttgtctaccataatgaaatctgttgacccaaagctgcatgaacatttagaaaatcttgatggaggggaatacttatttgccttccgaatgctgatggttcttttccgtagggaattctcatttgttgatacgatgtacctttgggaactcatgtggtctatggagtacaatcctaatctcttttcaatgttggagagtgacactggcacatccagcgcaagcacaaaggatgaaagtgttctaggacagtgtggaaagtttgagcggaaaaaattgcaagcagctaagaaagatgaccagatccctctatctgtctttgttgttgctagtgttcttgaggctagaaacaagaagttattgggtgaggcaaaaggtctagacgatgttgtcaagattttaaatgaaatcactggtagtctggatgcaaaaaaggcatgcagagaagcattgcagattcacgagaagtatcttaaaacggtaaaagcatcataaggacatgtacagcttcacttggatgggctatttatttattttttggactagagaagatataccacagaacttttgttatcctttgtttgtgtattgtgtaattctgacacatttgtaacattgcatttacacaaccaaaagaaaggacgaggatttcattcaaaaataaaaaaaagaaggggaaaaaggatgctgatcttgtaaagacgcgagacaaaatgtttataccataataacgtcatcatgattcttttctgttcgtcgtcagctctaat

SEQ ID NO: 56294 - DNA, 2037 bp, Zea Mays
gttggcataaacgaaataacgatctgaaaacagtaacggtttcccttctgacgatctgacccacaaaaatgcagattaagcagacccacataaacgaaataatgcgactctcggcagggagtcgcgcacattctgccaacctgcctggtagggtgagccggcgccgcctctgcatctcccgtctctctcctcccttcccttcctctttctctctcatccccctccctgcccatatttagccgttgtagcttccgccctctctctctccctctccaggctcttagaacacgaaacgtgaaggagacataggaggaggaggaggaggaggaggaggatcaatctgccccgttcttggctgcgaggcgatctttgtgccacccaccagcgcgcgaggggcttcattcacctgatcctcgcttcttcttctttcgtcccactggttcgcgttgattgcatttggaggagggggcagtcaagatgaggcttcggctcctggcctgctgctacaatgatccggagatgcggatcgatccggacaccgtctaccccatccgccccgactgccgcgacgacgcccccaagacgcgcttcaagccccggcctggcctgacccttagtccaaagagatggaagcttctccacaacgaggaaggctgcgtggacatagctggaatgatcaagagagtgcaacgtgggggagtccacccaacaatcaaaggagaagtttgggaatttttgctgggctgctatgaccctaaaagcactaccgaacagtgcaaccaattgcgacagcagcgaagagtacgagcaactgaaagctaagtgccgagaaatggacacagctgttggtagtggaagggtaatcactatgcctgtagtaacagaagatggtcaacctatcgaaaaccctaacggaggggcatcaggttctgagcagaaaaatagtggggcaccactcccgaaagaagttattgattggaagcttaccctacaccagattggtctcgatgttaaccgtactgatcgtttgcttgtttattatgagagacaagagaacttggcaaggttgtgggacattcttgcagtgtattcatggattgataaagacatagggtattgtcagggaatgagtgatctttgttcaccaatatcaatcattctggaaaatgaagcagatgctttttggtgctttgagcgtctaatgcgcagggtgcgaggaaatttcaaaagtacttctacttccattggagttcgagctcaactaactaccttgtctaccataatgaaatctgttgacccaaagctgcatgaacatttagaaaatcttgatggaggggaatacttatttgccttccgaatgctgatggttcttttccgtagggaattctcatttgttgatacgatgtacctttgggaactcatgtggtctatggagtacaatcctaatctcttttcaatgttggagagtgacactggcacatccagcgcaagcacaaaggatgaaagtgttctaggacagtgtggaaagtttgagcggaaaaaattgcaagcagctaagaaagatgaccagatccctctatctgtctttgttgttgctagtgttcttgaggctagaaacaagaagttattgggtgaggcaaaaggtctagacgatgttgtcaagattttaaatgaaatcactggtagtctggatgcaaaaaaggcatgcagagaagcattgcagattcacgagaagtatcttaaaacggtaaaagcatcataaggacatgtacagcttcacttggatgggctatttatttattttttggactagagaagatataccacagaacttttgttatcctttgtttgtgtattgtgtaattctgacacatttgtaacattgcatttacacaaccaaaagaaaggacgaggatttcattcaaaaataaaaaaaagaaggggaaaaaggatgctgatcttgtaaagacgcgagacaaaatgtttataccataataacgtcatcatgattcttttctgttcgtcgtcagctctaat

SEQ ID NO: 56295 - DNA, 2977 bp, Zea Mays
ccccctttcccgttcgttcccaggacgagtcgcagcagccggccagccgcacagagtggtggagcctaggaacagaggaggcgccgagccatctccgcagcctgctaccggggaacgggcgggaacggactctaacttagagagagcgcgggcgagagaggtcaaccgcagccggaggcgatggaggtggtggcgctggtgagcggcggaaaggacagctgcttcgccatgatgcgatgcatggactacggccacaaggttgtcgctttggctaatcttatccccctcgacgacaccgtcgatgagctcgacagctacatgtaccaaactgttgggcaccagattgtggtgagctacgcgaaatgcatgggcttgcctcttttccggaggcgcattcgcggatccacaagggtctcaggtacagtgtcacggcaggtgatgaggtagaagatatgtttgctctgttgagcgaggttaaacgtcgaatcccatccatcagcgcggtgtcgtcaggtgcaatcgcatccgattaccagaggctccgggttgagagtgtttgctcgaggctgggcctggtctcgctggcgtatctatggaagcaggatcagactttgctcctagaggaaatgataaggaggggcattgtggcaataattgtgaaggttgctgcactggggctgaaaccttcttcccacttaggtaaagaactggctgaacttaagtgtcatctgctccaaatgaatgagaattatggaatcaatgtctgtggtgaaggtggagaatatgaaacactaactcttgactgccctctatttcgtaagccagattcatctgatagaattggggatggttctgccgttcaagagagttctagttgtgtatatgaggttgatgaagttaccactcacgatgatgtgggagaaaaacaggccctgagtccagctgttgatgcttacaccaatgttgacctatgtatctcaaagacagggaacaatttgcgttcaatgagctgttggattcaggatccatccagagcttcggaaggcctgaaggcagaccttatagcagttttgagcagaattgaaaatcagctcaaggaagaagggttaggttgggtgaatgttttgtacgttcacctctacatttcaagcatgaaggaatttggattggccaatgaagtttacgtcagctttattacggaaaagaaatgctacctgggtgttccttcgcgcagtacaattgaattgccactagttcaggctgggttgggcaaagcatatgtggaagtcctagtttcaaatgaggtggtaaagagagttctacatgtgcaaagcatctcctgctgggctcctagctgcattggaccttatagccagctgggccttgaccctcctacgatgaagctctgtcttggaggtccaagagcggaactagaattagcactacaaaacagtgaagctgtggccaatgcctttagctgctcaatctatatctcggcaatacactttctggtgtactgctctgctcagttgacgtccagcgagaaggaagaaattgaacagacattgaagagttcttatattactcgtttggatcgctcaaaaggtggatcatatccaactgttctgtacgtattcgcgtcagaccttccgaaaggggcacgtgtggaggtaaagcctatactgtatgtcccttccactgatgattgggttgctgccgaagagacggagaccggagttccactgccagcaccgagcaaaacctggactgattgtaccgcaccatactctgcgttgcgcgattcgtgttgccaggtccacacaaccggcgggagaatttgttccgccgtggtgtcgatcacagatgacatcgcatcgaagatctgctctgcagctggacagctgcaccacggagaggagaatctgaaaataatggctagattctgtgctttccagatcgcgaagaccctggcagacaacagattttcctgggacagcgtaacgatgttgaggctctactactcggtagatctcgccgtggcggcagatgcagtgtccggagcattttccgaggccttggccgagcttgcccaagacaacccttccatgagaactgacgttcctttctacaacgttgtgcccgtagccggagctggccgctctgcgtgtgccaacgacataatggcgtgcgagttactggcatccaacgtctccagtgcgaagtccataccagccgaaccgttcgctgtgacgcctgcttgaatgcagctttccttcggaaattggaggtgggcgcacgttggaatttctgccagaggagccggtggccagtcaactgccagttggacgacgacggttgaccagcttctctagggctggcggcggtagcttcgtttctgtgctggcggtcgattaaaaaaaaagaccgtacggtgatcatcacagatgcacccatactgtattattctgtttcagcgtcctatacaaagtatacattgggtctgaattctgattagcctgtgctgatgcttgcaatgacattggttcttctgtgtacagactacggacagagtcccggtcagtaacgtgtgtgtacttgttcttcctctgtgttgacattcttgctcgatggtggaacctgtcgcagttggcggaggtgaagccgcgtagctcacttaggtctgccaaacacttcacttcttagattgtttctgtggaaatcgcttctgatgaatgcaaaatcaattaagtcgtccggttttgatgggaggaatcctacgcttcttaaactctaaattgcacatatttctttatttttctccgcatacaaatttgatgttgaatgcaaaatttatcaagtcgtcgtgtcttgatgagaggaacccgacgtttcttaaatcctaaattgcacagatttctttatctttttccacatgcaacattgttgacatctagattctcgttacagctagatcttt

SEQ ID NO: 56296 - DNA, 3006 bp, Zea Mays
ccccctttcccgttcgttcccaggacgagtcgcagcagccggccagccgcacagagtggtggagcctaggaacagaggaggcgccgagccatctccgcagcctgctaccggggaacgggcgggaacggactctaacttagagagagcgcgggcgagagaggtcaaccgcagccggaggcgatggaggtggtggcgctggtgagcggcggaaaggacagctgcttcgccatgatgcgatgcatggactacggccacaaggttgtcgctttggctaatcttatccccctcgacgacaccgtcgatgagctcgacagctacatgtaccaaactgttgggcaccagattgtggtgagctacgcgaaatgcatgggcttgcctcttttccggaggcgcattcgcggatccacaagggatcagggtctcaggtacagtgtcacggcaggtgatgaggtagaagatatgtttgctctgttgagcgaggttaaacgtcgaatcccatccatcagcgcggtgtcgtcaggtgcaatcgcatccgattaccagaggctccgggttgagagtgtttgctcgaggctgggcctggtctcgctggcgtatctatggaagcaggatcagactttgctcctagaggaaatgataaggaggggcattgtggcaataattgtgaaggttgctgcactggggctgaaaccttcttcccacttagaatgcaagaattattcttgatgactctgaagtgatactccactctgctgattccattgcttctgttggaattcttcatccacgggcgtttcatcttgagcagaagccagattcatctgatagaattggggatggttctgccgttcaagagagttctagttgtgtatatgaggttgatgaagttaccactcacgatgatgtgggagaaaaacaggccctgagtccagctgttgatgcttacaccaatgttgacctatgtatctcaaagacagggaacaatttgcgttcaatgagctgttggattcaggatccatccagagcttcggaaggcctgaaggcagaccttatagcagttttgagcagaattgaaaatcagctcaaggaagaagggttaggttgggtgaatgttttgtacgttcacctctacatttcaagcatgaaggaatttggattggccaatgaagtttacgtcagctttattacggaaaagaaatgctacctgggtgttccttcgcgcagtacaattgaattgccactagttcaggctgggttgggcaaagcatatgtggaagtcctagtttcaaatgaggtggtaaagagagttctacatgtgcaaagcatctcctgctgggctcctagctgcattggaccttatagccaggcaactctttatgaagatattctttatatggctggtcagctgggccttgaccctcctacgatgaagctctgtcttggaggtccaagagcggaactagaattagcactacaaaacagtgaagctgtggccaatgcctttagctgctcaatctatatctcggcaatacactttctggtgtactgctctgctcagttgacgtccagcgagaaggaagaaattgaacagacattgaagagttcttatattactcgtttggatcgctcaaaaggtggatcatatccaactgttctgtacgtattcgcgtcagaccttccgaaaggggcacgtgtggaggtaaagcctatactgtatgtcccttccactgatgattgggttgctgccgaagagacggagaccggagttccactgccagcaccgagcaaaacctggactgattgtaccgcaccatactctgcgttgcgcgattcgtgttgccaggtccacacaaccggcgggagaatttgttccgccgtggtgtcgatcacagatgacatcgcatcgaagatctgctctgcagctggacagctgcaccacggagaggagaatctgaaaataatggctagattctgtgctttccagatcgcgaagaccctggcagacaacagattttcctgggacagcgtaacgatgttgaggctctactactcggtagatctcgccgtggcggcagatgcagtgtccggagcattttccgaggccttggccgagcttgcccaagacaacccttccatgagaactgacgttcctttctacaacgttgtgcccgtagccggagctggccgctctgcgtgtgccaacgacataatggcgtgcgagttactggcatccaacgtctccagtgcgaagtccataccagccgaaccgttcgctgtgacgcctgcttgaatgcagctttccttcggaaattggaggtgggcgcacgttggaatttctgccagaggagccggtggccagtcaactgccagttggacgacgacggttgaccagcttctctagggctggcggcggtagcttcgtttctgtgctggcggtcgattaaaaaaaaagaccgtacggtgatcatcacagatgcacccatactgtattattctgtttcagcgtcctatacaaagtatacattgggtctgaattctgattagcctgtgctgatgcttgcaatgacattggttcttctgtgtacagactacggacagagtcccggtcagtaacgtgtgtgtacttgttcttcctctgtgttgacattcttgctcgatggtggaacctgtcgcagttggcggaggtgaagccgcgtagctcacttaggtctgccaaacacttcacttcttagattgtttctgtggaaatcgcttctgatgaatgcaaaatcaattaagtcgtccggttttgatgggaggaatcctacgcttcttaaactctaaattgcacatatttctttatttttctccgcatacaaatttgatgttgaatgcaaaatttatcaagtcgtcgtgtcttgatgagaggaacccgacgtttcttaaatcctaaattgcacagatttctttatctttttccacatgcaacattgttgacatctagattctcgttacagctagatcttt

SEQ ID NO: 56297 - DNA, 3045 bp, Zea Mays
cataacagcaccaccgcgccgcgccgccgccaccccctttcccgttcgttcccaggacgagtcgcagcagccggccagccgcacagagtggtggagcctaggaacagaggaggcgccgagccatctccgcagcctgctaccggggaacgggcgggaacggactctaacttagagagagcgcgggcgagagaggtcaaccgcagccggaggcgatggaggtggtggcgctggtgagcggcggaaaggacagctgcttcgccatgatgcgatgcatggactacggccacaaggttgtcgctttggctaatcttatccccctcgacgacaccgtcgatgagctcgacagctacatgttgggcaccagattgtggtgagctacgcgaaatgcatgggcttgcctcttttccggaggcgcattcgcggatccacaagggatcagggtctcaggtacagtgtcacggcaggtgatgaggtagaagatatgtttgctctgttgagcgaggttaaacgtcgaatcccatccatcagcgcggtgtcgtcaggtgcaatcgcatccgattaccagaggctccgggttgagagtgtttgctcgaggctgggcctggtctcgctggcgtatctatggaagcaggatcagactttgctcctagaggaaatgataaggaggggcattgtggcaataattgtgaaggttgctgcactggggctgaaaccttcttcccacttaggtaaagaactggctgaacttaagtgtcatctgctccaaatgaatgagaattatggaatcaatgtctgtggtgaaggtggagaatatgaaacactaactcttgactgccctctatttcgtaagccagattcatctgatagaattggggatggttctgccgttcaagagagttctagttgtgtatatgaggttgatgaagttaccactcacgatgatgtgggagaaaaacaggccctgagtccagctgttgatgcttacaccaatgttgacctatgtatctcaaagacagggaacaatttgcgttcaatgagctgttggattcaggatccatccagagcttcggaaggcctgaaggcagaccttatagcagttttgagcagaattgaaaatcagctcaaggaagaagggttaggttgggtgaatgttttgtacgttcacctctacatttcaagcatgaaggaatttggattggccaatgaagtttacgtcagctttattacggaaaagaaatgctacctgggtgttccttcgcgcagtacaattgaattgccactagttcaggctgggttgggcaaagcatatgtggaagtcctagtttcaaatgaggtggtaaagagagttctacatgtgcaaagcatctcctgctgggctcctagctgcattggaccttatagccaggcaactctttatgaagatattctttatatggctggtcagctgggccttgaccctcctacgatgaagctctgtcttggaggtccaagagcggaactagaattagcactacaaaacagtgaagctgtggccaatgcctttagctgctcaatctatatctcggcaatacactttctggtgtactgctctgctcagttgacgtccagcgagaaggaagaaattgaacagacattgaagagttcttatattactcgtttggatcgctcaaaaggtggatcatatccaactgttctgtacgtattcgcgtcagaccttccgaaaggggcacgtgtggaggtaaagcctatactgtatgtcccttccactgatgattgggttgctgccgaagagacggagaccggagttccactgccagcaccgagcaaaacctggactgattgtaccgcaccatactctgcgttgcgcgattcgtgttgccaggtccacacaaccggcgggagaatttgttccgccgtggtgtcgatcacagatgacatcgcatcgaagatctgctctgcagctggacagctgcaccacggagaggagaatctgaaaataatggctagattctgtgctttccagatcgcgaagaccctggcagacaacagattttcctgggacagcgtaacgatgttgaggctctactactcggtagatctcgccgtggcggcagatgcagtgtccggagcattttccgaggccttggccgagcttgcccaagacaacccttccatgagaactgacgttcctttctacaacgttgtgcccgtagccggagctggccgctctgcgtgtgccaacgacataatggcgtgcgagttactggcatccaacgtctccagtgcgaagtccataccagccgaaccgttcgctgtgacgcctgcttgaatgcagctttccttcggaaattggaggtgggcgcacgttggaatttctgccagaggagccggtggccagtcaactgccagttggacgacgacggttgaccagcttctctagggctggcggcggtagcttcgtttctgtgctggcggtcgattaaaaaaaaagaccgtacggtgatcatcacagatgcacccatactgtattattctgtttcagcgtcctatacaaagtatacattgggtctgaattctgattagcctgtgctgatgcttgcaatgacattggttcttctgtgtacagactacggacagagtcccggtcagtaacgtgtgtgtacttgttcttcctctgtgttgacattcttgctcgatggtggaacctgtcgcagttggcggaggtgaagccgcgtagctcacttaggtctgccaaacacttcacttcttagattgtttctgtggaaatcgcttctgatgaatgcaaaatcaattaagtcgtccggttttgatgggaggaatcctacgcttcttaaactctaaattgcacatatttctttatttttctccgcatacaaatttgatgttgaatgcaaaatttatcaagtcgtcgtgtcttgatgagaggaacccgacgtttcttaaatcctaaattgcacagatttctttatctttttccacatgcaacattgttgacatctagattctcgttacagctagatcttt

SEQ ID NO: 56298 - DNA, 3110 bp, Zea Mays
tcggcgcataacagcaccaccgcgccgcgccgccgccaccccctttcccgttcgttcccaggacgagtcgcagcagccggccagccgcacagagtggtggagcctaggaacagaggaggcgccgagccatctccgcagcctgctaccggggaacgggcgggaacggactctaacttagagagagcgcgggcgagagaggtcaaccgcagccggaggcgatggaggtggtggcgctggtgagcggcggaaaggacagctgcttcgccatgatgcgatgcatggactacggccacaaggttgtcgctttggctaatcttatccccctcgacgacaccgtcgatgagctcgacagctacatgtaccaaactgttgggcaccagattgtggtgagctacgcgaaatgcatgggcttgcctcttttccggaggcgcattcgcggatccacaagggtctcaggtacagtgtcacggcaggtgatgaggtagaagatatgtttgctctgttgagcgaggttaaacgtcgaatcccatccatcagcgcggtgtcgtcaggtgcaatcgcatccgattaccagaggctccgggttgagagtgtttgctcgaggctgggcctggtctcgctggcgtatctatggaagcaggatcagactttgctcctagaggaaatgataaggaggggcattgtggcaataattgtgaaggttgctgcactggggctgaaaccttcttcccacttaggaattatggaatcaatgtctgtggtgaaggtggagaatatgaaacactaactcttgactgccctctatttcgtaatgcaagaattattcttgatgactctgaagtgatactccactctgctgattccattgcttctgttggaattcttcatccacgggcgtttcatcttgagcagaagccagattcatctgatagaattggggatggttctgccgttcaagagagttctagttgtgtatatgaggttgatgaagttaccactcacgatgatgtgggagaaaaacaggccctgagtccagctgttgatgcttacaccaatgttgacctatgtatctcaaagacagggaacaatttgcgttcaatgagctgttggattcaggatccatccagagcttcggaaggcctgaaggcagaccttatagcagttttgagcagaattgaaaatcagctcaaggaagaagggttaggttgggtgaatgttttgtacgttcacctctacatttcaagcatgaaggaatttggattggccaatgaagtttacgtcagctttattacggaaaagaaatgctacctgggtgttccttcgcgcagtacaattgaattgccactagttcaggctgggttgggcaaagcatatgtggaagtcctagtttcaaatgaggtggtaaagagagttctacatgtgcaaagcatctcctgctgggctcctagctgcattggaccttatagccaggcaactctttatgaagatattctttatatggctggtcagctgggccttgaccctcctacgatgaagctctgtcttggaggtccaagagcggaactagaattagcactacaaaacagtgaagctgtggccaatgcctttagctgctcaatctatatctcggcaatacactttctggtgtactgctctgctcagttgacgtccagcgagaaggaagaaattgaacagacattgaagagttcttatattactcgtttggatcgctcaaaaggtggatcatatccaactgttctgtacgtattcgcgtcagaccttccgaaaggggcacgtgtggaggtaaagcctatactgtatgtcccttccactgatgattgggttgctgccgaagagacggagaccggagttccactgccagcaccgagcaaaacctggactgattgtaccgcaccatactctgcgttgcgcgattcgtgttgccaggtccacacaaccggcgggagaatttgttccgccgtggtgtcgatcacagatgacatcgcatcgaagatctgctctgcagctggacagctgcaccacggagaggagaatctgaaaataatggctagattctgtgctttccagatcgcgaagaccctggcagacaacagattttcctgggacagcgtaacgatgttgaggctctactactcggtagatctcgccgtggcggcagatgcagtgtccggagcattttccgaggccttggccgagcttgcccaagacaacccttccatgagaactgacgttcctttctacaacgttgtgcccgtagccggagctggccgctctgcgtgtgccaacgacataatggcgtgcgagttactggcatccaacgtctccagtgcgaagtccataccagccgaaccgttcgctgtgacgcctgcttgaatgcagctttccttcggaaattggaggtgggcgcacgttggaatttctgccagaggagccggtggccagtcaactgccagttggacgacgacggttgaccagcttctctagggctggcggcggtagcttcgtttctgtgctggcggtcgattaaaaaaaaagaccgtacggtgatcatcacagatgcacccatactgtattattctgtttcagcgtcctatacaaagtatacattgggtctgaattctgattagcctgtgctgatgcttgcaatgacattggttcttctgtgtacagactacggacagagtcccggtcagtaacgtgtgtgtacttgttcttcctctgtgttgacattcttgctcgatggtggaacctgtcgcagttggcggaggtgaagccgcgtagctcacttaggtctgccaaacacttcacttcttagattgtttctgtggaaatcgcttctgatgaatgcaaaatcaattaagtcgtccggttttgatgggaggaatcctacgcttcttaaactctaaattgcacatatttctttatttttctccgcatacaaatttgatgttgaatgcaaaatttatcaagtcgtcgtgtcttgatgagaggaacccgacgtttcttaaatcctaaattgcacagatttctttatctttttccacatgcaacattgttgacatctagattctcgttacagctagatcttt

SEQ ID NO: 56299 - DNA, 3086 bp, Zea Mays
gagcactcggcgcataacagcaccaccgcgccgcgccgccgccaccccctttcccgttcgttcccaggacgagtcgcagcagccggccagccgcacagagtggtggagcctaggaacagaggaggcgccgagccatctccgcagcctgctaccggggaacgggcgggaacggactctaacttagagagagcgcgggcgagagaggtcaaccgcagccggaggcgatggaggtggtggcgctggtgagcggcggaaaggacagctgcttcgccatgatgcgatgcatggactacggccacaaggttgtcgctttggctaatcttatccccctcgacgacaccgtcgatgagctcgacagctacatgttgggcaccagattgtggtgagctacgcgaaatgcatgggcttgcctcttttccggaggcgcattcgcggatccacaagggatcagggtctcaggtacagtgtcacggcaggtgatgaggtagaagatatgtttgctctgttgagcgaggttaaacgtcgaatcccatccatcagcgcggtgtcgtcaggtgcaatcgcatccgattaccagaggctccgggttgagagtgtttgctcgaggctgggcctggtctcgctggcgtatctatggaagcaggatcagactttgctcctagaggaaatgataaggaggggcattgtggcaataattgtgaaggttgctgcactggggctgaaaccttcttcccacttaggtaaagaactggctgaacttaagtgtcatctgctccaaatgaatgaaatgcaagaattattcttgatgactctgaagtgatactccactctgctgattccattgcttctgttggaattcttcatccacgggcgtttcatcttgagcagaagccagattcatctgatagaattggggatggttctgccgttcaagagagttctagttgtgtatatgaggttgatgaagttaccactcacgatgatgtgggagaaaaacaggccctgagtccagctgttgatgcttacaccaatgttgacctatgtatctcaaagacagggaacaatttgcgttcaatgagctgttggattcaggatccatccagagcttcggaaggcctgaaggcagaccttatagcagttttgagcagaattgaaaatcagctcaaggaagaagggttaggttgggtgaatgttttgtacgttcacctctacatttcaagcatgaaggaatttggattggccaatgaagtttacgtcagctttattacggaaaagaaatgctacctgggtgttccttcgcgcagtacaattgaattgccactagttcaggctgggttgggcaaagcatatgtggaagtcctagtttcaaatgaggtggtaaagagagttctacatgtgcaaagcatctcctgctgggctcctagctgcattggaccttatagccaggcaactctttatgaagatattctttatatggctggtcagctgggccttgaccctcctacgatgaagctctgtcttggaggtccaagagcggaactagaattagcactacaaaacagtgaagctgtggccaatgcctttagctgctcaatctatatctcggcaatacactttctggtgtactgctctgctcagttgacgtccagcgagaaggaagaaattgaacagacattgaagagttcttatattactcgtttggatcgctcaaaaggtggatcatatccaactgttctgtacgtattcgcgtcagaccttccgaaaggggcacgtgtggaggtaaagcctatactgtatgtcccttccactgatgattgggttgctgccgaagagacggagaccggagttccactgccagcaccgagcaaaacctggactgattgtaccgcaccatactctgcgttgcgcgattcgtgttgccaggtccacacaaccggcgggagaatttgttccgccgtggtgtcgatcacagatgacatcgcatcgaagatctgctctgcagctggacagctgcaccacggagaggagaatctgaaaataatggctagattctgtgctttccagatcgcgaagaccctggcagacaacagattttcctgggacagcgtaacgatgttgaggctctactactcggtagatctcgccgtggcggcagatgcagtgtccggagcattttccgaggccttggccgagcttgcccaagacaacccttccatgagaactgacgttcctttctacaacgttgtgcccgtagccggagctggccgctctgcgtgtgccaacgacataatggcgtgcgagttactggcatccaacgtctccagtgcgaagtccataccagccgaaccgttcgctgtgacgcctgcttgaatgcagctttccttcggaaattggaggtgggcgcacgttggaatttctgccagaggagccggtggccagtcaactgccagttggacgacgacggttgaccagcttctctagggctggcggcggtagcttcgtttctgtgctggcggtcgattaaaaaaaaagaccgtacggtgatcatcacagatgcacccatactgtattattctgtttcagcgtcctatacaaagtatacattgggtctgaattctgattagcctgtgctgatgcttgcaatgacattggttcttctgtgtacagactacggacagagtcccggtcagtaacgtgtgtgtacttgttcttcctctgtgttgacattcttgctcgatggtggaacctgtcgcagttggcggaggtgaagccgcgtagctcacttaggtctgccaaacacttcacttcttagattgtttctgtggaaatcgcttctgatgaatgcaaaatcaattaagtcgtccggttttgatgggaggaatcctacgcttcttaaactctaaattgcacatatttctttatttttctccgcatacaaatttgatgttgaatgcaaaatttatcaagtcgtcgtgtcttgatgagaggaacccgacgtttcttaaatcctaaattgcacagatttctttatctttttccacatgcaacattgttgacatctagattctcgttacagctagatcttt

SEQ ID NO: 56300 - DNA, 3021 bp, Zea Mays
gagcactcggcgcataacagcaccaccgcgccgcgccgccgccaccccctttcccgttcgttcccaggacgagtcgcagcagccggccagccgcacagagtggtggagcctaggaacagaggaggcgccgagccatctccgcagcctgctaccggggaacgggcgggaacggactctaacttagagagagcgcgggcgagagaggtcaaccgcagccggaggcgatggaggtggtggcgctggtgagcggcggaaaggacagctgcttcgccatgatgcgatgcatggactacggccacaaggttgtcgctttggctaatcttatccccctcgacgacaccgtcgatgagctcgacagctacatgtaccaaactgttgggcaccagattgtggtgagctacgcgaaatgcatgggcttgcctcttttccggaggcgcattcgcggatccacaagggatcagggtctcaggtacagtgtcacggcaggtgatgaggtagaagatatgtttgctctgttgagcgaggttaaacgtcgaatcccatccatcagcgcggtgtcgtcaggtgcaatcgcatccgattaccagaggctccgggttgagagtgtttgctcgaggctgggcctggtctcgctggcgtatctatggaagcaggatcagactttgctcctagaggaaatgataaggaggggcattgtggcaataattgtgaaggttgctgcactggggctgaaaccttcttcccacttaggaattatggaatcaatgtctgtggtgaaggtggagaatatgaaacactaactcttgactgccctctatttcgtaagccagattcatctgatagaattggggatggttctgccgttcaagagagttctagttgtgtatatgaggttgatgaagttaccactcacgatgatgtgggagaaaaacaggccctgagtccagctgttgatgcttacaccaatgttgacctatgtatctcaaagacagggaacaatttgcgttcaatgagctgttggattcaggatccatccagagcttcggaaggcctgaaggcagaccttatagcagttttgagcagaattgaaaatcagctcaaggaagaagggttaggttgggtgaatgttttgtacgttcacctctacatttcaagcatgaaggaatttggattggccaatgaagtttacgtcagctttattacggaaaagaaatgctacctgggtgttccttcgcgcagtacaattgaattgccactagttcaggctgggttgggcaaagcatatgtggaagtcctagtttcaaatgaggtggtaaagagagttctacatgtgcaaagcatctcctgctgggctcctagctgcattggaccttatagccaggcaactctttatgaagatattctttatatggctggtcagctgggccttgaccctcctacgatgaagctctgtcttggaggtccaagagcggaactagaattagcactacaaaacagtgaagctgtggccaatgcctttagctgctcaatctatatctcggcaatacactttctggtgtactgctctgctcagttgacgtccagcgagaaggaagaaattgaacagacattgaagagttcttatattactcgtttggatcgctcaaaaggtggatcatatccaactgttctgtacgtattcgcgtcagaccttccgaaaggggcacgtgtggaggtaaagcctatactgtatgtcccttccactgatgattgggttgctgccgaagagacggagaccggagttccactgccagcaccgagcaaaacctggactgattgtaccgcaccatactctgcgttgcgcgattcgtgttgccaggtccacacaaccggcgggagaatttgttccgccgtggtgtcgatcacagatgacatcgcatcgaagatctgctctgcagctggacagctgcaccacggagaggagaatctgaaaataatggctagattctgtgctttccagatcgcgaagaccctggcagacaacagattttcctgggacagcgtaacgatgttgaggctctactactcggtagatctcgccgtggcggcagatgcagtgtccggagcattttccgaggccttggccgagcttgcccaagacaacccttccatgagaactgacgttcctttctacaacgttgtgcccgtagccggagctggccgctctgcgtgtgccaacgacataatggcgtgcgagttactggcatccaacgtctccagtgcgaagtccataccagccgaaccgttcgctgtgacgcctgcttgaatgcagctttccttcggaaattggaggtgggcgcacgttggaatttctgccagaggagccggtggccagtcaactgccagttggacgacgacggttgaccagcttctctagggctggcggcggtagcttcgtttctgtgctggcggtcgattaaaaaaaaagaccgtacggtgatcatcacagatgcacccatactgtattattctgtttcagcgtcctatacaaagtatacattgggtctgaattctgattagcctgtgctgatgcttgcaatgacattggttcttctgtgtacagactacggacagagtcccggtcagtaacgtgtgtgtacttgttcttcctctgtgttgacattcttgctcgatggtggaacctgtcgcagttggcggaggtgaagccgcgtagctcacttaggtctgccaaacacttcacttcttagattgtttctgtggaaatcgcttctgatgaatgcaaaatcaattaagtcgtccggttttgatgggaggaatcctacgcttcttaaactctaaattgcacatatttctttatttttctccgcatacaaatttgatgttgaatgcaaaatttatcaagtcgtcgtgtcttgatgagaggaacccgacgtttcttaaatcctaaattgcacagatttctttatctttttccacatgcaacattgttgacatctagattctcgttacagctagatcttt

SEQ ID NO: 56301 - DNA, 3079 bp, Zea Mays
cgcctctctgccgagcactcggcgcataacagcaccaccgcgccgcgccgccgccaccccctttcccgttcgttcccaggacgagtcgcagcagccggccagccgcacagagtggtggagcctaggaacagaggaggcgccgagccatctccgcagcctgctaccggggaacgggcgggaacggactctaacttagagagagcgcgggcgagagaggtcaaccgcagccggaggcgatggaggtggtggcgctggtgagcggcggaaaggacagctgcttcgccatgatgcgatgcatggactacggccacaaggttgtcgctttggctaatcttatccccctcgacgacaccgtcgatgagctcgacagctacatgtaccaaactgttgggcaccagattgtggtgagctacgcgaaatgcatgggcttgcctcttttccggaggcgcattcgcggatccacaagggatcagggtctcaggtacagtgtcacggcaggtgatgaggtagaagatatgtttgctctgttgagcgaggttaaacgtcgaatcccatccatcagcgcggtgtcgtcaggtgcaatcgcatccgattaccagaggctccgggttgagagtgtttgctcgaggctgggcctggtctcgctggcgtatctatggaagcaggatcagactttgctcctagaggaaatgataaggaggggcattgtggcaataattgtgaaggttgctgcactggggctgaaaccttcttcccacttaggtaaagaactggctgaacttaagtgtcatctgctccaaatgaatgagaattatggaatcaatgtctgtggtgaaggtggagaatatgaaacactaactcttgactgccctctatttcgtaagccagattcatctgatagaattggggatggttctgccgttcaagagagttctagttgtgtatatgaggttgatgaagttaccactcacgatgatgtgggagaaaaacaggccctgagtccagctgttgatgcttacaccaatgttgacctatgtatctcaaagacagggaacaatttgcgttcaatgagctgttggattcaggatccatccagagcttcggaaggcctgaaggcagaccttatagcagttttgagcagaattgaaaatcagctcaaggaagaagggttaggttgggtgaatgttttgtacgttcacctctacatttcaagcatgaaggaatttggattggccaatgaagtttacgtcagctttattacggaaaagaaatgctacctgggtgttccttcgcgcagtacaattgaattgccactagttcaggctgggttgggcaaagcatatgtggaagtcctagtttcaaatgaggtggtaaagagagttctacatgtgcaaagcatctcctgctgggctcctagctgcattggaccttatagccaggcaactctttatgaagatattctttatatggctggtcagctgggccttgaccctcctacgatgaagctctgtcttggaggtccaagagcggaactagaattagcactacaaaacagtgaagctgtggccaatgcctttagctgctcaatctatatctcggcaatacactttctggtgtactgctctgctcagttgacgtccagcgagaaggaagaaattgaacagacattgaagagttcttatattactcgtttggatcgctcaaaaggtggatcatatccaactgttctgtacgtattcgcgtcagaccttccgaaaggggcacgtgtggaggtaaagcctatactgtatgtcccttccactgatgattgggttgctgccgaagagacggagaccggagttccactgccagcaccgagcaaaacctggactgattgtaccgcaccatactctgcgttgcgcgattcgtgttgccaggtccacacaaccggcgggagaatttgttccgccgtggtgtcgatcacagatgacatcgcatcgaagatctgctctgcagctggacagctgcaccacggagaggagaatctgaaaataatggctagattctgtgctttccagatcgcgaagaccctggcagacaacagattttcctgggacagcgtaacgatgttgaggctctactactcggtagatctcgccgtggcggcagatgcagtgtccggagcattttccgaggccttggccgagcttgcccaagacaacccttccatgagaactgacgttcctttctacaacgttgtgcccgtagccggagctggccgctctgcgtgtgccaacgacataatggcgtgcgagttactggcatccaacgtctccagtgcgaagtccataccagccgaaccgttcgctgtgacgcctgcttgaatgcagctttccttcggaaattggaggtgggcgcacgttggaatttctgccagaggagccggtggccagtcaactgccagttggacgacgacggttgaccagcttctctagggctggcggcggtagcttcgtttctgtgctggcggtcgattaaaaaaaaagaccgtacggtgatcatcacagatgcacccatactgtattattctgtttcagcgtcctatacaaagtatacattgggtctgaattctgattagcctgtgctgatgcttgcaatgacattggttcttctgtgtacagactacggacagagtcccggtcagtaacgtgtgtgtacttgttcttcctctgtgttgacattcttgctcgatggtggaacctgtcgcagttggcggaggtgaagccgcgtagctcacttaggtctgccaaacacttcacttcttagattgtttctgtggaaatcgcttctgatgaatgcaaaatcaattaagtcgtccggttttgatgggaggaatcctacgcttcttaaactctaaattgcacatatttctttatttttctccgcatacaaatttgatgttgaatgcaaaatttatcaagtcgtcgtgtcttgatgagaggaacccgacgtttcttaaatcctaaattgcacagatttctttatctttttccacatgcaacattgttgacatctagattctcgttacagctagatcttt

SEQ ID NO: 56302 - DNA, 3096 bp, Zea Mays
cgcctctctgccgagcactcggcgcataacagcaccaccgcgccgcgccgccgccaccccctttcccgttcgttcccaggacgagtcgcagcagccggccagccgcacagagtggtggagcctaggaacagaggaggcgccgagccatctccgcagcctgctaccggggaacgggcgggaacggactctaacttagagagagcgcgggcgagagaggtcaaccgcagccggaggcgatggaggtggtggcgctggtgagcggcggaaaggacagctgcttcgccatgatgcgatgcatggactacggccacaaggttgtcgctttggctaatcttatccccctcgacgacaccgtcgatgagctcgacagctacatgtaccaaactgttgggcaccagattgtggtgagctacgcgaaatgcatgggcttgcctcttttccggaggcgcattcgcggatccacaagggatcagggtctcaggtacagtgtcacggcaggtgatgaggtagaagatatgtttgctctgttgagcgaggttaaacgtcgaatcccatccatcagcgcggtgtcgtcaggtgcaatcgcatccgattaccagaggctccgggttgagagtgtttgctcgaggctgggcctggtctcgctggcgtatctatggaagcaggatcagactttgctcctagaggaaatgataaggaggggcattgtggcaataattgtgaaggttgctgcactggggctgaaaccttcttcccacttaggaattatggaatcaatgtctgtggtgaaggtggagaatatgaaacactaactcttgactgccctctatttcgtaatgcaagaattattcttgatgactctgaagtgatactccactctgctgattccattgcttctgttggaattcttcatccacgggcgtttcatcttgagcagaagccagattcatctgatagaattggggatggttctgccgttcaagagagttctagttgtgtatatgaggttgatgaagttaccactcacgatgatgtgggagaaaaacaggccctgagtccagctgttgatgcttacaccaatgttgacctatgtatctcaaagacagggaacaatttgcgttcaatgagctgttggattcaggatccatccagagcttcggaaggcctgaaggcagaccttatagcagttttgagcagaattgaaaatcagctcaaggaagaagggttaggttgggtgaatgttttgtacgttcacctctacatttcaagcatgaaggaatttggattggccaatgaagtttacgtcagctttattacggaaaagaaatgctacctgggtgttccttcgcgcagtacaattgaattgccactagttcaggctgggttgggcaaagcatatgtggaagtcctagtttcaaatgaggtggtaaagagagttctacatgtgcaaagcatctcctgctgggctcctagctgcattggaccttatagccagctgggccttgaccctcctacgatgaagctctgtcttggaggtccaagagcggaactagaattagcactacaaaacagtgaagctgtggccaatgcctttagctgctcaatctatatctcggcaatacactttctggtgtactgctctgctcagttgacgtccagcgagaaggaagaaattgaacagacattgaagagttcttatattactcgtttggatcgctcaaaaggtggatcatatccaactgttctgtacgtattcgcgtcagaccttccgaaaggggcacgtgtggaggtaaagcctatactgtatgtcccttccactgatgattgggttgctgccgaagagacggagaccggagttccactgccagcaccgagcaaaacctggactgattgtaccgcaccatactctgcgttgcgcgattcgtgttgccaggtccacacaaccggcgggagaatttgttccgccgtggtgtcgatcacagatgacatcgcatcgaagatctgctctgcagctggacagctgcaccacggagaggagaatctgaaaataatggctagattctgtgctttccagatcgcgaagaccctggcagacaacagattttcctgggacagcgtaacgatgttgaggctctactactcggtagatctcgccgtggcggcagatgcagtgtccggagcattttccgaggccttggccgagcttgcccaagacaacccttccatgagaactgacgttcctttctacaacgttgtgcccgtagccggagctggccgctctgcgtgtgccaacgacataatggcgtgcgagttactggcatccaacgtctccagtgcgaagtccataccagccgaaccgttcgctgtgacgcctgcttgaatgcagctttccttcggaaattggaggtgggcgcacgttggaatttctgccagaggagccggtggccagtcaactgccagttggacgacgacggttgaccagcttctctagggctggcggcggtagcttcgtttctgtgctggcggtcgattaaaaaaaaagaccgtacggtgatcatcacagatgcacccatactgtattattctgtttcagcgtcctatacaaagtatacattgggtctgaattctgattagcctgtgctgatgcttgcaatgacattggttcttctgtgtacagactacggacagagtcccggtcagtaacgtgtgtgtacttgttcttcctctgtgttgacattcttgctcgatggtggaacctgtcgcagttggcggaggtgaagccgcgtagctcacttaggtctgccaaacacttcacttcttagattgtttctgtggaaatcgcttctgatgaatgcaaaatcaattaagtcgtccggttttgatgggaggaatcctacgcttcttaaactctaaattgcacatatttctttatttttctccgcatacaaatttgatgttgaatgcaaaatttatcaagtcgtcgtgtcttgatgagaggaacccgacgtttcttaaatcctaaattgcacagatttctttatctttttccacatgcaacattgttgacatctagattctcgttacagctagatcttt

SEQ ID NO: 56303 - DNA, 3424 bp, Zea Mays
cacgcctctctgccgagcactcggcgcataacagcaccaccgcgccgcgccgccgccaccccctttcccgttcgttcccaggacgagtcgcagcagccggccagccgcacagagtggtggagcctaggaacagaggaggcgccgagccatctccgcagcctgctaccggggaacgggcgggaacggactctaacttagagagagcgcgggcgagagaggtcaaccgcagccggaggcgatggaggtggtggcgctggtgagcggcggaaaggacagctgcttcgccatgatgcgatgcatggactacggccacaaggttgtcgctttggctaatcttatccccctcgacgacaccgtcgatgagctcgacagctacatgtaccaaactgttgggcaccagattgtggtgagctacgcgaaatgcatgggcttgcctcttttccggaggcgcattcgcggatccacaaggcaagctgttatctctgcagtcactgtggcctatgattcggatgctctgcaagcgatctggttccactgattcaattctgttttgttagggatcagggtctcaggtacagtgtcacggcaggtgatgaggtagaagatatgtttgctctgttgagcgaggttaaacgtcgaatcccatccatcagcgcggtgtcgtcaggtgcaatcgcatccgattaccagaggctccgggttgagagtgtttgctcgaggctgggcctggtctcgctggcgtatctatggaagcaggatcagactttgctcctagaggaaatgataaggaggggcattgtggcaataattgtgaaggttgctgcactggggctgaaaccttcttcccacttagggaattatggaatcaatgtctgtggtgaaggtggagaatatgaaacactaactcttgactgccctctatttcgtgtaagtctgagtcgttgaggagctaactgaaacttgatgtcacttgctctagaatgttgtgtaatagactctaaccattgcatcacatggcatgacttgttattagttctcactgtctatgccctgaacacatttttgattttttggtcaatcatctgtgtcaattttcgtgttccttaacatgtttgcatttacagaatgcaagaattattcttgatgactctgaagtgatactccactctgctgattccattgcttctgttggaattcttcatccacgggcgtttcatcttgagcagaagccagattcatctgatagaattggggatggttctgccgttcaagagagttctagttgtgtatatgaggttgatgaagttaccactcacgatgatgtgggagaaaaacaggccctgagtccagctgttgatgcttacaccaatgttgacctatgtatctcaaagacagggaacaatttgcgttcaatgagctgttggattcaggatccatccagagcttcggaaggcctgaaggcagaccttatagcagttttgagcagaattgaaaatcagctcaaggaagaagggttaggttgggtgaatgttttgtacgttcacctctacatttcaagcatgaaggaatttggattggccaatgaagtttacgtcagctttattacggaaaagaaatgctacctgggtgttccttcgcgcagtacaattgaattgccactagttcaggctgggttgggcaaagcatatgtggaagtcctagtttcaaatgaggtggtaaagagagttctacatgtgcaaagcatctcctgctgggctcctagctgcattggaccttatagccaggcaactctttatgaagatattctttatatggctggtcagctgggccttgaccctcctacgatgaagctctgtcttggaggtccaagagcggaactagaattagcactacaaaacagtgaagctgtggccaatgcctttagctgctcaatctatatctcggcaatacactttctggtgtactgctctgctcagttgacgtccagcgagaaggaagaaattgaacagacattgaagagttcttatattactcgtttggatcgctcaaaaggtggatcatatccaactgttctgtacgtattcgcgtcagaccttccgaaaggggcacgtgtggaggtaaagcctatactgtatgtcccttccactgatgattgggttgctgccgaagagacggagaccggagttccactgccagcaccgagcaaaacctggactgattgtaccgcaccatactctgcgttgcgcgattcgtgttgccaggtccacacaaccggcgggagaatttgttccgccgtggtgtcgatcacagatgacatcgcatcgaagatctgctctgcagctggacagctgcaccacggagaggagaatctgaaaataatggctagattctgtgctttccagatcgcgaagaccctggcagacaacagattttcctgggacagcgtaacgatgttgaggctctactactcggtagatctcgccgtggcggcagatgcagtgtccggagcattttccgaggccttggccgagcttgcccaagacaacccttccatgagaactgacgttcctttctacaacgttgtgcccgtagccggagctggccgctctgcgtgtgccaacgacataatggcgtgcgagttactggcatccaacgtctccagtgcgaagtccataccagccgaaccgttcgctgtgacgcctgcttgaatgcagctttccttcggaaattggaggtgggcgcacgttggaatttctgccagaggagccggtggccagtcaactgccagttggacgacgacggttgaccagcttctctagggctggcggcggtagcttcgtttctgtgctggcggtcgattaaaaaaaaagaccgtacggtgatcatcacagatgcacccatactgtattattctgtttcagcgtcctatacaaagtatacattgggtctgaattctgattagcctgtgctgatgcttgcaatgacattggttcttctgtgtacagactacggacagagtcccggtcagtaacgtgtgtgtacttgttcttcctctgtgttgacattcttgctcgatggtggaacctgtcgcagttggcggaggtgaagccgcgtagctcacttaggtctgccaaacacttcacttcttagattgtttctgtggaaatcgcttctgatgaatgcaaaatcaattaagtcgtccggttttgatgggaggaatcctacgcttcttaaactctaaattgcacatatttctttatttttctccgcatacaaatttgatgttgaatgcaaaatttatcaagtcgtcgtgtcttgatgagaggaacccgacgtttcttaaatcctaaattgcacagatttctttatctttttccacatgcaacattgttgacatctagattctcgttacagctagatcttt

SEQ ID NO: 56304 - DNA, 3117 bp, Zea Mays
atcagcgcacgcctctctgccgagcactcggcgcataacagcaccaccgcgccgcgccgccgccaccccctttcccgttcgttcccaggacgagtcgcagcagccggccagccgcacagagtggtggagcctaggaacagaggaggcgccgagccatctccgcagcctgctaccggggaacgggcgggaacggactctaacttagagagagcgcgggcgagagaggtcaaccgcagccggaggcgatggaggtggtggcgctggtgagcggcggaaaggacagctgcttcgccatgatgcgatgcatggactacggccacaaggttgtcgctttggctaatcttatccccctcgacgacaccgtcgatgagctcgacagctacatgtaccaaactgttgggcaccagattgtggtgagctacgcgaaatgcatgggcttgcctcttttccggaggcgcattcgcggatccacaagggatcagggtctcaggtacagtgtcacggcaggtgatgaggtagaagatatgtttgctctgttgagcgaggttaaacgtcgaatcccatccatcagcgcggtgtcgtcaggtgcaatcgcatccgattaccagaggctccgggttgagagtgtttgctcgaggctgggcctggtctcgctggcgtatctatggaagcaggatcagactttgctcctagaggaaatgataaggaggggcattgtggcaataattgtgaaggttgctgcactggggctgaaaccttcttcccacttaggtaaagaactggctgaacttaagtgtcatctgctccaaatgaatgaaatgcaagaattattcttgatgactctgaagtgatactccactctgctgattccattgcttctgttggaattcttcatccacgggcgtttcatcttgagcagaagccagattcatctgatagaattggggatggttctgccgttcaagagagttctagttgtgtatatgaggttgatgaagttaccactcacgatgatgtgggagaaaaacaggccctgagtccagctgttgatgcttacaccaatgttgacctatgtatctcaaagacagggaacaatttgcgttcaatgagctgttggattcaggatccatccagagcttcggaaggcctgaaggcagaccttatagcagttttgagcagaattgaaaatcagctcaaggaagaagggttaggttgggtgaatgttttgtacgttcacctctacatttcaagcatgaaggaatttggattggccaatgaagtttacgtcagctttattacggaaaagaaatgctacctgggtgttccttcgcgcagtacaattgaattgccactagttcaggctgggttgggcaaagcatatgtggaagtcctagtttcaaatgaggtggtaaagagagttctacatgtgcaaagcatctcctgctgggctcctagctgcattggaccttatagccaggcaactctttatgaagatattctttatatggctggtcagctgggccttgaccctcctacgatgaagctctgtcttggaggtccaagagcggaactagaattagcactacaaaacagtgaagctgtggccaatgcctttagctgctcaatctatatctcggcaatacactttctggtgtactgctctgctcagttgacgtccagcgagaaggaagaaattgaacagacattgaagagttcttatattactcgtttggatcgctcaaaaggtggatcatatccaactgttctgtacgtattcgcgtcagaccttccgaaaggggcacgtgtggaggtaaagcctatactgtatgtcccttccactgatgattgggttgctgccgaagagacggagaccggagttccactgccagcaccgagcaaaacctggactgattgtaccgcaccatactctgcgttgcgcgattcgtgttgccaggtccacacaaccggcgggagaatttgttccgccgtggtgtcgatcacagatgacatcgcatcgaagatctgctctgcagctggacagctgcaccacggagaggagaatctgaaaataatggctagattctgtgctttccagatcgcgaagaccctggcagacaacagattttcctgggacagcgtaacgatgttgaggctctactactcggtagatctcgccgtggcggcagatgcagtgtccggagcattttccgaggccttggccgagcttgcccaagacaacccttccatgagaactgacgttcctttctacaacgttgtgcccgtagccggagctggccgctctgcgtgtgccaacgacataatggcgtgcgagttactggcatccaacgtctccagtgcgaagtccataccagccgaaccgttcgctgtgacgcctgcttgaatgcagctttccttcggaaattggaggtgggcgcacgttggaatttctgccagaggagccggtggccagtcaactgccagttggacgacgacggttgaccagcttctctagggctggcggcggtagcttcgtttctgtgctggcggtcgattaaaaaaaaagaccgtacggtgatcatcacagatgcacccatactgtattattctgtttcagcgtcctatacaaagtatacattgggtctgaattctgattagcctgtgctgatgcttgcaatgacattggttcttctgtgtacagactacggacagagtcccggtcagtaacgtgtgtgtacttgttcttcctctgtgttgacattcttgctcgatggtggaacctgtcgcagttggcggaggtgaagccgcgtagctcacttaggtctgccaaacacttcacttcttagattgtttctgtggaaatcgcttctgatgaatgcaaaatcaattaagtcgtccggttttgatgggaggaatcctacgcttcttaaactctaaattgcacatatttctttatttttctccgcatacaaatttgatgttgaatgcaaaatttatcaagtcgtcgtgtcttgatgagaggaacccgacgtttcttaaatcctaaattgcacagatttctttatctttttccacatgcaacattgttgacatctagattctcgttacagctagatcttt

SEQ ID NO: 56305 - DNA, 3180 bp, Zea Mays
atcagcgcacgcctctctgccgagcactcggcgcataacagcaccaccgcgccgcgccgccgccaccccctttcccgttcgttcccaggacgagtcgcagcagccggccagccgcacagagtggtggagcctaggaacagaggaggcgccgagccatctccgcagcctgctaccggggaacgggcgggaacggactctaacttagagagagcgcgggcgagagaggtcaaccgcagccggaggcgatggaggtggtggcgctggtgagcggcggaaaggacagctgcttcgccatgatgcgatgcatggactacggccacaaggttgtcgctttggctaatcttatccccctcgacgacaccgtcgatgagctcgacagctacatgttgggcaccagattgtggtgagctacgcgaaatgcatgggcttgcctcttttccggaggcgcattcgcggatccacaagggatcagggtctcaggtacagtgtcacggcaggtgatgaggtagaagatatgtttgctctgttgagcgaggttaaacgtcgaatcccatccatcagcgcggtgtcgtcaggtgcaatcgcatccgattaccagaggctccgggttgagagtgtttgctcgaggctgggcctggtctcgctggcgtatctatggaagcaggatcagactttgctcctagaggaaatgataaggaggggcattgtggcaataattgtgaaggttgctgcactggggctgaaaccttcttcccacttaggtaaagaactggctgaacttaagtgtcatctgctccaaatgaatgagaattatggaatcaatgtctgtggtgaaggtggagaatatgaaacactaactcttgactgccctctatttcgtaatgcaagaattattcttgatgactctgaagtgatactccactctgctgattccattgcttctgttggaattcttcatccacgggcgtttcatcttgagcagaagccagattcatctgatagaattggggatggttctgccgttcaagagagttctagttgtgtatatgaggttgatgaagttaccactcacgatgatgtgggagaaaaacaggccctgagtccagctgttgatgcttacaccaatgttgacctatgtatctcaaagacagggaacaatttgcgttcaatgagctgttggattcaggatccatccagagcttcggaaggcctgaaggcagaccttatagcagttttgagcagaattgaaaatcagctcaaggaagaagggttaggttgggtgaatgttttgtacgttcacctctacatttcaagcatgaaggaatttggattggccaatgaagtttacgtcagctttattacggaaaagaaatgctacctgggtgttccttcgcgcagtacaattgaattgccactagttcaggctgggttgggcaaagcatatgtggaagtcctagtttcaaatgaggtggtaaagagagttctacatgtgcaaagcatctcctgctgggctcctagctgcattggaccttatagccaggcaactctttatgaagatattctttatatggctggtcagctgggccttgaccctcctacgatgaagctctgtcttggaggtccaagagcggaactagaattagcactacaaaacagtgaagctgtggccaatgcctttagctgctcaatctatatctcggcaatacactttctggtgtactgctctgctcagttgacgtccagcgagaaggaagaaattgaacagacattgaagagttcttatattactcgtttggatcgctcaaaaggtggatcatatccaactgttctgtacgtattcgcgtcagaccttccgaaaggggcacgtgtggaggtaaagcctatactgtatgtcccttccactgatgattgggttgctgccgaagagacggagaccggagttccactgccagcaccgagcaaaacctggactgattgtaccgcaccatactctgcgttgcgcgattcgtgttgccaggtccacacaaccggcgggagaatttgttccgccgtggtgtcgatcacagatgacatcgcatcgaagatctgctctgcagctggacagctgcaccacggagaggagaatctgaaaataatggctagattctgtgctttccagatcgcgaagaccctggcagacaacagattttcctgggacagcgtaacgatgttgaggctctactactcggtagatctcgccgtggcggcagatgcagtgtccggagcattttccgaggccttggccgagcttgcccaagacaacccttccatgagaactgacgttcctttctacaacgttgtgcccgtagccggagctggccgctctgcgtgtgccaacgacataatggcgtgcgagttactggcatccaacgtctccagtgcgaagtccataccagccgaaccgttcgctgtgacgcctgcttgaatgcagctttccttcggaaattggaggtgggcgcacgttggaatttctgccagaggagccggtggccagtcaactgccagttggacgacgacggttgaccagcttctctagggctggcggcggtagcttcgtttctgtgctggcggtcgattaaaaaaaaagaccgtacggtgatcatcacagatgcacccatactgtattattctgtttcagcgtcctatacaaagtatacattgggtctgaattctgattagcctgtgctgatgcttgcaatgacattggttcttctgtgtacagactacggacagagtcccggtcagtaacgtgtgtgtacttgttcttcctctgtgttgacattcttgctcgatggtggaacctgtcgcagttggcggaggtgaagccgcgtagctcacttaggtctgccaaacacttcacttcttagattgtttctgtggaaatcgcttctgatgaatgcaaaatcaattaagtcgtccggttttgatgggaggaatcctacgcttcttaaactctaaattgcacatatttctttatttttctccgcatacaaatttgatgttgaatgcaaaatttatcaagtcgtcgtgtcttgatgagaggaacccgacgtttcttaaatcctaaattgcacagatttctttatctttttccacatgcaacattgttgacatctagattctcgttacagctagatcttt

SEQ ID NO: 56306 - DNA, 3183 bp, Zea Mays
atcagcgcacgcctctctgccgagcactcggcgcataacagcaccaccgcgccgcgccgccgccaccccctttcccgttcgttcccaggacgagtcgcagcagccggccagccgcacagagtggtggagcctaggaacagaggaggcgccgagccatctccgcagcctgctaccggggaacgggcgggaacggactctaacttagagagagcgcgggcgagagaggtcaaccgcagccggaggcgatggaggtggtggcgctggtgagcggcggaaaggacagctgcttcgccatgatgcgatgcatggactacggccacaaggttgtcgctttggctaatcttatccccctcgacgacaccgtcgatgagctcgacagctacatgtaccaaactgttgggcaccagattgtggtgagctacgcgaaatgcatgggcttgcctcttttccggaggcgcattcgcggatccacaagggtctcaggtacagtgtcacggcaggtgatgaggtagaagatatgtttgctctgttgagcgaggttaaacgtcgaatcccatccatcagcgcggtgtcgtcaggtgcaatcgcatccgattaccagaggctccgggttgagagtgtttgctcgaggctgggcctggtctcgctggcgtatctatggaagcaggatcagactttgctcctagaggaaatgataaggaggggcattgtggcaataattgtgaaggttgctgcactggggctgaaaccttcttcccacttaggtaaagaactggctgaacttaagtgtcatctgctccaaatgaatgagaattatggaatcaatgtctgtggtgaaggtggagaatatgaaacactaactcttgactgccctctatttcgtaatgcaagaattattcttgatgactctgaagtgatactccactctgctgattccattgcttctgttggaattcttcatccacgggcgtttcatcttgagcagaagccagattcatctgatagaattggggatggttctgccgttcaagagagttctagttgtgtatatgaggttgatgaagttaccactcacgatgatgtgggagaaaaacaggccctgagtccagctgttgatgcttacaccaatgttgacctatgtatctcaaagacagggaacaatttgcgttcaatgagctgttggattcaggatccatccagagcttcggaaggcctgaaggcagaccttatagcagttttgagcagaattgaaaatcagctcaaggaagaagggttaggttgggtgaatgttttgtacgttcacctctacatttcaagcatgaaggaatttggattggccaatgaagtttacgtcagctttattacggaaaagaaatgctacctgggtgttccttcgcgcagtacaattgaattgccactagttcaggctgggttgggcaaagcatatgtggaagtcctagtttcaaatgaggtggtaaagagagttctacatgtgcaaagcatctcctgctgggctcctagctgcattggaccttatagccaggcaactctttatgaagatattctttatatggctggtcagctgggccttgaccctcctacgatgaagctctgtcttggaggtccaagagcggaactagaattagcactacaaaacagtgaagctgtggccaatgcctttagctgctcaatctatatctcggcaatacactttctggtgtactgctctgctcagttgacgtccagcgagaaggaagaaattgaacagacattgaagagttcttatattactcgtttggatcgctcaaaaggtggatcatatccaactgttctgtacgtattcgcgtcagaccttccgaaaggggcacgtgtggaggtaaagcctatactgtatgtcccttccactgatgattgggttgctgccgaagagacggagaccggagttccactgccagcaccgagcaaaacctggactgattgtaccgcaccatactctgcgttgcgcgattcgtgttgccaggtccacacaaccggcgggagaatttgttccgccgtggtgtcgatcacagatgacatcgcatcgaagatctgctctgcagctggacagctgcaccacggagaggagaatctgaaaataatggctagattctgtgctttccagatcgcgaagaccctggcagacaacagattttcctgggacagcgtaacgatgttgaggctctactactcggtagatctcgccgtggcggcagatgcagtgtccggagcattttccgaggccttggccgagcttgcccaagacaacccttccatgagaactgacgttcctttctacaacgttgtgcccgtagccggagctggccgctctgcgtgtgccaacgacataatggcgtgcgagttactggcatccaacgtctccagtgcgaagtccataccagccgaaccgttcgctgtgacgcctgcttgaatgcagctttccttcggaaattggaggtgggcgcacgttggaatttctgccagaggagccggtggccagtcaactgccagttggacgacgacggttgaccagcttctctagggctggcggcggtagcttcgtttctgtgctggcggtcgattaaaaaaaaagaccgtacggtgatcatcacagatgcacccatactgtattattctgtttcagcgtcctatacaaagtatacattgggtctgaattctgattagcctgtgctgatgcttgcaatgacattggttcttctgtgtacagactacggacagagtcccggtcagtaacgtgtgtgtacttgttcttcctctgtgttgacattcttgctcgatggtggaacctgtcgcagttggcggaggtgaagccgcgtagctcacttaggtctgccaaacacttcacttcttagattgtttctgtggaaatcgcttctgatgaatgcaaaatcaattaagtcgtccggttttgatgggaggaatcctacgcttcttaaactctaaattgcacatatttctttatttttctccgcatacaaatttgatgttgaatgcaaaatttatcaagtcgtcgtgtcttgatgagaggaacccgacgtttcttaaatcctaaattgcacagatttctttatctttttccacatgcaacattgttgacatctagattctcgttacagctagatcttt

SEQ ID NO: 56307 - DNA, 3147 bp, Zea Mays
atcatcagcgcacgcctctctgccgagcactcggcgcataacagcaccaccgcgccgcgccgccgccaccccctttcccgttcgttcccaggacgagtcgcagcagccggccagccgcacagagtggtggagcctaggaacagaggaggcgccgagccatctccgcagcctgctaccggggaacgggcgggaacggactctaacttagagagagcgcgggcgagagaggtcaaccgcagccggaggcgatggaggtggtggcgctggtgagcggcggaaaggacagctgcttcgccatgatgcgatgcatggactacggccacaaggttgtcgctttggctaatcttatccccctcgacgacaccgtcgatgagctcgacagctacatgtaccaaactgttgggcaccagattgtggtgagctacgcgaaatgcatgggcttgcctcttttccggaggcgcattcgcggatccacaagggatcagggtctcaggtacagtgtcacggcaggtgatgaggtagaagatatgtttgctctgttgagcgaggttaaacgtcgaatcccatccatcagcgcggtgtcgtcaggtgcaatcgcatccgattaccagaggctccgggttgagagtgtttgctcgaggctgggcctggtctcgctggcgtatctatggaagcaggatcagactttgctcctagaggaaatgataaggaggggcattgtggcaataattgtgaaggttgctgcactggggctgaaaccttcttcccacttaggaattatggaatcaatgtctgtggtgaaggtggagaatatgaaacactaactcttgactgccctctatttcgtaatgcaagaattattcttgatgactctgaagtgatactccactctgctgattccattgcttctgttggaattcttcatccacgggcgtttcatcttgagcagaagccagattcatctgatagaattggggatggttctgccgttcaagagagttctagttgtgtatatgaggttgatgaagttaccactcacgatgatgtgggagaaaaacaggccctgagtccagctgttgatgcttacaccaatgttgacctatgtatctcaaagacagggaacaatttgcgttcaatgagctgttggattcaggatccatccagagcttcggaaggcctgaaggcagaccttatagcagttttgagcagaattgaaaatcagctcaaggaagaagggttaggttgggtgaatgttttgtacgttcacctctacatttcaagcatgaaggaatttggattggccaatgaagtttacgtcagctttattacggaaaagaaatgctacctgggtgttccttcgcgcagtacaattgaattgccactagttcaggctgggttgggcaaagcatatgtggaagtcctagtttcaaatgaggtggtaaagagagttctacatgtgcaaagcatctcctgctgggctcctagctgcattggaccttatagccaggcaactctttatgaagatattctttatatggctggtcagctgggccttgaccctcctacgatgaagctctgtcttggaggtccaagagcggaactagaattagcactacaaaacagtgaagctgtggccaatgcctttagctgctcaatctatatctcggcaatacactttctggtgtactgctctgctcagttgacgtccagcgagaaggaagaaattgaacagacattgaagagttcttatattactcgtttggatcgctcaaaaggtggatcatatccaactgttctgtacgtattcgcgtcagaccttccgaaaggggcacgtgtggaggtaaagcctatactgtatgtcccttccactgatgattgggttgctgccgaagagacggagaccggagttccactgccagcaccgagcaaaacctggactgattgtaccgcaccatactctgcgttgcgcgattcgtgttgccaggtccacacaaccggcgggagaatttgttccgccgtggtgtcgatcacagatgacatcgcatcgaagatctgctctgcagctggacagctgcaccacggagaggagaatctgaaaataatggctagattctgtgctttccagatcgcgaagaccctggcagacaacagattttcctgggacagcgtaacgatgttgaggctctactactcggtagatctcgccgtggcggcagatgcagtgtccggagcattttccgaggccttggccgagcttgcccaagacaacccttccatgagaactgacgttcctttctacaacgttgtgcccgtagccggagctggccgctctgcgtgtgccaacgacataatggcgtgcgagttactggcatccaacgtctccagtgcgaagtccataccagccgaaccgttcgctgtgacgcctgcttgaatgcagctttccttcggaaattggaggtgggcgcacgttggaatttctgccagaggagccggtggccagtcaactgccagttggacgacgacggttgaccagcttctctagggctggcggcggtagcttcgtttctgtgctggcggtcgattaaaaaaaaagaccgtacggtgatcatcacagatgcacccatactgtattattctgtttcagcgtcctatacaaagtatacattgggtctgaattctgattagcctgtgctgatgcttgcaatgacattggttcttctgtgtacagactacggacagagtcccggtcagtaacgtgtgtgtacttgttcttcctctgtgttgacattcttgctcgatggtggaacctgtcgcagttggcggaggtgaagccgcgtagctcacttaggtctgccaaacacttcacttcttagattgtttctgtggaaatcgcttctgatgaatgcaaaatcaattaagtcgtccggttttgatgggaggaatcctacgcttcttaaactctaaattgcacatatttctttatttttctccgcatacaaatttgatgttgaatgcaaaatttatcaagtcgtcgtgtcttgatgagaggaacccgacgtttcttaaatcctaaattgcacagatttctttatctttttccacatgcaacattgttgacatctagattctcgttacagctagatcttt

SEQ ID NO: 56308 - DNA, 2587 bp, Zea Mays
agagaaagcgaagagcaacaagagcaaagcgaaaggcgggcgcagctgtccgctgccttgccttgccttgccttgcctgtgctgtgcgaacctgctcccagttagtagtattcagtttccttatcggctgctgcccatttccgccccctcccgtcttttcccttccgcgtcggtctcctcccccactcttctacttcttgctgtcgtcgtcttctctcgactccccgtcccctccctctgcctctcccacccgccgcttccggattccgccgcccgtgccctcgccaccaggaattccactcggaccgctgcgtggattcctcggctcgccgtccggatctggcctcgctgagctgcagctgccgcgaatcccgactcgattcggccgcgctcggatctcgccggactagcggggaccgaggcctctcgattcgcctcggggccgagatggatcatgtggtcggaggcaagttcaagctcggcaagaagatcgggagcgggtcgttcggggagctcttcctagctgtgaacgtgcagaccggagaggaggtcgccgtcaagctggaaaatgtcaagacgaagcacccgcagcttcactacgagtccaagctatacatgcttctccaaggaggaactggcattccgcacctgaagtggttcggcgttgagggggagtataacgtgatggtgatcgatcttctcggccctagccttgaggacttgttcaactattgcagtagaaagttttctctcaagaccgtgctcatgcttgctgaccaaatgattaatcgggtcgagtacatgcatcaaaaggggtttctgcaccgtgatataaagcctgataattttcttatggggcttggtaggaaagccaatcaggtctgatcctatatacatgcttcactcttgctggccaactcattacatttgagccgaatgttttttacgtgcattttgctgcacttgagaagcccaaaagatcctgcactagtgacttggctggcttggggttagtgtgtgttatgtgatgtatttgattacgacgacgatttccttagcgtgcttgtattttacagtctgctatatatagtttatttctttaccttcggtgaatgctggatggtttccttgtctatatagctgccaatatgttatattctggaaaacaccttttctctctctctctctgggattgaggtctctcggtgtaatgattgttgaacttattggcttttgtggcaggtatatataatagactatggactcgcaaagaaatatagggatcttcaaactcataagcacatcccatacagagagaacaagaacctcactggaactgcacgatatgcgagtgtcaatacccaccttggcgttgaacaaagcaggagagatgatttagaatctcttggttacgttcttatgtacttccttaggggcagcctaccatggcaggggctgaaagcagggaccaagaagcagaaatatgacaaaatcagcgagaaaaagatgctcactcccgtggaggtactctgcaaatcgtatccatcagaatttatctcctatttccactactgccgttcattgcggtttgaagacaagcctgattactcttacctgaagagactattccgcgatctctttattcgggaaggataccagtttgactatgtgttcgactggaccattctgaagtatcctcagataggctccaacccgcggatgagggtgaaaggactagtggagctgctggaccctcgatggacaagattgagaaggccacaggagaagcaggcggtagaaggaatcttagtggtcctgtgaaccagactgacagttatgcacaacgaccgcgtgagaccgtatctatgtcattaaaggaaattatgcatagcactgaccggtctggggaaaggaccatggagagaccacgtacatcctcgcgcacaggcagtgcatcccgtagagctgttgcatcaagcagcaggcaggcctcatctgtggaaccaagtgagcagcagtatagccgggcaagcagattgttctctagcaacagtggcagtcgcccatctagcacccagagggtgaacccatcgccaggcgaggcaagggctacctccctctcacgggcggcagtcgcgagaggcgctcgcgacgagccactccatcgcagcctggagcttctgtccctcggtggcggcgggaaaaggaagtagtggcaaggaaagcgagcatctgagagcgggcggaagggaagaacgcttgtttgcgactctgtaaatgacaggattcgtcaacagtttccctggggcttcccatagtttccttggtgctccggtctgttgtaccattgcttcatagatagcaacgattccttgttaaacgtgtgctgtgttgcaggttgcgttagggccaagtcctagcctttgtgatggtgattacatttaggggtggtcaagattcacttatttatgtttcttcaccctttcctggactcggcgacttttttcatgtcgaactctgaattttcttattcaacagaagttgataaaaaaggacttcctgtgtaaaccaaataaaaaaacttctc

SEQ ID NO: 56309 - DNA, 2873 bp, Zea Mays
agagaaagcgaagagcaacaagagcaaagcgaaaggcgggcgcagctgtccgctgccttgccttgccttgccttgcctgtgctgtgcgaacctgctcccagttagtagtattcagtttccttatcggctgctgcccatttccgccccctcccgtcttttcccttccgcgtcggtctcctcccccactcttctacttcttgctgtcgtcgtcttctctcgactccccgtcccctccctctgcctctcccacccgccgcttccggattccgccgcccgtgccctcgccaccaggaattccactcggagtaaggagtgttttcccccgctgcttgcttcgcttctccggtcccgggacccgccccgctttcgcccgacttagattccacttctgtccgttcgctcgctcgctcctttgttcttatcccccttgctttgctcgttcgttcgattggagctagccgctgcgtggattcctcggctcgccgtccggatctggcctcgctgagctgcagctgccgcgaatcccgactcgattcggccgcgctcggatctcgccggactagcggggaccgaggcctctcgattcgcctcggggccgagatggatcatgtggtcggaggcaagttcaagctcggcaagaagatcgggagcgggtcgttcggggagctcttcctagctgtgaacgtgcagaccggagaggaggtcgccgtcaagctggaaaatgtcaagacgaagcacccgcagcttcactacgagtccaagctatacatgcttctccaaggaggaagtaggccctagagtcctgtcctgtcctgtccagttttacttctgggacggtactctgtggttagttgctagcatgatgcgcgagttgggctaaccttccgctcccccccttttttttgtttcgtcacagctggcattccgcacctgaagtggttcggcgttgagggggagtataacgtgatggtgatcgatcttctcggccctagccttgaggacttgttcaactattgcagtagaaagttttctctcaagaccgtgctcatgcttgctgaccaaatgattaatcgggtcgagtacatgcatcaaaaggggtttctgcaccgtgatataaagcctgataattttcttatggggcttggtaggaaagccaatcaggtctgatcctatatacatgcttcactcttgctggccaactcattacatttgagccgaatgttttttacgtgcattttgctgcacttgagaagcccaaaagatcctgcactagtgacttggctggcttggggttagtgtgtgttatgtgatgtatttgattacgacgacgatttccttagcgtgcttgtattttacagtctgctatatatagtttatttctttaccttcggtgaatgctggatggtttccttgtctatatagctgccaatatgttatattctggaaaacaccttttctctctctctctctgggattgaggtctctcggtgtaatgattgttgaacttattggcttttgtggcaggtatatataatagactatggactcgcaaagaaatatagggatcttcaaactcataagcacatcccatacagagagaacaagaacctcactggaactgcacgatatgcgagtgtcaatacccaccttggcgttgaacaaagcaggagagatgatttagaatctcttggttacgttcttatgtacttccttaggggcagcctaccatggcaggggctgaaagcagggaccaagaagcagaaatatgacaaaatcagcgagaaaaagatgctcactcccgtggaggtactctgcaaatcgtatccatcagaatttatctcctatttccactactgccgttcattgcggtttgaagacaagcctgattactcttacctgaagagactattccgcgatctctttattcgggaaggataccagtttgactatgtgttcgactggaccattctgaagtatcctcagataggctccaacccgcggatgagggcaggtgaaaggactagtggagctgctggaccctcgatggacaagattgagaaggccacaggagaagcaggcggtagaaggaatcttagtggtcctgtgaaccagactgacagttatgcacaacgaccgcgtgagaccgtatctatgtcattaaaggaaattatgcatagcactgaccggtctggggaaaggaccatggagagaccacgtacatcctcgcgcacaggcagtgcatcccgtagagctgttgcatcaagcagcaggcaggcctcatctgtggaaccaagtgagcagcagtatagccgggcaagcagattgttctctagcaacagtggcagtcgcccatctagcacccagagggtgaacccatcgccaggcgaggcaagggctacctccctctcacgggcggcagtcgcgagaggcgctcgcgacgagccactccatcgcagcctggagcttctgtccctcggtggcggcgggaaaaggaagtagtggcaaggaaagcgagcatctgagagcgggcggaagggaagaacgcttgtttgcgactctgtaaatgacaggattcgtcaacagtttccctggggcttcccatagtttccttggtgctccggtctgttgtaccattgcttcatagatagcaacgattccttgttaaacgtgtgctgtgttgcaggttgcgttagggccaagtcctagcctttgtgatggtgattacatttaggggtggtcaagattcacttatttatgtttcttcaccctttcctggactcggcgacttttttcatgtcgaactctgaattttcttattcaacagaagttgataaaaaaggacttcctgtgtaaaccaaataaaaaaacttctc

SEQ ID NO: 56310 - DNA, 3367 bp, Zea Mays
accgcacccggccacccacgcagcaaagatcatcgtctctccgtcctcgcgcagtcgcgcggcggcccgatccacttctccgctctccctcttcccgagcttcaaacaaaaagggtccaaaccaggctaccgttacagctgctcggctgcaccgccaccaacggctattctcatttcaaatcccttcccctcttctccccgtcctccctccaccatccacatcgccctcccctccatctctcgcagcgtccgctccgcctcccgaaaccctagctcggctgatcctgatcccccccaacaccgatggcgccgccgcccaccccgcgttcgacgccggcgcaggtgccgccgggcgcggccgcgacgcctctcaggacgcccgcgtccaagcaccgcctccatttccccgccgccaccccgaggaacgcccaccacgccaaccacggcggcggcggtgccacggagcacccggtcgaggtgatcggccgcatccggaacctcgcctcggggtccgcgtccgcgctggagatcatgggaagcgggacggccgtgcgcgtgcgcggcgacgcggtcgggtgccgcgacttcaccctcgacggcgtctccgtgtccgaagaggaggacctcgagggtttctaccgccgcttcgtgcgctccaggatccagggcgtccgggtcggggccaagtgcacagtcatggtgtacgggcccactgggtccgggaagagccacaccatgttcggctgcaccaagcagcccgggatcgtgtaccgcgcgcttagggacatcctggagggaggcgaaggcgattcagcggaggatgacgccgggtttgacgccggcctcttcgtgcaggtcgcggtgctggagatctataacgaggagatctacgatttgctcgtgggaagcggggccactgctaaaggaaacacccccaagttctgtatctatgcacaggcaaaactggaagtaatggggaaaaaagcgaagaacgcaagttatatatctggaaatgaagctgggaggatatcaagagaagtgtttaaggtggaaaaacgaagaactgtgaagagcacactttgcaatgagagaagttcacggagccattgcatgattatcctggatgtcccatctgtgggaggaagattaatgcttgtggacatggctggatctgaaaacatagaagctgcaggacaaacaggatttgaagccaaaatgcagacagcaaaaatcaatcaagggaacactgctttgaagcgagtggttgagtctattgctaatggtgattcccatgttccattcagggacagcaaactcacaatgctactacaggattcattcgaggatgacaaatcaaaaatcctgatgattctgtgtgctagtcctgacccaaaggaactgcacaagacagtttctactttggaatatggtgctaaggcaaagtgtattgtccgtgctgctcatgccacaacacctagggacaaaatgagctccgaggagtcatctgtgatgctcaattcaagaatcgttgcaatgaaccagttcatccacaagcttcaaaaagagaacaaattgagggagaaagagcgcaatgaggcccagaatgtgctaaggctgaaggaagaggagctagcacaactgagagcaaagctcaagctgatagaagggcaagggaaagctaccgagaatgagattaattcaaaagttatggagaaaacccagttgttgaggagtgaactcatgaagatggaagaagcgatgcttaagcagcagcaagagcttacttcactgagacagcgactacaggaggttgagcacgaaaaggccgatggttgtcagccattgcagcaggatataattggaggtagattgctggcacggctatcagagatgcctgcaggccttgatcaatcagtggcaatggacatgtctatggacttagacatgggagatcaaccggtcatgcaagatgtcaaggtaataaaggaggatactcgccagcagggccacatatggaatcacacagccacagcagcaagtgcttgcacagggtctgtagtgcaagaagatgatgtcaagttgtccgggtatcctgaaaaaactgtcctcagcaccgtgtttgaggagggagatgaggaggatgcagagaagtgtggtcttcaagaggaggtacgcaaggaggttgtagaggagaactttaatgtggacataacacaacatacactttctgagccagatgatcctgcgacaaggaagcatcggattgaaaacatattcaggctctgtggcaaccatcgtgaaatagctaagaaaccaaaggtccagtcaccagcaaaggaaatgttctgcagcgagaacaagtctccagcaaagcaagtgtttggggatcagaacaaatcgtcatcaaaccaaatttttggagatgaaaacaaggagccgtcggcatggggtgctatagagacccccatgtgcgatgttagagtgactgacagcccagtgtcttctcagctttctccaatcgtatgccaagttgtggctgcaccattatcagaggaactgaatacatgcagtgcagtggaaggaagtgatccgagcaaggagaagaacagtcttgctggacagaaggatggcggcggcctcttggaagtttacataaaatgggagtctggcaacctgatcaaagggctgaagctactgcgcaactcgtgcctttcagatctgaggaagcttatagaggctcatttcgaagaagtgggcagcaaacagcagcagcagcagttcatcttccttctccttggggatccgtccggtgccccggtgtccagggacaaggaagcctcggtgcagataagcaggctgccgcactggaacaaccaggcggacggctacctggcgtgcctgcgcgcggacaagaagccggctgcggaccacacgcccttcagcccgctggacagcaagctgaacacggttgtgaaggacgcgcacctagccggtgcaatgttcgcctaaggcctgtagccctccagcagctacatccgggagctgagagcttgagctccggtgggcatctgttgcggtcacatgactatcatgtatcttctatagttctatgtattatattgattccccgtaaaatattgattgctagtcatgtttcttagcaggacctactagcgagatagctgtaatttcgatggcatcttcagatgccagttctttttcctctctggccgcgagggaaaaaaaaaggttcaggctgctctttgtttttgataatcctatgccagaattcagtcattgtcactctcaaaaggccctttaatcattcagagatgttttccacgtttatcacgtgaaactgtgaaag

SEQ ID NO: 56311 - DNA, 3389 bp, Zea Mays
accgcacccggccacccacgcagcaaagatcatcgtctctccgtcctcgcgcagtcgcgcggcggcccgatccacttctccgctctccctcttcccgagcttcaaacaaaaagggtccaaaccaggctaccgttacagctgctcggctgcaccgccaccaacggctattctcatttcaaatcccttcccctcttctccccgtcctccctccaccatccacatcgccctcccctccatctctcgcagcgtccgctccgcctcccgaaaccctagctcggctgatcctgatcccccccaacaccgatggcgccgccgcccaccccgcgttcgacgccggcgcaggtgccgccgggcgcggccgcgacgcctctcaggacgcccgcgtccaagcaccgcctccatttccccgccgccaccccgaggaacgcccaccacgccaaccacggcggcggcggtgccacggagcacccggtcgaggtgatcggccgcatccggaacctcgcctcggggtccgcgtccgcgctggagatcatgggaagcgggacggccgtgcgcgtgcgcggcgacgcggtcgggtgccgcgacttcaccctcgacggcgtctccgtgtccgaagaggaggacctcgagggtttctaccgccgcttcgtgcgctccaggatccagggcgtccgggtcggggccaagtgcacagtcatggtgtacgggcccactgggtccgggaagagccacaccatgttcggctgcaccaagcagcccgggatcgtgtaccgcgcgcttagggacatcctggagggaggcgaaggcgattcagcggaggatgacgccgggtttgacgccggcctcttcgtgcaggtcgcggtgctggagatctataacgaggagatctacgatttgctcgtgggaagcggggccactgctaaaggaaacacccccaaggtgtatcgttgaagcctcgcagttctgtatctatgcacaggcaaaactggaagtaatggggaaaaaagcgaagaacgcaagttatatatctggaaatgaagctgggaggatatcaagagaagtgtttaaggtggaaaaacgaagaactgtgaagagcacactttgcaatgagagaagttcacggagccattgcatgattatcctggatgtcccatctgtgggaggaagattaatgcttgtggacatggctggatctgaaaacatagaagctgcaggacaaacaggatttgaagccaaaatgcagacagcaaaaatcaatcaagggaacactgctttgaagcgagtggttgagtctattgctaatggtgattcccatgttccattcagggacagcaaactcacaatgctactacaggattcattcgaggatgacaaatcaaaaatcctgatgattctgtgtgctagtcctgacccaaaggaactgcacaagacagtttctactttggaatatggtgctaaggcaaagtgtattgtccgtgctgctcatgccacaacacctagggacaaaatgagctccgaggagtcatctgtgatgctcaattcaagaatcgttgcaatgaaccagttcatccacaagcttcaaaaagagaacaaattgagggagaaagagcgcaatgaggcccagaatgtgctaaggctgaaggaagaggagctagcacaactgagagcaaagctcaagctgatagaagggcaagggaaagctaccgagaatgagattaattcaaaagttatggagaaaacccagttgttgaggagtgaactcatgaagatggaagaagcgatgcttaagcagcagcaagagcttacttcactgagacagcgactacaggaggttgagcacgaaaaggccgatggttgtcagccattgcagcaggatataattggaggtagattgctggcacggctatcagagatgcctgcaggccttgatcaatcagtggcaatggacatgtctatggacttagacatgggagatcaaccggtcatgcaagatgtcaaggtaataaaggaggatactcgccagcagggccacatatggaatcacacagccacagcagcaagtgcttgcacagggtctgtagtgcaagaagatgatgtcaagttgtccgggtatcctgaaaaaactgtcctcagcaccgtgtttgaggagggagatgaggaggatgcagagaagtgtggtcttcaagaggaggtacgcaaggaggttgtagaggagaactttaatgtggacataacacaacatacactttctgagccagatgatcctgcgacaaggaagcatcggattgaaaacatattcaggctctgtggcaaccatcgtgaaatagctaagaaaccaaaggtccagtcaccagcaaaggaaatgttctgcagcgagaacaagtctccagcaaagcaagtgtttggggatcagaacaaatcgtcatcaaaccaaatttttggagatgaaaacaaggagccgtcggcatggggtgctatagagacccccatgtgcgatgttagagtgactgacagcccagtgtcttctcagctttctccaatcgtatgccaagttgtggctgcaccattatcagaggaactgaatacatgcagtgcagtggaaggaagtgatccgagcaaggagaagaacagtcttgctggacagaaggatggcggcggcctcttggaagtttacataaaatgggagtctggcaacctgatcaaagggctgaagctactgcgcaactcgtgcctttcagatctgaggaagcttatagaggctcatttcgaagaagtgggcagcaaacagcagcagcagcagttcatcttccttctccttggggatccgtccggtgccccggtgtccagggacaaggaagcctcggtgcagataagcaggctgccgcactggaacaaccaggcggacggctacctggcgtgcctgcgcgcggacaagaagccggctgcggaccacacgcccttcagcccgctggacagcaagctgaacacggttgtgaaggacgcgcacctagccggtgcaatgttcgcctaaggcctgtagccctccagcagctacatccgggagctgagagcttgagctccggtgggcatctgttgcggtcacatgactatcatgtatcttctatagttctatgtattatattgattccccgtaaaatattgattgctagtcatgtttcttagcaggacctactagcgagatagctgtaatttcgatggcatcttcagatgccagttctttttcctctctggccgcgagggaaaaaaaaaggttcaggctgctctttgtttttgataatcctatgccagaattcagtcattgtcactctcaaaaggccctttaatcattcagagatgttttccacgtttatcacgtgaaactgtgaaag

SEQ ID NO: 56312 - DNA, 1107 bp, Zea Mays
cctcgagttcacggggtgctacttcatggctgaaacattcagaactcacgcgtatggaagctgtaccagcagctcccaatacaagaacctggcatacgtgctctcttttcctgccatactactggcgagcgatgcagagtgtctgagaaggtacctggaagaaggccacgacatgaaccagcttgctaacgccggcaagtacgtatcagcgatggtggcagctgcggttaggttcaagtacgccgcgacgcctacgccgttctggatgtggatggtcattgcatcatctaccggcgccaccatctaccagctctactgggatttcgtcatggactggggcttcctgaacccaaaatccaagaacttttggctccgggatcagctcatcctcaagaacaagtcgatctactatgcttccatgatgctcaacctcgtgctgcgcctagcctgggccgagagcgtgatgaaactccgtctcggtatggtggagtctcgcctgctggatttctcgctcgcttcgctggaaatcatccgacgagggcactggaacttctacaggctggagaatgagcacttgaacaacgctggaaagttcagagcagtgaagactgtcccattaccgttccgtgagcttgaaactgactgatgaagacggagctccatgttgaacagcaggaatttagggggaagaattccaggaatggatacactgtcccctgcaagaactggtgtttaagtggtaataaaacgaatcggagagcgtaactgcacaagaccgagacgctgcagattttaggatggaataagctcaggcgggtgcgccagggtataacatgaggcgttctggtcaggagagatgatgtgcatttaactagctagtggtcgattgagaattgttgcatgtcaatcgactaacaagatcttaattttgtcgatcgtttaagttgtgaaaatgtatctgggaattggtgactgaaaaaaattgcatggaacgaaacatatggtcgttaactaatttatcattccaggggtaagaactagataacatctgctagcaagtactacagtgaaagcaagatgcttgacacggcagatggcatcacatgt

SEQ ID NO: 56313 - DNA, 2921 bp, Zea Mays
ctcctacataccggtccctgtccctgtcgacccctcgaggcggatcccacgatggtgaagttctcgcgggagtacgaggccagcatcatccccgagtggaaggccgccttcgtcgactacaagggcctcaagaagctcgtcaagaggatcaagatcgcccgccgcgaccgcgctgcccgtagtaccagcaacgaccacgacgacgccaccaccaccacctatggcttctccgtcctcgaccccgtccgcgccctcgcctcccacttcaacaacgccacgcccccggcctcgccagagggcggcagcgacgacgccttgaggagcttggaatcggattcaggggagctcgtgagagccacggacaagcatgagcaagagtttgtggagagggcggacgaggagctggagaaggtgaacaagttctacgcggcgcaggaggcggacatgctggcgcgcggcgacgcgctcatcgagcagctccgcatcctggcggacgtcaagcggatcctcgccgaccacgcggcggcgtcgtcccggcgcggccgcgcgcggctcgcccggaccggcgggaactcgtcgccgccgtccgtggacggctccaacagcggccggcacctcctctcttctcccttcgtggcctcgtcgccgcagtccatgtcagacgggagcgtgcagctgcagcaggcgcgcgtggcggagggcgcggctgtggcggaggaggtgatggcggcgctggagcgcaacggcgtgagcttcgtgggcggcgggctgggcaaggccaagaaggacggcagcgggaagcagctcatgggggcgcgccgcgctgctgcagctgccggccacggtgcgcatcgacatcccgcccaccagccccggccgggccgcgctcaaggtgtgggaggagctcgtcaacgtgctccgcaaggacggcgccgaccccgccgccgccttcgtccaccgcaagaaggtccagcacgccgagaagagcatccgcgacgccttcctcgccctctaccgcggcctcgacctcctcaagaagttcagctccctcaacgtgaaggctttcaccaaaatactgaagaaattcgtcaaggtgtcggagcagcatcggaaaggagacctgttttcagagaaggtgaagaggtcgccgttcagcagctctgacaaggtgcttcagctggcggacgaggtggagtgcatcttcttgaggcatttcgcgggcaacgacaggaaggtggccatgaagtacctcaagccgcagcagcccaggaacacccacatggtcaccttcctcgtaggcctgttcacaggcacatttgtgtccctgttcatcatatactcggtcctagcccatgtcgccggcattttctcttcgaccggaaacacagcctacatggagatcgtttaccatgtcctcagcatgtttgcgctcatcagcctgcacgtcttcctgtacgggtgcaacctctccatgtggaagggcaccaggatcaaccacaacttcatcttcgacttctccagcaccgccctgacgcaccgggacgccttcctcatgtcggcgtccatcatgtgcaccgtcgtcgcggcgctggtcgtcaacctgttcctcaggaacgccggggcgacctacgccaacgcgctgcccggggcacttctgctgctgtcagcaggggttctgttctgcccattcaacattttctaccgctccacgcgcttctgcttcatgcgcgtcatgcgcaacatcgtgctgtcgccattctacaaggttctgatggcggatttcttcatggctgaccagctaaccagccagatcccactgctaagacacctcgagttcacggggtgctacttcatggctgaaacattcagaactcacgcgtatggaagctgtaccagcagctcccaatacaagaacctggcatacgtgctctcttttcctgccatactactggcgagcgatgcaggtacctggaagaaggccacgacatgaaccagcttgctaacgccggcaagtacgtatcagcgatggtggcagctgcggttaggttcaagtacgccgcgacgcctacgccgttctggatgtggatggtcattgcatcatctaccggcgccaccatctaccagctctactgggatttcgtcatggactggggcttcctgaacccaaaatccaagaacttttggctccgggatcagctcatcctcaagaacaagtcgatctactatgcttccatgatgctcaacctcgtgctgcgcctagcctgggccgagagcgtgatgaaactccgtctcggtatggtggagtctcgcctgctggatttctcgctcgcttcgctggaaatcatccgacgagggcactggaacttctacaggctggagaatgagcacttgaacaacgctggaaagttcagagcagtgaagactgtcccattaccgttccgtgagcttgaaactgactgatgaagacggagctccatgttgaacagcaggaatttagggggaagaattccaggaatggatacactgtcccctgcaagaactggtgtttaagtggtaataaaacgaatcggagagcgtaactgcacaagaccgagacgctgcagattttaggatggaataagctcaggcgggtgcgccagggtataacatgaggcgttctggtcaggagagatgatgtgcatttaactagctagtggtcgattgagaattgttgcatgtcaatcgactaacaagatcttaattttgtcgatcgtttaagttgtgaaaatgtatctgggaattggtgactgaaaaaaattgcatggaacgaaacatatggtcgttaactaatttatcattccaggggtaagaactagataacatctgctagcaagtactacagtgaaagcaagatgcttgacacggcagatggcatcacatgt

SEQ ID NO: 56314 - DNA, 2936 bp, Zea Mays
ctcctacataccggtccctgtccctgtcgacccctcgaggcggatcccacgatggtgaagttctcgcgggagtacgaggccagcatcatccccgagtggaaggccgccttcgtcgactacaagggcctcaagaagctcgtcaagaggatcaagatcgcccgccgcgaccgcgctgcccgtagtaccagcaacgaccacgacgacgccaccaccaccacctatggcttctccgtcctcgaccccgtccgcgccctcgcctcccacttcaacaacgccacgcccccggcctcgccagagggcggcagcgacgacgccttgaggagcttggaatcggattcaggggagctcgtgagagccacggacaagcatgagcaagagtttgtggagagggcggacgaggagctggagaaggtgaacaagttctacgcggcgcaggaggcggacatgctggcgcgcggcgacgcgctcatcgagcagctccgcatcctggcggacgtcaagcggatcctcgccgaccacgcggcggcgtcgtcccggcgcggccgcgcgcggctcgcccggaccggcgggaactcgtcgccgccgtccgtggacggctccaacagcggccggcacctcctctcttctcccttcgtggcctcgtcgccgcagtccatgtcagacgggagcgtgcagctgcagcaggcgcgcgtggcggagggcgcggctgtggcggaggaggtgatggcggcgctggagcgcaacggcgtgagcttcgtgggcggcgggctgggcaaggccaagaaggacggcagcgggaagcagctcatgggggcgcgccgcgctgctgcagctgccggccacggtgcgcatcgacatcccgcccaccagccccggccgggccgcgctcaaggtgtgggaggagctcgtcaacgtgctccgcaaggacggcgccgaccccgccgccgccttcgtccaccgcaagaaggtccagcacgccgagaagagcatccgcgacgccttcctcgccctctaccgcggcctcgacctcctcaagaagttcagctccctcaacgtgaaggctttcaccaaaatactgaagaaattcgtcaaggtgtcggagcagcatcggaaaggagacctgttttcagagaaggtgaagaggtcgccgttcagcagctctgacaaggtgcttcagctggcggacgaggtggagtgcatcttcttgaggcatttcgcgggcaacgacaggaaggtggccatgaagtacctcaagccgcagcagcccaggaacacccacatggtcaccttcctcgtaggcctgttcacaggcacatttgtgtccctgttcatcatatactcggtcctagcccatgtcgccggcattttctcttcgaccggaaacacagcctacatggagatcgtttaccatgtcctcagcagcatgtttgcgctcatcagcctgcacgtcttcctgtacgggtgcaacctctccatgtggaagggcaccaggatcaaccacaacttcatcttcgacttctccagcaccgccctgacgcaccgggacgccttcctcatgtcggcgtccatcatgtgcaccgtcgtcgcggcgctggtcgtcaacctgttcctcaggaacgccggggcgacctacgccaacgcgctgcccggggcacttctgctgctgtcagcaggggttctgttctgcccattcaacattttctaccgctccacgcgcttctgcttcatgcgcgtcatgcgcaacatcgtgctgtcgccattctacaaggttctgatggcggatttcttcatggctgaccagctaaccagccagatcccactgctaagacacctcgagttcacggggtgctacttcatggctgaaacattcagaactcacgcgtatggaagctgtaccagcagctcccaatacaagaacctggcatacgtgctctcttttcctgccatactactggcgagcgatgcaggtgtctgagaaggtacctggaagaaggccacgacatgaaccagcttgctaacgccggcaagtacgtatcagcgatggtggcagctgcggttaggttcaagtacgccgcgacgcctacgccgttctggatgtggatggtcattgcatcatctaccggcgccaccatctaccagctctactgggatttcgtcatggactggggcttcctgaacccaaaatccaagaacttttggctccgggatcagctcatcctcaagaacaagtcgatctactatgcttccatgatgctcaacctcgtgctgcgcctagcctgggccgagagcgtgatgaaactccgtctcggtatggtggagtctcgcctgctggatttctcgctcgcttcgctggaaatcatccgacgagggcactggaacttctacaggctggagaatgagcacttgaacaacgctggaaagttcagagcagtgaagactgtcccattaccgttccgtgagcttgaaactgactgatgaagacggagctccatgttgaacagcaggaatttagggggaagaattccaggaatggatacactgtcccctgcaagaactggtgtttaagtggtaataaaacgaatcggagagcgtaactgcacaagaccgagacgctgcagattttaggatggaataagctcaggcgggtgcgccagggtataacatgaggcgttctggtcaggagagatgatgtgcatttaactagctagtggtcgattgagaattgttgcatgtcaatcgactaacaagatcttaattttgtcgatcgtttaagttgtgaaaatgtatctgggaattggtgactgaaaaaaattgcatggaacgaaacatatggtcgttaactaatttatcattccaggggtaagaactagataacatctgctagcaagtactacagtgaaagcaagatgcttgacacggcagatggcatcacatgt

SEQ ID NO: 56315 - DNA, 3210 bp, Zea Mays
cgcatccagaatgcacattccaccagtttctttctttctttctttgcactgcactgctgctcgcctttatttaatttctcccctgcatcgacctaatattgttatcccctggctggctgggctaggctagcctagcaggtacgtaggctgccctcgcagcaccacgcacaggcgcactagctctctctcttagcgagcggcaaaccactcttcttcctcctccatatccatctccacctatataagccgcgcgccaggcagggttgcttccgccaccactcctacataccggtccctgtccctgtcgacccctcgaggcggatcccacgatggtgaagttctcgcgggagtacgaggccagcatcatccccgagtggaaggccgccttcgtcgactacaagggcctcaagaagctcgtcaagaggatcaagatcgcccgccgcgaccgcgctgcccgtagtaccagcaacgaccacgacgacgccaccaccaccacctatggcttctccgtcctcgaccccgtccgcgccctcgcctcccacttcaacaacgccacgcccccggcctcgccagagggcggcagcgacgacgccttgaggagcttggaatcggattcaggggagctcgtgagagccacggacaagcatgagcaagagtttgtggagagggcggacgaggagctggagaaggtgaacaagttctacgcggcgcaggaggcggacatgctggcgcgcggcgacgcgctcatcgagcagctccgcatcctggcggacgtcaagcggatcctcgccgaccacgcggcggcgtcgtcccggcgcggccgcgcgcggctcgcccggaccggcgggaactcgtcgccgccgtccgtggacggctccaacagcggccggcacctcctctcttctcccttcgtggcctcgtcgccgcagtccatgtcagacgggagcgtgcagctgcagcaggcgcgcgtggcggagggcgcggctgtggcggaggaggtgatggcggcgctggagcgcaacggcgtgagcttcgtgggcggcgggctgggcaaggccaagaaggacggcagcgggaagcagctcatgggggcgcgccgcgctgctgcagctgccggccacggtgcgcatcgacatcccgcccaccagccccggccgggccgcgctcaaggtgtgggaggagctcgtcaacgtgctccgcaaggacggcgccgaccccgccgccgccttcgtccaccgcaagaaggtccagcacgccgagaagagcatccgcgacgccttcctcgccctctaccgcggcctcgacctcctcaagaagttcagctccctcaacgtgaaggctttcaccaaaatactgaagaaattcgtcaaggtgtcggagcagcatcggaaaggagacctgttttcagagaaggtgaagaggtcgccgttcagcagctctgacaaggtgcttcagctggcggacgaggtggagtgcatcttcttgaggcatttcgcgggcaacgacaggaaggtggccatgaagtacctcaagccgcagcagcccaggaacacccacatggtcaccttcctcgtaggcctgttcacaggcacatttgtgtccctgttcatcatatactcggtcctagcccatgtcgccggcattttctcttcgaccggaaacacagcctacatggagatcgtttaccatgtcctcagcatgtttgcgctcatcagcctgcacgtcttcctgtacgggtgcaacctctccatgtggaagggcaccaggatcaaccacaacttcatcttcgacttctccagcaccgccctgacgcaccgggacgccttcctcatgtcggcgtccatcatgtgcaccgtcgtcgcggcgctggtcgtcaacctgttcctcaggaacgccggggcgacctacgccaacgcgctgcccggggcacttctgctgctgtcagcaggggttctgttctgcccattcaacattttctaccgctccacgcgcttctgcttcatgcgcgtcatgcgcaacatcgtgctgtcgccattctacaaggttctgatggcggatttcttcatggctgaccagctaaccagccagatcccactgctaagacacctcgagttcacggggtgctacttcatggctgaaacattcagaactcacgcgtatggaagctgtaccagcagctcccaatacaagaacctggcatacgtgctctcttttcctgccatactactggcgagcgatgcagtgtctgagaaggtacctggaagaaggccacgacatgaaccagcttgctaacgccggcaagtacgtatcagcgatggtggcagctgcggttaggttcaagtacgccgcgacgcctacgccgttctggatgtggatggtcattgcatcatctaccggcgccaccatctaccagctctactgggatttcgtcatggactggggcttcctgaacccaaaatccaagaacttttggctccgggatcagctcatcctcaagaacaagtcgatctactatgcttccatgatgctcaacctcgtgctgcgcctagcctgggccgagagcgtgatgaaactccgtctcggtatggtggagtctcgcctgctggatttctcgctcgcttcgctggaaatcatccgacgagggcactggaacttctacaggctggagaatgagcacttgaacaacgctggaaagttcagagcagtgaagactgtcccattaccgttccgtgagcttgaaactgactgatgaagacggagctccatgttgaacagcaggaatttagggggaagaattccaggaatggatacactgtcccctgcaagaactggtgtttaagtggtaataaaacgaatcggagagcgtaactgcacaagaccgagacgctgcagattttaggatggaataagctcaggcgggtgcgccagggtataacatgaggcgttctggtcaggagagatgatgtgcatttaactagctagtggtcgattgagaattgttgcatgtcaatcgactaacaagatcttaattttgtcgatcgtttaagttgtgaaaatgtatctgggaattggtgactgaaaaaaattgcatggaacgaaacatatggtcgttaactaatttatcattccaggggtaagaactagataacatctgctagcaagtactacagtgaaagcaagatgcttgacacggcagatggcatcacatgt

SEQ ID NO: 56316 - DNA, 3197 bp, Zea Mays
gcagcatgaataatgaactgcaagtgcaagctcgatctccactagatcgaagcagcgcaacacgcatccagaatgcacattccaccagtttctttctttctttctttgcactgcactgctgctcgcctttatttaatttctcccctgcatcgacctaatattgttatcccctggctggctgggctaggctagcctagcaggtacgtaggctgccctcgcagcaccacgcacaggcgcactagctctctctcttagcgagcggcaaaccactcttcttcctcctccatatccatctccacctatataagccgcgcgccaggcagggttgcttccgccaccactcctacataccggtccctgtccctgtcgacccctcgaggcggatcccacgatggtgaagttctcgcgggagtacgaggccagcatcatccccgagtggaaggccgccttcgtcgactacaagggcctcaagaagctcgtcaagaggatcaagatcgcccgccgcgaccgcgctgcccgtagtaccagcaacgaccacgacgacgccaccaccaccacctatggcttctccgtcctcgaccccgtccgcgccctcgcctcccacttcaacaacgccacgcccccggcctcgccagagcaagagtttgtggagagggcggacgaggagctggagaaggtgaacaagttctacgcggcgcaggaggcggacatgctggcgcgcggcgacgcgctcatcgagcagctccgcatcctggcggacgtcaagcggatcctcgccgaccacgcggcggcgtcgtcccggcgcggccgcgcgcggctcgcccggaccggcgggaactcgtcgccgccgtccgtggacggctccaacagcggccggcacctcctctcttctcccttcgtggcctcgtcgccgcagtccatgtcagacgggagcgtgcagctgcagcaggcgcgcgtggcggagggcgcggctgtggcggaggaggtgatggcggcgctggagcgcaacggcgtgagcttcgtgggcggcgggctgggcaaggccaagaaggacggcagcgggaagcagctcatgggggcgcgccgcgctgctgcagctgccggccacggtgcgcatcgacatcccgcccaccagccccggccgggccgcgctcaaggtgtgggaggagctcgtcaacgtgctccgcaaggacggcgccgaccccgccgccgccttcgtccaccgcaagaaggtccagcacgccgagaagagcatccgcgacgccttcctcgccctctaccgcggcctcgacctcctcaagaagttcagctccctcaacgtgaaggctttcaccaaaatactgaagaaattcgtcaaggtgtcggagcagcatcggaaaggagacctgttttcagagaaggtgaagaggtcgccgttcagcagctctgacaaggtgcttcagctggcggacgaggtggagtgcatcttcttgaggcatttcgcgggcaacgacaggaaggtggccatgaagtacctcaagccgcagcagcccaggaacacccacatggtcaccttcctcgtaggcctgttcacaggcacatttgtgtccctgttcatcatatactcggtcctagcccatgtcgccggcattttctcttcgaccggaaacacagcctacatggagatcgtttaccatgtcctcagcatgtttgcgctcatcagcctgcacgtcttcctgtacgggtgcaacctctccatgtggaagggcaccaggatcaaccacaacttcatcttcgacttctccagcaccgccctgacgcaccgggacgccttcctcatgtcggcgtccatcatgtgcaccgtcgtcgcggcgctggtcgtcaacctgttcctcaggaacgccggggcgacctacgccaacgcgctgcccggggcacttctgctgctgtcagcaggggttctgttctgcccattcaacattttctaccgctccacgcgcttctgcttcatgcgcgtcatgcgcaacatcgtgctgtcgccattctacaaggttctgatggcggatttcttcatggctgaccagctaaccagccagatcccactgctaagacacctcgagttcacggggtgctacttcatggctgaaacattcagaactcacgcgtatggaagctgtaccagcagctcccaatacaagaacctggcatacgtgctctcttttcctgccatactactggcgagcgatgcagtgtctgagaaggtacctggaagaaggccacgacatgaaccagcttgctaacgccggcaagtacgtatcagcgatggtggcagctgcggttaggttcaagtacgccgcgacgcctacgccgttctggatgtggatggtcattgcatcatctaccggcgccaccatctaccagctctactgggatttcgtcatggactggggcttcctgaacccaaaatccaagaacttttggctccgggatcagctcatcctcaagaacaagtcgatctactatgcttccatgatgctcaacctcgtgctgcgcctagcctgggccgagagcgtgatgaaactccgtctcggtatggtggagtctcgcctgctggatttctcgctcgcttcgctggaaatcatccgacgagggcactggaacttctacaggctggagaatgagcacttgaacaacgctggaaagttcagagcagtgaagactgtcccattaccgttccgtgagcttgaaactgactgatgaagacggagctccatgttgaacagcaggaatttagggggaagaattccaggaatggatacactgtcccctgcaagaactggtgtttaagtggtaataaaacgaatcggagagcgtaactgcacaagaccgagacgctgcagattttaggatggaataagctcaggcgggtgcgccagggtataacatgaggcgttctggtcaggagagatgatgtgcatttaactagctagtggtcgattgagaattgttgcatgtcaatcgactaacaagatcttaattttgtcgatcgtttaagttgtgaaaatgtatctgggaattggtgactgaaaaaaattgcatggaacgaaacatatggtcgttaactaatttatcattccaggggtaagaactagataacatctgctagcaagtactacagtgaaagcaagatgcttgacacggcagatggcatcacatgt

SEQ ID NO: 56317 - DNA, 2117 bp, Zea Mays
tgggccctttccctcgtttcttggctgaaccaaggtgtaagcggtttaccactgaagggctggccattaactgtgagctatgaaaaaaatgtcatcttatgtgctcatattttcttttggaacctgaccacatatgaatatccatgataccattttacagggaattgaccagttaaggccgaatttgggtgctcaaatgcagaagccatttctttcaacacagtcacagttccaacttatgtccccacagcagcaacaacaatacttagcacaggcccaagcacaagggaaccttggaaactcaactaattatggggatattgatccccgcagacttacagcattgaccaggggtagtttgaatggtaaagatagtcagcctgcaggaacggatggttgtattagttcccctatgcaatccagttcacccaaagtcagaccagaccaagagtatctcatgaagacatcttcccagcaaccccaggaacagcttcagcagcagcagcagaaccaacagcagcaacagagccaacaacaaatgcaacagaacaatagaaaaagaaagcagcctacttcttcaggaccagcaaatagtaccggtacaggaaacactgtgggtcctgcaaactccccaccatctacaccatccacacatactcctggggatggacttggaatgggtggtaatatgcgccacgttccaaagaacttaatgatttatggtgcggatggaactggacttgcctcctcttcaaatcaaatggatgacctggagcagtttggtgatgtgggctctttggacgataatgttgaatccttcttatccaatgatgatggagatcccagggatatttttgctgcactcaaaagaagtcctgcagagcctagcccagccgtttcaaaaggttttactttcagtgaagtcaactgttggcgcacaagcaacagcaaaattgtttgctgccacttctcttcagatggcaagattttggctagtgcaggacatgaaaagaaggctgtactttggaacatggaaaattttcagacacagtatacaccagaagagcatgcccttattatcactgatgtccgtttcaggcctaactctagtcagctggcaacatcttcttttgatagaactattaaattatggaatgctgccgatcctggattctctttgcatacattcactgggcacaacggccaggtcacatcattagattttcatccaaagaaaacagaccttctatgctcttgtgatggcagtggtgaaatccggtactggaatgtgacccagtttgcatgcttgcgtgccataaagggtggtagtgcccaagtccggtttcagcctcatgttggacagtttttagccgcagctgctgaaaacgtggtttccatatttgacattgagacacatgggaaaaaatacactctacagggccataacactgatgtgcagtcagtgtgctgggacaacaatggggaatatattgcatctgtcagtcaggacctagttaaggtttggtcaatgtcaactggggattgcatttatgagcttagttccaatggaaacaagttccattcttgcgtgttccacccgagctattccaatctcttggttattggaggctaccagtctctcgaggtttggaacatggtgaaaaaccagagcctaaccgtacaagctcatgaaggtctaattgcggcgctggcgcagtcaccagtcacagggatgatagcttctgctagccatgacaactctgtcaaggtgtggaaataacagtaacaacgattatgatgcatctaggtagttttttttccagggcaagtgaaatttctcctgctgaggcataaaataaggaagagtagtaaattagatggttgccggtcgcggttcagctgtccaagagcagtgagtttgttgatgggttgtattgtatttatgctgataggctgtttgtgtagctcagaaacaaaaaagaatacattggctgaaaaggtgtccgcctgttttattttttgtttctgccgtatcatatgtaaccatttaacgttccctgttttttaattggaactcgctgcgattggcatctggcagaaaaaaaaccagagatact

SEQ ID NO: 56318 - DNA, 3041 bp, Zea Mays
ctgctatgctatgcttaccccgttctctctctcctccctttctttctcatctactactactagactactagtaactccgcttcgcttcttccgaagcggcgcgggcggaagcgagggcagctcacaccaccgtgccgcgcgcgcgcgctctccacccaccacctaattccgccgccgagctcgccgacgcggccacccgcgatcgggcatttggacccgtccccgctcgccgcccgcacggcggctcgttgcgggaaaagtttctcgaggccgtctgtgaccccgctccctcggccgcgagatcccgcccagccgcggtcgcagaatggcgcagagcaactgggaagcggataagatgctcgacgtgtatatctatgactacctgctgaagaggaacctgcagacgacggccaaggctttcatgaccgagggaaaggttgctgctgatccagttgcaattgatgctcctggagggtttctgtttgagtggtggtctgtcttttgggatatattcatcgcaaggacaaatgaaaagcattctgaagttgcagcggcatatctagaggcacagcaaataaaagcaagagagcaccagcagcagatgcagatgcagcaattgcaacttatgcatcaaagacatgctcaacttcagcgaactaacgcgaatcatccttcacttaatggtccaataaatgctttaaattctgagggcattttggggccatcaacagctagtgtcttagctgccaagatgtatgaagagcgattgaagcacccacattcaatggagtctgagggatcacaacttattgaagctagtagaatggctcttctcaagtcagcaacaaaccatgcagggcaattagttccagggactcctggaaatgtgtctacaactctgcagcaaatccaggatattaagagtgaaggtaacatgggagtaccccagagatctttacccatggatccatcatctttatacggtcaaggattaattcaacctaaacctggattgagcggtgcagggctgaaccaaggtgtaagcggtttaccactgaagggctggccattaactggaattgaccagttaaggccgaatttgggtgctcaaatgcagaagccatttctttcaacacagtcacagttccaacttatgtccccacagcagcaacaacaatacttagcacaggcccaagcacaagggaaccttggaaactcaactaattatggggatattgatccccgcagacttacagcattgaccaggggtagtttgaatggtaaagatagtcagcctgcaggaacggatggttgtattagttcccctatgcaatccagttcacccaaagtcagaccagaccaagagtatctcatgaagatgcagcagacatcttcccagcaaccccaggaacagcttcagcagcagcagcagaaccaacagcagcaacagagccaacaacaaatgcaacagaacaatagaaaaagaaagcagcctacttcttcaggaccagcaaatagtaccggtacaggaaacactgtgggtcctgcaaactccccaccatctacaccatccacacatactcctggggatggacttggaatgggtggtaatatgcgccacgttccaaagaacttaatgatttatggtgcggatggaactggacttgcctcctcttcaaatcaaatggatgacctggagcagtttggtgatgtgggctctttggacgataatgttgaatccttcttatccaatgatgatggagatcccagggatatttttgctgcactcaaaagaagtcctgcagagcctagcccagccgtttcaaaaggttttactttcagtgaagtcaactgttggcgcacaagcaacagcaaaattgtttgctgccacttctcttcagatggcaagattttggctagtgcaggacatgaaaagaaggctgtactttggaacatggaaaattttcagacacagtatacaccagaagagcatgcccttattatcactgatgtccgtttcaggcctaactctagtcagctggcaacatcttcttttgatagaactattaaattatggaatgctgccgatcctggattctctttgcatacattcactgggcacaacggccaggtcacatcattagattttcatccaaagaaaacagaccttctatgctcttgtgatggcagtggtgaaatccggtactggaatgtgacccagtttgcatgcttgcgtgccataaagggtggtagtgcccaagtccggtttcagcctcatgttggacagtttttagccgcagctgctgaaaacgtggtttccatatttgacattgagacacatgggaaaaaatacactctacagggccataacactgatgtgcagtcagtgtgctgggacaacaatggggaatatattgcatctgtcagtcaggacctagttaaggtttggtcaatgtcaactggggattgcatttatgagcttagttccaatggaaacaagttccattcttgcgtgttccacccgagctattccaatctcttggttattggaggctaccagtctctcgaggtttggaacatggtgaaaaaccagagcctaaccgtacaagctcatgaaggtctaattgcggcgctggcgcagtcaccagtcacagggatgatagcttctgctagccatgacaactctgtcaaggtgtggaaataacagtaacaacgattatgatgcatctaggtagttttttttccagggcaagtgaaatttctcctgctgaggcataaaataaggaagagtagtaaattagatggttgccggtcgcggttcagctgtccaagagcagtgagtttgttgatgggttgtattgtatttatgctgataggctgtttgtgtagctcagaaacaaaaaagaatacattggctgaaaaggtgtccgcctgttttattttttgtttctgccgtatcatatgtaaccatttaacgttccctgttttttaattggaactcgctgcgattggcatctggcagaaaaaaaaccagagatact

SEQ ID NO: 56319 - DNA, 3085 bp, Zea Mays
ctgctatgctatgcttaccccgttctctctctcctccctttctttctcatctactactactagactactagtaactccgcttcgcttcttccgaagcggcgcgggcggaagcgagggcagctcacaccaccgtgccgcgcgcgcgcgctctccacccaccacctaattccgccgccgagctcgccgacgcggccacccgcgatcgggcatttggacccgtccccgctcgccgcccgcacggcggctcgttgcgggaaaagtttctcgaggccgtctgtgaccccgctccctcggccgcgagatcccgcccagccgcggtcgcagaatggcgcagagcaactgggaagcggataagatgctcgacgtgtatatctatgactacctgctgaagaggaacctgcagacgacggccaaggctttcatgaccgagggaaaggttgctgctgatccagttgcaattgatgctcctggagggtttctgtttgagtggtggtctgtcttttgggatatattcatcgcaaggacaaatgaaaagcattctgaagttgcagcggcatatctagaggcacagcaaataaaagcaagagagcaccagcagcagatgcagatgcagcaattgcaacttatgcatcaaagacatgctcaacttcagcgaactaacgcgaatcatccttcacttaatggtccaataaatgctttaaattctgagggcattttggggccatcaacagctagtgtcttagctgccaagatgtatgaagagcgattgaagcacccacattcaatggagtctgagggatcacaacttattgaagctagtagaatggctcttctcaagtcagcaacaaaccatgcagggcaattagttccagggactcctggaaatgtgtctacaactctgcagcaaatccaggcacggaatcagcaaacgattgatattaagagtgaaggtaacatgggagtaccccagagatctttacccatggatccatcatctttatacggtcaaggattaattcaacctaaacctggattgagcggtgcaggtgggccctttccctcgtttcttggctgaaccaaggtgtaagcggtttaccactgaagggctggccattaactggaattgaccagttaaggccgaatttgggtgctcaaatgcagaagccatttctttcaacacagtcacagttccaacttatgtccccacagcagcaacaacaatacttagcacaggcccaagcacaagggaaccttggaaactcaactaattatggggatattgatccccgcagacttacagcattgaccaggggtagtttgaatggtaaagatagtcagcctgcaggaacggatggttgtattagttcccctatgcaatccagttcacccaaagtcagaccagaccaagagtatctcatgaagatgcagcagacatcttcccagcaaccccaggaacagcttcagcagcagcagcagaaccaacagcagcaacagagccaacaacaaatgcaacagaacaatagaaaaagaaagcagcctacttcttcaggaccagcaaatagtaccggtacaggaaacactgtgggtcctgcaaactccccaccatctacaccatccacacatactcctggggatggacttggaatgggtggtaatatgcgccacgttccaaagaacttaatgatttatggtgcggatggaactggacttgcctcctcttcaaatcaaatggatgacctggagcagtttggtgatgtgggctctttggacgataatgttgaatccttcttatccaatgatgatggagatcccagggatatttttgctgcactcaaaagaagtcctgcagagcctagcccagccgtttcaaaaggttttactttcagtgaagtcaactgttggcgcacaagcaacagcaaaattgtttgctgccacttctcttcagatggcaagattttggctagtgcaggacatgaaaagaaggctgtactttggaacatggaaaattttcagacacagtatacaccagaagagcatgcccttattatcactgatgtccgtttcaggcctaactctagtcagctggcaacatcttcttttgatagaactattaaattatggaatgctgccgatcctggattctctttgcatacattcactgggcacaacggccaggtcacatcattagattttcatccaaagaaaacagaccttctatgctcttgtgatggcagtggtgaaatccggtactggaatgtgacccagtttgcatgcttgcgtgccataaagggtggtagtgcccaagtccggtttcagcctcatgttggacagtttttagccgcagctgctgaaaacgtggtttccatatttgacattgagacacatgggaaaaaatacactctacagggccataacactgatgtgcagtcagtgtgctgggacaacaatggggaatatattgcatctgtcagtcaggacctagttaaggtttggtcaatgtcaactggggattgcatttatgagcttagttccaatggaaacaagttccattcttgcgtgttccacccgagctattccaatctcttggttattggaggctaccagtctctcgaggtttggaacatggtgaaaaaccagagcctaaccgtacaagctcatgaaggtctaattgcggcgctggcgcagtcaccagtcacagggatgatagcttctgctagccatgacaactctgtcaaggtgtggaaataacagtaacaacgattatgatgcatctaggtagttttttttccagggcaagtgaaatttctcctgctgaggcataaaataaggaagagtagtaaattagatggttgccggtcgcggttcagctgtccaagagcagtgagtttgttgatgggttgtattgtatttatgctgataggctgtttgtgtagctcagaaacaaaaaagaatacattggctgaaaaggtgtccgcctgttttattttttgtttctgccgtatcatatgtaaccatttaacgttccctgttttttaattggaactcgctgcgattggcatctggcagaaaaaaaaccagagatact

SEQ ID NO: 56320 - DNA, 3077 bp, Zea Mays
cccatgcctcttctccttcactctctgctatgctatgcttaccccgttctctctctcctccctttctttctcatctactactactagactactagtaactccgcttcgcttcttccgaagcggcgcgggcggaagcgagggcagctcacaccaccgtgccgcgcgcgcgcgctctccacccaccacctaattccgccgccgagctcgccgacgcggccacccgcgatcgggcatttggacccgtccccgctcgccgcccgcacggcggctcgttgcgggaaaagtttctcgaggccgtctgtgaccccgctccctcggccgcgagatcccgcccagccgaatggcgcagagcaactgggaagcggataagatgctcgacgtgtatatctatgactacctgctgaagaggaacctgcagacgacggccaaggctttcatgaccgagggaaaggttgctgctgatccagttgcaattgatgctcctggagggtttctgtttgagtggtggtctgtcttttgggatatattcatcgcaaggacaaatgaaaagcattctgaagttgcagcggcatatctagaggcacagcaaataaaagcaagagagcaccagcagcagatgcagatgcagcaattgcaacttatgcatcaaagacatgctcaacttcagcgaactaacgcgaatcatccttcacttaatggtccaataaatgctttaaattctgagggcattttggggccatcaacagctagtgtcttagctgccaagatgtatgaagagcgattgaagcacccacattcaatggagtctgagggatcacaacttattgaagctagtagaatggctcttctcaagtcagcaacaaaccatgcagggcaattagttccagggactcctggaaatgtgtctacaactctgcagcaaatccaggcacggaatcagcaaacgattgatattaagagtgaaggtaacatgggagtaccccagagatctttacccatggatccatcatctttatacggtcaaggattaattcaacctaaacctggattgagcggtgcagggctgaaccaaggtgtaagcggtttaccactgaagggctggccattaactggaattgaccagttaaggccgaatttgggtgctcaaatgcagaagccatttctttcaacacagtcacagttccaacttatgtccccacagcagcaacaacaatacttagcacaggcccaagcacaagggaaccttggaaactcaactaattatggggatattgatccccgcagacttacagcattgaccaggggtagtttgaatggtaaagatagtcagcctgcaggaacggatggttgtattagttcccctatgcaatccagttcacccaaagtcagaccagaccaagagtatctcatgaagatgcagcagacatcttcccagcaaccccaggaacagcttcagcagcagcagcagaaccaacagcagcaacagagccaacaacaaatgcaacagaacaatagaaaaagaaagcagcctacttcttcaggaccagcaaatagtaccggtacaggaaacactgtgggtcctgcaaactccccaccatctacaccatccacacatactcctggggatggacttggaatgggtggtaatatgcgccacgttccaaagaacttaatgatttatggtgcggatggaactggacttgcctcctcttcaaatcaaatggatgacctggagcagtttggtgatgtgggctctttggacgataatgttgaatccttcttatccaatgatgatggagatcccagggatatttttgctgcactcaaaagaagtcctgcagagcctagcccagccgtttcaaaaggttttactttcagtgaagtcaactgttggcgcacaagcaacagcaaaattgtttgctgccacttctcttcagatggcaagattttggctagtgcaggacatgaaaagaaggctgtactttggaacatggaaaattttcagacacagtatacaccagaagagcatgcccttattatcactgatgtccgtttcaggcctaactctagtcagctggcaacatcttcttttgatagaactattaaattatggaatgctgccgatcctggattctctttgcatacattcactgggcacaacggccaggtcacatcattagattttcatccaaagaaaacagaccttctatgctcttgtgatggcagtggtgaaatccggtactggaatgtgacccagtttgcatgcttgcgtgccataaagggtggtagtgcccaagtccggtttcagcctcatgttggacagtttttagccgcagctgctgaaaacgtggtttccatatttgacattgagacacatgggaaaaaatacactctacagggccataacactgatgtgcagtcagtgtgctgggacaacaatggggaatatattgcatctgtcagtcaggacctagttaaggtttggtcaatgtcaactggggattgcatttatgagcttagttccaatggaaacaagttccattcttgcgtgttccacccgagctattccaatctcttggttattggaggctaccagtctctcgaggtttggaacatggtgaaaaaccagagcctaaccgtacaagctcatgaaggtctaattgcggcgctggcgcagtcaccagtcacagggatgatagcttctgctagccatgacaactctgtcaaggtgtggaaataacagtaacaacgattatgatgcatctaggtagttttttttccagggcaagtgaaatttctcctgctgaggcataaaataaggaagagtagtaaattagatggttgccggtcgcggttcagctgtccaagagcagtgagtttgttgatgggttgtattgtatttatgctgataggctgtttgtgtagctcagaaacaaaaaagaatacattggctgaaaaggtgtccgcctgttttattttttgtttctgccgtatcatatgtaaccatttaacgttccctgttttttaattggaactcgctgcgattggcatctggcagaaaaaaaaccagagatact

SEQ ID NO: 56321 - DNA, 2075 bp, Zea Mays
acaggaggcaacctgacacatgacttctggagtcatggtcgtcatgaggaagccaaggacctgctgctcaagcgcggtccaccggataaattccggattgatctcttctgtggtcttgccatcagacttgttgggaatcttctcctcaggcgcggcaagggaaccatcaaggtatccctgcagttgaacgcctctaatgatgggtagtagaacctgcgctctccatagcacatagttcgtcttgctgagttttatagcaacaatttgccctagaaggggtgttggcacaacggtttgggagctggacgccattgctggaattggtgatagatggcggctagggttaggatagaggagaggctccaattaccatgtgagaatagcaaccacgattggttaagcgtttctacttgcagagcagaccgcattgatctatttatataggcagaggattgccgaggataacatcctaaggggataactctgcctaacagaatctgctatattttaggctaatctatagcagagttatcccctgaatatctacgtggttatcttatcagataagctacgtttacacagcagaggcctacgaccagattagaagctattcaatctaacacaccttacagtgttcagtaaagaaaatgtagaaatgtgtccattacaacaccaaaaagactaccaccctacaacccaggaattggggctgttaggagagagaggctcttggcccctgccatcgcccacaactccctctcttccgcagcccttcttgtattatcagggtgatccagttctgaaccctctcacaccatgggagagacccccaataaagaacgtattttgcatttacgggattgattcaaagactgaggtaggatattactttgcaccaagtggcaaaccatatccagacaactggataataactgatattatttatgagcttgaaggttccctactttcaagatcaggtaattctgtttctgggaagcctaacaattccagtggtgatggaacagtatcatacaactccctctcatggtgcaagaattggcttggaccaaaagtgaacataacgagggctccacaggcagaacatgatggatctgatctgcaaacagccatgaatattgatcatcatcatggtgacgacatactaccaaacatgacgagggttccgcatgtgaagtacataacctactatgaggatgctgaaagtcttccaggatggagaacagcagtctgggagctcgataaagcaaaccacaggaatattgttaggacgccagtattaatgcgtgagttatggcttgaaatgtggcacgatttgcatcctgattcaaaatcgaaatttgtgacgaaagctttccgaggtccactaagaaacgaagactgtcgctgggactatggaaaggctcgatgtggctttccagaacactgtgaatacaggtatacatttggcgatgtccatctgggaatgagctgcagactgagaaatacgtccgctaaccttcttcaacagtatctctgaaatgtcgtgggccgagtaattttgtgttttgttgctcgcatggaaatggtatctgattccccattttgacctgccaatgaaattagccatcaacaaggtagatacagtatcaaccggaggccctcgaatgacagatggaggccaacgtccccaggagtgtcggcagagttttcctcttgtctgtagcactggcaccttcggcgtcctgaaggtgccatgagatcatacactgatgtacactgtagcatggttttgtaaatcaagccgtcacaaattgacttagtcttacaaaaacgataccctatagattggcagtgttaaaattctttacgactcccaattaaccaccttgattgtaatgtgcccttaaagagatgaaaggatgaactctgctcaatattagaccttgtttggttagggtgactagattttactaaaatacaaaagagggtgactaaggtttcctcctaaagtttagggtctgtttgattgtgtttgttgtggctgtgaaaaaaaatgtgtgagctgtgaaaaaaac

SEQ ID NO: 56322 - DNA, 2496 bp, Zea Mays
cgaccttgggaccggaagcgaccaactgacggatcgacaggcccgtgatgccgtcgcggcggcgccgacgcggcgacctcgccgtcgcggtggcggtgctggcgacggtggccctagcggccggggccgacggcggcgcggagttcgactacaggaagctctcggggataatcatcccggggttcgcgtccacgcagctgcgcgcgtggtcggttctcgattgcccctactcgcccttcgacttcaaccccctcgactccgtctggctcgacaccgccaagcttttctctgcggtaaattgctggcttaaatgcatgctgcttgaaccctataatcagacagaccatcccgaatgcaagtcaaggcctgatagtggtctttctgcaattacagagctggaccctggttatataacaggtcctctctcttcagtatggaaagaatgggtcaaatggtgtgtagagtttggcattgaagctaatgcaattatcgctgttccgtatgattggagactgcccccatcaatgcttgaggagagagatctgtactttcacaaattaaagctaacatttgaaattgctttgaaactccgaggagggccatctttggtatttgcgcattcgatgggaaataacgtgtttcgctattttttggaatggttgaaactggaaattgctcccaagcactatatccagtggcttgatgagcatatacatgcatattttgcagttggcgctcctcttcttggatctactgaagcagttagaggcgctctttctggaacaacttttggtcttccagtcagtgagggcacagcacggttgatgtttaatgcatttggttcttctctatggcttatgccattctcaaaacactgcaaagctgataatatctactggaagcatttttttgagggaaaaggaggttgtcctcacaaacaacaatgtgatgaagatgaatatatttcagactacggcggatggcccacagaccttgttaatatcgaggttccttcagctcgagatatgggggcatacccatccatcacagatataaccgagaacataacatccattatggagtgtggaaagccaactctcctgtcattttctgccagagaggtttcagatggtactttgttcaaaacgatagaggattatgaccctcagagcaaggcacttgtttatcagcttgagaagtattatcagggtgatccagttctgaaccctctcacaccatgggagagacccccaataaagaacgtattttgcatttacgggattgattcaaagactgaggtaggatattactttgcaccaagtggcaaaccatatccagacaactggataataactgatattatttatgagcttgaaggttccctactttcaaggcagatcaggtaattctgtttctgggaagcctaacaattccagtggtgatggaacagtatcatacaactccctctcatggtgcaagaattggcttggaccaaaagtgaacataacgagggctccacagaacatgatggatctgatctgcaaacagccatgaatattgatcatcatcatggtgacgacatactaccaaacatgacgagggttccgcatgtgaagtacataacctactatgaggatgctgaaagtcttccaggatggagaacagcagtctgggagctcgataaagcaaaccacaggaatattgttaggacgccagtattaatgcgtgagttatggcttgaaatgtggcacgatttgcatcctgattcaaaatcgaaatttgtgacgaaagctttccgaggtccactaagaaacgaagactgtcgctgggactatggaaaggctcgatgtggctttccagaacactgtgaatacaggtatacatttggcgatgtccatctgggaatgagctgcagactgagaaatacgtccgctaaccttcttcaacagtatctctgaaatgtcgtgggccgagtaattttgtgttttgttgctcgcatggaaatggtatctgattccccattttgacctgccaatgaaattagccatcaacaaggtagatacagtatcaaccggaggccctcgaatgacagatggaggccaacgtccccaggagtgtcggcagagttttcctcttgtctgtagcactggcaccttcggcgtcctgaaggtgccatgagatcatacactgatgtacactgtagcatggttttgtaaatcaagccgtcacaaattgacttagtcttacaaaaacgataccctatagattggcagtgttaaaattctttacgactcccaattaaccaccttgattgtaatgtgcccttaaagagatgaaaggatgaactctgctcaatattagaccttgtttggttagggtgactagattttactaaaatacaaaagagggtgactaaggtttcctcctaaagtttagggtctgtttgattgtgtttgttgtggctgtgaaaaaaaatgtgtgagctgtgaaaaaaac

SEQ ID NO: 56323 - DNA, 2566 bp, Zea Mays
cgaccttgggaccggaagcgaccaactgacggatcgacaggcccgtgatgccgtcgcggcggcgccgacgcggcgacctcgccgtcgcggtggcggtgctggcgacggtggccctagcggccggggccgacggcggcgcggagttcgactacaggaagctctcggggataatcatcccggggttcgcgtccacgcagctgcgcgcgtggtcggttctcgattgcccctactcgcccttcgacttcaaccccctcgactccgtctggctcgacaccgccaagcttttctctgcggtaaattgctggcttaaatgcatgctgcttgaaccctataatcagacagaccatcccgaatgcaagtcaaggcctgatagtggtctttctgcaattacagagctggaccctggttatataacaggtttcaggtcctctctcttcagtatggaaagaatgggtcaaatggtgtgtagagtttggcattgaagctaatgcaattatcgctgttccgtatgattggagactgcccccatcaatgcttgaggagagagatctgctaacatttgaaattgctttgaaactccgaggagggccatctttggtatttgcgcattcgatgggaaataacgtgtttcgctattttttggaatggttgaaactggaaattgctcccaagcactatatccagtggcttgatgagcatatacatgcatattttgcagttggcgctcctcttcttggatctactgaagcagttagaggcgctctttctggaacaacttttggtcttccagtcagtgagggcacagcacggttgatgtttaatgcatttggttcttctctatggcttatgccattctcaaaacactgcaaagctgataatatctactggaagcatttttttgagggaaaaggaggttgtcctcacaaacaacaatgtgatgaagatgaatatatttcagactacggcggatggcccacagaccttgttaatatcgagatatgggggcatacccatccatcacagatataaccgagaacataacatccattatggagtgtggaaagccaactctcctgtcattttctgccagagaggtttcagatggtactttgttcaaaacgatagaggattatgaccctcagagcaaggcacttgtttatcagcttgagaagtattatcagggtgatccagttctgaaccctctcacaccatgggagagacccccaataaagaacgtattttgcatttacgggattgattcaaagactgaggtaggatattactttgcaccaagtggcaaaccatatccagacaactggataataactgatattatttatgagcttgaaggttccctactttcaagatcaggtaattctgtttctgggaagcctaacaattccagtggtgatggaacagtatcatacaactccctctcatggtgcaagaattggcttggaccaaaagtgaacataacgagggctccacagaacatgatggatctgatctgcaaacagccatgaatattgatcatcatcatggtgacgacatactaccaaacatgacgagggttccgcatgtgaagtacataacctactatgaggatgctgaaagtcttccaggatggagaacagcagtctgggagctcgataaagcaaaccacaggaatattgttaggacgccagtattaatgcgtgagttatggcttgaaatgtggcacgatttgcatcctgattcaaaatcgaaatttgtgacgaaagctttccgaggtccactaagaaacgaagactgtcgctgggactatggaaaggctcgatgtggctttccagaacactgtgaatacaggtatacatttggcgatgtccatctgggaatgagctgcagactgagaaatacgtccgctaaccttcttcaacagtatctctgaaatgtcgtgggccgagtaattttgtgttttgttgctcgcatggaaatggtatctgattccccattttgacctgccaatgaaattagccatcaacaaggtagatacagtatcaaccggaggccctcgaatgacaggtcaactcttattcttgtcaccattttggcacacttaaatctttgaagtcgacatatgcaaagctgaaacaacacgttcgcatgacaaattttggttgaagatggaggccaacgtccccaggagtgtcggcagagttttcctcttgtctgtagcactggcaccttcggcgtcctgaaggtgccatgagatcatacactgatgtacactgtagcatggttttgtaaatcaagccgtcacaaattgacttagtcttacaaaaacgataccctatagattggcagtgttaaaattctttacgactcccaattaaccaccttgattgtaatgtgcccttaaagagatgaaaggatgaactctgctcaatattagaccttgtttggttagggtgactagattttactaaaatacaaaagagggtgactaaggtttcctcctaaagtttagggtctgtttgattgtgtttgttgtggctgtgaaaaaaaatgtgtgagctgtgaaaaaaac

SEQ ID NO: 56324 - DNA, 2599 bp, Zea Mays
cgaccttgggaccggaagcgaccaactgacggatcgacaggcccgtgatgccgtcgcggcggcgccgacgcggcgacctcgccgtcgcggtggcggtgctggcgacggtggccctagcggccggggccgacggcggcgcggagttcgactacaggaagctctcggggataatcatcccggggttcgcgtccacgcagctgcgcgcgtggtcggttctcgattgcccctactcgcccttcgacttcaaccccctcgactccgtctggctcgacaccgccaagcttttctctgcggtaaattgctggcttaaatgcatgctgcttgaaccctataatcagacagaccatcccgaatgcaagtcaaggcctgatagtggtctttctgcaattacagagctggaccctggttatataacaggtttcaggtcctctctcttcagtatggaaagaatgggtcaaatggtgtgtagagtttggcattgaagctaatgcaattatcgctgttccgtatgattggagactgcccccatcaatgcttgaggagagagatctgtactttcacaaattaaagctaacatttgaaattgctttgaaactccgaggagggccatctttggtatttgcgcattcgatgggaaataacgtgtttcgctattttttggaatggttgaaactggaaattgctcccaagcactatatccagtggcttgatgagcatatacatgcatattttgcagttggcgctcctcttcttggatctactgaagcagttagaggcgctctttctggaacaacttttggtcttccagtcagtgagggcacagcacggttgatgtttaatgcatttggttcttctctatggcttatgccattctcaaaacactgcaaagctgataatatctactggaagcatttttttgagggaaaaggaggttgtcctcacaaacaacaatgtgatgaagatgaatatatttcagactacggcggatggcccacagaccttgttaatatcgaggttccttcagctcgagatatgggggcatacccatccatcacagatataaccgagaacataacatccattatggagtgtggaaagccaactctcctgtcattttctgccagagaggtttcagatggtactttgttcaaaacgatagaggattatgaccctcagagcaaggcacttgtttatcagcttgagaagtattatcagggtgatccagttctgaaccctctcacaccatgggagagacccccaataaagaacgtattttgcatttacgggattgattcaaagactgaggtaggatattactttgcaccaagtggcaaaccatatccagacaactggataataactgatattatttatgagcttgaaggttccctactttcaaggtaattctgtttctgggaagcctaacaattccagtggtgatggaacagtatcatacaactccctctcatggtgcaagaattggcttggaccaaaagtgaacataacgagggctccacaggcagaacatgatggatctgatctgcaaacagccatgaatattgatcatcatcatggtgacgacatactaccaaacatgacgagggttccgcatgtgaagtacataacctactatgaggatgctgaaagtcttccaggatggagaacagcagtctgggagctcgataaagcaaaccacaggaatattgttaggacgccagtattaatgcgtgagttatggcttgaaatgtggcacgatttgcatcctgattcaaaatcgaaatttgtgacgaaagctttccgaggtccactaagaaacgaagactgtcgctgggactatggaaaggctcgatgtggctttccagaacactgtgaatacaggtatacatttggcgatgtccatctgggaatgagctgcagactgagaaatacgtccgctaaccttcttcaacagtatctctgaaatgtcgtgggccgagtaattttgtgttttgttgctcgcatggaaatggtatctgattccccattttgacctgccaatgaaattagccatcaacaaggtagatacagtatcaaccggaggccctcgaatgacaggtcaactcttattcttgtcaccattttggcacacttaaatctttgaagtcgacatatgcaaagctgaaacaacacgttcgcatgacaaattttggttgaagatggaggccaacgtccccaggagtgtcggcagagttttcctcttgtctgtagcactggcaccttcggcgtcctgaaggtgccatgagatcatacactgatgtacactgtagcatggttttgtaaatcaagccgtcacaaattgacttagtcttacaaaaacgataccctatagattggcagtgttaaaattctttacgactcccaattaaccaccttgattgtaatgtgcccttaaagagatgaaaggatgaactctgctcaatattagaccttgtttggttagggtgactagattttactaaaatacaaaagagggtgactaaggtttcctcctaaagtttagggtctgtttgattgtgtttgttgtggctgtgaaaaaaaatgtgtgagctgtgaaaaaaac

SEQ ID NO: 56325 - DNA, 2593 bp, Zea Mays
cgaccttgggaccggaagcgaccaactgacggatcgacaggcccgtgatgccgtcgcggcggcgccgacgcggcgacctcgccgtcgcggtggcggtgctggcgacggtggccctagcggccggggccgacggcggcgcggagttcgactacaggaagctctcggggataatcatcccggggttcgcgtccacgcagctgcgcgcgtggtcggttctcgattgcccctactcgcccttcgacttcaaccccctcgactccgtctggctcgacaccgccaagcttttctctgcggtaaattgctggcttaaatgcatgctgcttgaaccctataatcagacagaccatcccgaatgcaagtcaaggcctgatagtggtctttctgcaattacagagctggaccctggttatataacaggtcctctctcttcagtatggaaagaatgggtcaaatggtgtgtagagtttggcattgaagctaatgcaattatcgctgttccgtatgattggagactgcccccatcaatgcttgaggagagagatctgtactttcacaaattaaagctaacatttgaaattgctttgaaactccgaggagggccatctttggtatttgcgcattcgatgggaaataacgtgtttcgctattttttggaatggttgaaactggaaattgctcccaagcactatatccagtggcttgatgagcatatacatgcatattttgcagttggcgctcctcttcttggatctactgaagcagttagaggcgctctttctggaacaacttttggtcttccagtcagtgagggcacagcacggttgatgtttaatgcatttggttcttctctatggcttatgccattctcaaaacactgcaaagctgataatatctactggaagcatttttttgagggaaaaggaggttgtcctcacaaacaacaatgtgatgaagatgaatatatttcagactacggcggatggcccacagaccttgttaatatcgaggttccttcagctcgagatatgggggcatacccatccatcacagatataaccgagaacataacatccattatggagtgtggaaagccaactctcctgtcattttctgccagagaggtttcagatggtactttgttcaaaacgatagaggattatgaccctcagagcaaggcacttgtttatcagcttgagaagtattatcagggtgatccagttctgaaccctctcacaccatgggagagacccccaataaagaacgtattttgcatttacgggattgattcaaagactgaggtaggatattactttgcaccaagtggcaaaccatatccagacaactggataataactgatattatttatgagcttgaaggttccctactttcaagatcaggtaattctgtttctgggaagcctaacaattccagtggtgatggaacagtatcatacaactccctctcatggtgcaagaattggcttggaccaaaagtgaacataacgagggctccacagaacatgatggatctgatctgcaaacagccatgaatattgatcatcatcatggtgacgacatactaccaaacatgacgagggttccgcatgtgaagtacataacctactatgaggatgctgaaagtcttccaggatggagaacagcagtctgggagctcgataaagcaaaccacaggaatattgttaggacgccagtattaatgcgtgagttatggcttgaaatgtggcacgatttgcatcctgattcaaaatcgaaatttgtgacgaaagctttccgaggtccactaagaaacgaagactgtcgctgggactatggaaaggctcgatgtggctttccagaacactgtgaatacaggtatacatttggcgatgtccatctgggaatgagctgcagactgagaaatacgtccgctaaccttcttcaacagtatctctgaaatgtcgtgggccgagtaattttgtgttttgttgctcgcatggaaatggtatctgattccccattttgacctgccaatgaaattagccatcaacaaggtagatacagtatcaaccggaggccctcgaatgacaggtcaactcttattcttgtcaccattttggcacacttaaatctttgaagtcgacatatgcaaagctgaaacaacacgttcgcatgacaaattttggttgaagatggaggccaacgtccccaggagtgtcggcagagttttcctcttgtctgtagcactggcaccttcggcgtcctgaaggtgccatgagatcatacactgatgtacactgtagcatggttttgtaaatcaagccgtcacaaattgacttagtcttacaaaaacgataccctatagattggcagtgttaaaattctttacgactcccaattaaccaccttgattgtaatgtgcccttaaagagatgaaaggatgaactctgctcaatattagaccttgtttggttagggtgactagattttactaaaatacaaaagagggtgactaaggtttcctcctaaagtttagggtctgtttgattgtgtttgttgtggctgtgaaaaaaaatgtgtgagctgtgaaaaaaac

SEQ ID NO: 56326 - DNA, 2548 bp, Zea Mays
cgaccttgggaccggaagcgaccaactgacggatcgacaggcccgtgatgccgtcgcggcggcgccgacgcggcgacctcgccgtcgcggtggcggtgctggcgacggtggccctagcggccggggccgacggcggcgcggagttcgactacaggaagctctcggggataatcatcccggggttcgcgtccacgcagctgcgcgcgtggtcggttctcgattgcccctactcgcccttcgacttcaaccccctcgactccgtctggctcgacaccgccaagcttttctctgcggtaaattgctggcttaaatgcatgctgcttgaaccctataatcagacagaccatcccgaatgcaagtcaaggcctgatagtggtctttctgcaattacagagctggaccctggttatataacaggtcctctctcttcagtatggaaagaatgggtcaaatggtgtgtagagtttggcattgaagctaatgcaattatcgctgttccgtatgattggagactgcccccatcaatgcttgaggagagagatctgtactttcacaaattaaagctaacatttgaaattgctttgaaactccgaggagggccatctttggtatttgcgcattcgatgggaaataacgtgtttcgctattttttggaatggttgaaactggaaattgctcccaagcactatatccagtggcttgatgagcatatacatgcatattttgcagttggcgctcctcttcttggatctactgaagcagttagaggcgctctttctggaacaacttttggtcttccagtcagtgagggcacagcacggttgatgtttaatgcatttggttcttctctatggcttatgccattctcaaaacactgcaaagctgataatatctactggaagcatttttttgagggaaaaggaggttgtcctcacaaacaacaatgtgatgaagatgaatatatttcagactacggcggatggcccacagaccttgttaatatcgaggttccttcagctcgagatatgggggcatacccatccatcacagatataaccgagaacataacatccattatggagtgtggaaagccaactctcctgtcattttctgccagagaggtttcagatggtactttgttcaaaacgatagaggattatgaccctcagagcaaggcacttgtttatcagcttgagaagtattatcagggtgatccagttctgaaccctctcacaccatgggagagacccccaataaagaacgtattttgcatttacgggattgattcaaagactgaggtaggatattactttgcaccaagtggcaaaccatatccagacaactggataataactgatattatttatgagcttgaaggttccctactttcaagatcaggtaattctgtttctgggaagcctaacaattccagtggtgatggaacagtatcatacaactccctctcatggtgcaagaattggcttggaccaaaagtgaacataacgagggctccacagtatattgcaacattaagtcgccctctctaattatcctcttgtactcttcaaggcagaacatgatggatctgatctgcaaacagccatgaatattgatcatcatcatggtgacgacatactaccaaacatgacgagggttccgcatgtgaagtacataacctactatgaggatgctgaaagtcttccaggatggagaacagcagtctgggagctcgataaagcaaaccacaggaatattgttaggacgccagtattaatgcgtgagttatggcttgaaatgtggcacgatttgcatcctgattcaaaatcgaaatttgtgacgaaagctttccgaggtccactaagaaacgaagactgtcgctgggactatggaaaggctcgatgtggctttccagaacactgtgaatacaggtatacatttggcgatgtccatctgggaatgagctgcagactgagaaatacgtccgctaaccttcttcaacagtatctctgaaatgtcgtgggccgagtaattttgtgttttgttgctcgcatggaaatggtatctgattccccattttgacctgccaatgaaattagccatcaacaaggtagatacagtatcaaccggaggccctcgaatgacagatggaggccaacgtccccaggagtgtcggcagagttttcctcttgtctgtagcactggcaccttcggcgtcctgaaggtgccatgagatcatacactgatgtacactgtagcatggttttgtaaatcaagccgtcacaaattgacttagtcttacaaaaacgataccctatagattggcagtgttaaaattctttacgactcccaattaaccaccttgattgtaatgtgcccttaaagagatgaaaggatgaactctgctcaatattagaccttgtttggttagggtgactagattttactaaaatacaaaagagggtgactaaggtttcctcctaaagtttagggtctgtttgattgtgtttgttgtggctgtgaaaaaaaatgtgtgagctgtgaaaaaaac

SEQ ID NO: 56327 - DNA, 3079 bp, Zea Mays
cgaccttgggaccggaagcgaccaactgacggatcgacaggcccgtgatgccgtcgcggcggcgccgacgcggcgacctcgccgtcgcggtggcggtgctggcgacggtggccctagcggccggggccgacggcggcgcggagttcgactacaggaagctctcggggataatcatcccggggttcgcgtccacgcagctgcgcgcgtggtcggttctcgattgcccctactcgcccttcgacttcaaccccctcgactccgtctggctcgacaccgccaagcttttctctgcggtaaattgctggcttaaatgcatgctgcttgaaccctataatcagacagaccatcccgaatgcaagtcaaggcctgatagtggtctttctgcaattacagagctggaccctggttatataacaggtcctctctcttcagtatggaaagaatgggtcaaatggtgtgtagagtttggcattgaagctaatgcaattatcgctgttccgtatgattggagactgcccccatcaatgcttgaggagagagatctgtactttcacaaattaaagtttgtaacacttgcctcaacttgttatgaagcaaccaaatgctatacatctgttagggtctagttcttttggtgtttctaaagtacatacctagattacagtcatttatattgttttagttaccatgcatttattatatcagcattgacatggccacttctgaactaaatacatgatatgatactttcgttgttggccttgtcaatttataagttgccaatccaacctctgagataattgttggtggtacaaataaaacatggtgtgttgcatttcatgcatttgcaacctgcatgcgaccaattgctaaatattggtaaatatcttgtggtaagttttattcaagcaaatatgattttccaaaacattggtaaacaaatcatgctgagatggcgagtatatatgtatggtgtaagggcaatttattgttgcacgaggagagaatgtagtacgtgatgctcatacgtccttgttgatgcaggctaacatttgaaattgctttgaaactccgaggagggccatctttggtatttgcgcattcgatgggaaataacgtgtttcgctattttttggaatggttgaaactggaaattgctcccaagcactatatccagtggcttgatgagcatatacatgcatattttgcagttggcgctcctcttcttggatctactgaagcagttagaggcgctctttctggaacaacttttggtcttccagtcagtgagggcacagcacggttgatgtttaatgcatttggttcttctctatggcttatgccattctcaaaacactgcaaagctgataatatctactggaagcatttttttgagggaaaaggaggttgtcctcacaaacaacaatgtgatgaagatgaatatatttcagactacggcggatggcccacagaccttgttaatatcgaggttccttcagctcgagatatgggggcatacccatccatcacagatataaccgagaacataacatccattatggagtgtggaaagccaactctcctgtcattttctgccagagaggtttcagatggtactttgttcaaaacgatagaggattatgaccctcagagcaaggcacttgtttatcagcttgagaagtattatcagggtgatccagttctgaaccctctcacaccatgggagagacccccaataaagaacgtattttgcatttacgggattgattcaaagactgaggtaggatattactttgcaccaagtggcaaaccatatccagacaactggataataactgatattatttatgagcttgaaggttccctactttcaagatcaggtaattctgtttctgggaagcctaacaattccagtggtgatggaacagtatcatacaactccctctcatggtgcaagaattggcttggaccaaaagtgaacataacgagggctccacaggcagaacatgatggatctgatctgcaaacagccatgaatattgatcatcatcatggtgacgacatactaccaaacatgacgagggttccgcatgtgaagtacataacctactatgaggatgctgaaagtcttccaggatggagaacagcagtctgggagctcgataaagcaaaccacaggaatattgttaggacgccagtattaatgcgtgagttatggcttgaaatgtggcacgatttgcatcctgattcaaaatcgaaatttgtgacgaaagctttccgaggtccactaagaaacgaagactgtcgctgggactatggaaaggctcgatgtggctttccagaacactgtgaatacaggtatacatttggcgatgtccatctgggaatgagctgcagactgagaaatacgtccgctaaccttcttcaacagtatctctgaaatgtcgtgggccgagtaattttgtgttttgttgctcgcatggaaatggtatctgattccccattttgacctgccaatgaaattagccatcaacaaggtagatacagtatcaaccggaggccctcgaatgacaggtcaactcttattcttgtcaccattttggcacacttaaatctttgaagtcgacatatgcaaagctgaaacaacacgttcgcatgacaaattttggttgaagatggaggccaacgtccccaggagtgtcggcagagttttcctcttgtctgtagcactggcaccttcggcgtcctgaaggtgccatgagatcatacactgatgtacactgtagcatggttttgtaaatcaagccgtcacaaattgacttagtcttacaaaaacgataccctatagattggcagtgttaaaattctttacgactcccaattaaccaccttgattgtaatgtgcccttaaagagatgaaaggatgaactctgctcaatattagaccttgtttggttagggtgactagattttactaaaatacaaaagagggtgactaaggtttcctcctaaagtttagggtctgtttgattgtgtttgttgtggctgtgaaaaaaaatgtgtgagctgtgaaaaaaac

SEQ ID NO: 56328 - DNA, 2601 bp, Zea Mays
cgaccttgggaccggaagcgaccaactgacggatcgacaggcccgtgatgccgtcgcggcggcgccgacgcggcgacctcgccgtcgcggtggcggtgctggcgacggtggccctagcggccggggccgacggcggcgcggagttcgactacaggaagctctcggggataatcatcccggggttcgcgtccacgcagctgcgcgcgtggtcggttctcgattgcccctactcgcccttcgacttcaaccccctcgactccgtctggctcgacaccgccaagcttttctctgcggtaaattgctggcttaaatgcatgctgcttgaaccctataatcagacagaccatcccgaatgcaagtcaaggcctgatagtggtctttctgcaattacagagctggaccctggttatataacaggtcctctctcttcagtatggaaagaatgggtcaaatggtgtgtagagtttggcattgaagctaatgcaattatcgctgttccgtatgattggagactgcccccatcaatgcttgaggagagagatctgtactttcacaaattaaagctaacatttgaaattgctttgaaactccgaggagggccatctttggtatttgcgcattcgatgggaaataacgtgtttcgctattttttggaatggttgaaactggaaattgctcccaagcactatatccagtggcttgatgagcatatacatgcatattttgcagttggcgctcctcttcttggatctactgaagcagttagaggcgctctttctggaacaacttttggtcttccagtcagtgagggcacagcacggttgatgtttaatgcatttggttcttctctatggcttatgccattctcaaaacactgcaaagctgataatatctactggaagcatttttttgagggaaaaggaggttgtcctcacaaacaacaatgtgatgaagatgaatatatttcagactacggcggatggcccacagaccttgttaatatcgaggttccttcagctcgagatatgggggcatacccatccatcacagatataaccgagaacataacatccattatggagtgtggaaagccaactctcctgtcattttctgccagagaggtttcagatggtactttgttcaaaacgatagaggattatgaccctcagagcaaggcacttgtttatcagcttgagaagtattatcagggtgatccagttctgaaccctctcacaccatgggagagacccccaataaagaacgtattttgcatttacgggattgattcaaagactgaggtaggatattactttgcaccaagtggcaaaccatatccagacaactggataataactgatattatttatgagcttgaaggttccctactttcaaggcagatcaggtaattctgtttctgggaagcctaacaattccagtggtgatggaacagtatcatacaactccctctcatggtgcaagaattggcttggaccaaaagtgaacataacgagggctccacaggcagaacatgatggatctgatctgcaaacagccatgaatattgatcatcatcatggtgacgacatactaccaaacatgacgagggttccgcatgtgaagtacataacctactatgaggatgctgaaagtcttccaggatggagaacagcagtctgggagctcgataaagcaaaccacaggaatattgttaggacgccagtattaatgcgtgagttatggcttgaaatgtggcacgatttgcatcctgattcaaaatcgaaatttgtgacgaaagctttccgaggtccactaagaaacgaagactgtcgctgggactatggaaaggctcgatgtggctttccagaacactgtgaatacaggtatacatttggcgatgtccatctgggaatgagctgcagactgagaaatacgtccgctaaccttcttcaacagtatctctgaaatgtcgtgggccgagtaattttgtgttttgttgctcgcatggaaatggtatctgattccccattttgacctgccaatgaaattagccatcaacaaggtagatacagtatcaaccggaggccctcgaatgacaggtcaactcttattcttgtcaccattttggcacacttaaatctttgaagtcgacatatgcaaagctgaaacaacacgttcgcatgacaaattttggttgaagatggaggccaacgtccccaggagtgtcggcagagttttcctcttgtctgtagcactggcaccttcggcgtcctgaaggtgccatgagatcatacactgatgtacactgtagcatggttttgtaaatcaagccgtcacaaattgacttagtcttacaaaaacgataccctatagattggcagtgttaaaattctttacgactcccaattaaccaccttgattgtaatgtgcccttaaagagatgaaaggatgaactctgctcaatattagaccttgtttggttagggtgactagattttactaaaatacaaaagagggtgactaaggtttcctcctaaagtttagggtctgtttgattgtgtttgttgtggctgtgaaaaaaaatgtgtgagctgtgaaaaaaac

SEQ ID NO: 56329 - DNA, 2605 bp, Zea Mays
ccgaccttgggaccggaagcgaccaactgacggatcgacaggcccgtgatgccgtcgcggcggcgccgacgcggcgacctcgccgtcgcggtggcggtgctggcgacggtggccctagcggccggggccgacggcggcgcggagttcgactacaggaagctctcggggataatcatcccggggttcgcgtccacgcagctgcgcgcgtggtcggttctcgattgcccctactcgcccttcgacttcaaccccctcgactccgtctggctcgacaccgccaagcttttctctgcggtaaattgctggcttaaatgcatgctgcttgaaccctataatcagacagaccatcccgaatgcaagtcaaggcctgatagtggtctttctgcaattacagagctggaccctggttatataacaggtttcaggtcctctctcttcagtatggaaagaatgggtcaaatggtgtgtagagtttggcattgaagctaatgcaattatcgctgttccgtatgattggagactgcccccatcaatgcttgaggagagagatctgtactttcacaaattaaagctaacatttgaaattgctttgaaactccgaggagggccatctttggtatttgcgcattcgatgggaaataacgtgtttcgctattttttggaatggttgaaactggaaattgctcccaagcactatatccagtggcttgatgagcatatacatgcatattttgcagttggcgctcctcttcttggatctactgaagcagttagaggcgctctttctggaacaacttttggtcttccagtcagtgagggcacagcacggttgatgtttaatgcatttggttcttctctatggcttatgccattctcaaaacactgcaaagctgataatatctactggaagcatttttttgagggaaaaggaggttgtcctcacaaacaacaatgtgatgaagatgaatatatttcagactacggcggatggcccacagaccttgttaatatcgaggttccttcagctcgagatatgggggcatacccatccatcacagatataaccgagaacataacatccattatggagtgtggaaagccaactctcctgtcattttctgccagagaggtttcagatggtactttgttcaaaacgatagaggattatgaccctcagagcaaggcacttgtttatcagcttgagaagtattatcagggtgatccagttctgaaccctctcacaccatgggagagacccccaataaagaacgtattttgcatttacgggattgattcaaagactgaggtaggatattactttgcaccaagtggcaaaccatatccagacaactggataataactgatattatttatgagcttgaaggttccctactttcaagatcaggtaattctgtttctgggaagcctaacaattccagtggtgatggaacagtatcatacaactccctctcatggtgcaagaattggcttggaccaaaagtgaacataacgagggctccacaggcagaacatgatggatctgatctgcaaacagccatgaatattgatcatcatcatggtgacgacatactaccaaacatgacgagggttccgcatgtgaagtacataacctactatgaggatgctgaaagtcttccaggatggagaacagcagtctgggagctcgataaagcaaaccacaggaatattgttaggacgccagtattaatgcgtgagttatggcttgaaatgtggcacgatttgcatcctgattcaaaatcgaaatttgtgacgaaagctttccgaggtccactaagaaacgaagactgtcgctgggactatggaaaggctcgatgtggctttccagaacactgtgaatacaggtatacatttggcgatgtccatctgggaatgagctgcagactgagaaatacgtccgctaaccttcttcaacagtatctctgaaatgtcgtgggccgagtaattttgtgttttgttgctcgcatggaaatggtatctgattccccattttgacctgccaatgaaattagccatcaacaaggtagatacagtatcaaccggaggccctcgaatgacaggtcaactcttattcttgtcaccattttggcacacttaaatctttgaagtcgacatatgcaaagctgaaacaacacgttcgcatgacaaattttggttgaagatggaggccaacgtccccaggagtgtcggcagagttttcctcttgtctgtagcactggcaccttcggcgtcctgaaggtgccatgagatcatacactgatgtacactgtagcatggttttgtaaatcaagccgtcacaaattgacttagtcttacaaaaacgataccctatagattggcagtgttaaaattctttacgactcccaattaaccaccttgattgtaatgtgcccttaaagagatgaaaggatgaactctgctcaatattagaccttgtttggttagggtgactagattttactaaaatacaaaagagggtgactaaggtttcctcctaaagtttagggtctgtttgattgtgtttgttgtggctgtgaaaaaaaatgtgtgagctgtgaaaaaaac

SEQ ID NO: 56330 - DNA, 2644 bp, Zea Mays
cgcctttccatttcatcgccgttcgcgcacgcgcacgcgcacgcgagccatccgaccttgggaccggaagcgaccaactgacggatcgacaggcccgtgatgccgtcgcggcggcgccgacgcggcgacctcgccgtcgcggtggcggtgctggcgacggtggccctagcggccggggccgacggcggcgcggagttcgactacaggaagctctcggggataatcatcccggggttcgcgtccacgcagctgcgcgcgtggtcggttctcgattgcccctactcgcccttcgacttcaaccccctcgactccgtctggctcgacaccgccaagcttttctctgcggtaaattgctggcttaaatgcatgctgcttgaaccctataatcagacagaccatcccgaatgcaagtcaaggcctgatagtggtctttctgcaattacagagctggaccctggttatataacaggtcctctctcttcagtatggaaagaatgggtcaaatggtgtgtagagtttggcattgaagctaatgcaattatcgctgttccgtatgattggagactgcccccatcaatgcttgaggagagagatctgtactttcacaaattaaagctaacatttgaaattgctttgaaactccgaggagggccatctttggtatttgcgcattcgatgggaaataacgtgtttcgctattttttggaatggttgaaactggaaattgctcccaagcactatatccagtggcttgatgagcatatacatgcatattttgcagttggcgctcctcttcttggatctactgaagcagttagaggcgctctttctggaacaacttttggtcttccagtcagtgagggcacagcacggttgatgtttaatgcatttggttcttctctatggcttatgccattctcaaaacactgcaaagctgataatatctactggaagcatttttttgagggaaaaggaggttgtcctcacaaacaacaatgtgatgaagatgaatatatttcagactacggcggatggcccacagaccttgttaatatcgaggttccttcagctcgagatatgggggcatacccatccatcacagatataaccgagaacataacatccattatggagtgtggaaagccaactctcctgtcattttctgccagagaggtttcagatggtactttgttcaaaacgatagaggattatgaccctcagagcaaggcacttgtttatcagcttgagaagtattatcagggtgatccagttctgaaccctctcacaccatgggagagacccccaataaagaacgtattttgcatttacgggattgattcaaagactgaggtaggatattactttgcaccaagtggcaaaccatatccagacaactggataataactgatattatttatgagcttgaaggttccctactttcaaggtaattctgtttctgggaagcctaacaattccagtggtgatggaacagtatcatacaactccctctcatggtgcaagaattggcttggaccaaaagtgaacataacgagggctccacaggcagaacatgatggatctgatctgcaaacagccatgaatattgatcatcatcatggtgacgacatactaccaaacatgacgagggttccgcatgtgaagtacataacctactatgaggatgctgaaagtcttccaggatggagaacagcagtctgggagctcgataaagcaaaccacaggaatattgttaggacgccagtattaatgcgtgagttatggcttgaaatgtggcacgatttgcatcctgattcaaaatcgaaatttgtgacgaaagctttccgaggtccactaagaaacgaagactgtcgctgggactatggaaaggctcgatgtggctttccagaacactgtgaatacaggtatacatttggcgatgtccatctgggaatgagctgcagactgagaaatacgtccgctaaccttcttcaacagtatctctgaaatgtcgtgggccgagtaattttgtgttttgttgctcgcatggaaatggtatctgattccccattttgacctgccaatgaaattagccatcaacaaggtagatacagtatcaaccggaggccctcgaatgacaggtcaactcttattcttgtcaccattttggcacacttaaatctttgaagtcgacatatgcaaagctgaaacaacacgttcgcatgacaaattttggttgaagatggaggccaacgtccccaggagtgtcggcagagttttcctcttgtctgtagcactggcaccttcggcgtcctgaaggtgccatgagatcatacactgatgtacactgtagcatggttttgtaaatcaagccgtcacaaattgacttagtcttacaaaaacgataccctatagattggcagtgttaaaattctttacgactcccaattaaccaccttgattgtaatgtgcccttaaagagatgaaaggatgaactctgctcaatattagaccttgtttggttagggtgactagattttactaaaatacaaaagagggtgactaaggtttcctcctaaagtttagggtctgtttgattgtgtttgttgtggctgtgaaaaaaaatgtgtgagctgtgaaaaaaac

SEQ ID NO: 56331 - DNA, 2649 bp, Zea Mays
cgcctttccatttcatcgccgttcgcgcacgcgcacgcgcacgcgagccatccgaccttgggaccggaagcgaccaactgacggatcgacaggcccgtgatgccgtcgcggcggcgccgacgcggcgacctcgccgtcgcggtggcggtgctggcgacggtggccctagcggccggggccgacggcggcgcggagttcgactacaggaagctctcggggataatcatcccggggttcgcgtccacgcagctgcgcgcgtggtcggttctcgattgcccctactcgcccttcgacttcaaccccctcgactccgtctggctcgacaccgccaagcttttctctgcggtaaattgctggcttaaatgcatgctgcttgaaccctataatcagacagaccatcccgaatgcaagtcaaggcctgatagtggtctttctgcaattacagagctggaccctggttatataacaggtcctctctcttcagtatggaaagaatgggtcaaatggtgtgtagagtttggcattgaagctaatgcaattatcgctgttccgtatgattggagactgcccccatcaatgcttgaggagagagatctgtactttcacaaattaaagctaacatttgaaattgctttgaaactccgaggagggccatctttggtatttgcgcattcgatgggaaataacgtgtttcgctattttttggaatggttgaaactggaaattgctcccaagcactatatccagtggcttgatgagcatatacatgcatattttgcagttggcgctcctcttcttggatctactgaagcagttagaggcgctctttctggaacaacttttggtcttccagtcagtgagggcacagcacggttgatgtttaatgcatttggttcttctctatggcttatgccattctcaaaacactgcaaagctgataatatctactggaagcatttttttgagggaaaaggaggttgtcctcacaaacaacaatgtgatgaagatgaatatatttcagactacggcggatggcccacagaccttgttaatatcgaggttccttcagctcgagatatgggggcatacccatccatcacagatataaccgagaacataacatccattatggagtgtggaaagccaactctcctgtcattttctgccagagaggtttcagatggtactttgttcaaaacgatagaggattatgaccctcagagcaaggcacttgtttatcagcttgagaagtattatcagggtgatccagttctgaaccctctcacaccatgggagagacccccaataaagaacgtattttgcatttacgggattgattcaaagactgaggtaggatattactttgcaccaagtggcaaaccatatccagacaactggataataactgatattatttatgagcttgaaggttccctactttcaagatcaggtaattctgtttctgggaagcctaacaattccagtggtgatggaacagtatcatacaactccctctcatggtgcaagaattggcttggaccaaaagtgaacataacgagggctccacaggcagaacatgatggatctgatctgcaaacagccatgaatattgatcatcatcatggtgacgacatactaccaaacatgacgagggttccgcatgtgaagtacataacctactatgaggatgctgaaagtcttccaggatggagaacagcagtctgggagctcgataaagcaaaccacaggaatattgttaggacgccagtattaatgcgtgagttatggcttgaaatgtggcacgatttgcatcctgattcaaaatcgaaatttgtgacgaaagctttccgaggtccactaagaaacgaagactgtcgctgggactatggaaaggctcgatgtggctttccagaacactgtgaatacaggtatacatttggcgatgtccatctgggaatgagctgcagactgagaaatacgtccgctaaccttcttcaacagtatctctgaaatgtcgtgggccgagtaattttgtgttttgttgctcgcatggaaatggtatctgattccccattttgacctgccaatgaaattagccatcaacaaggtagatacagtatcaaccggaggccctcgaatgacaggtcaactcttattcttgtcaccattttggcacacttaaatctttgaagtcgacatatgcaaagctgaaacaacacgttcgcatgacaaattttggttgaagatggaggccaacgtccccaggagtgtcggcagagttttcctcttgtctgtagcactggcaccttcggcgtcctgaaggtgccatgagatcatacactgatgtacactgtagcatggttttgtaaatcaagccgtcacaaattgacttagtcttacaaaaacgataccctatagattggcagtgttaaaattctttacgactcccaattaaccaccttgattgtaatgtgcccttaaagagatgaaaggatgaactctgctcaatattagaccttgtttggttagggtgactagattttactaaaatacaaaagagggtgactaaggtttcctcctaaagtttagggtctgtttgattgtgtttgttgtggctgtgaaaaaaaatgtgtgagctgtgaaaaaaac

SEQ ID NO: 56332 - DNA, 1566 bp, Zea Mays
gaatggcagtggactattagtttggtactttggtcattgtatgaagaaaggggtagcaggtccagaaccatggtccccaccccagacctctgaaaggaaaacaattgatgattccagatggtgctaatctcacttctatttaagatttaaagttcagcagcaccttttttatcgattccattacctgaagaaacaaattaaactgatgggtattacatgcagccatacatcaaccatgaatcggcttcacagtggaagagttcccccatgcctttcatcagctataacaccagtaccagcgttctcagaggcatcatttcctagttttacagaacagagatcatcttttgctgaaaggaaattacctgttagttctgtcgcctcaattggtacttctatggctgcttatgataccatgtcaacccatatgttagcttccaacttcaccaatgaatcacctaataggcagctttgttctggatcatatgttactgagccatctgatcctgatactccattgctagcaacacattcatcattaatggctgattcaacgcccttattcgtggacttttcagaagtatctgaacatatatgtttgaaccaaggccaacttctaggtttatttgattatccagcaagtgttgatttttacaaatcaaaaaatatgaccatctttggtcaacaaattcaagacaccattacagtcgatcctaacactcaccttacaccgcaaaatgagttgttctctgggagttcaatgcagcttcagaaaactgtaggttctgctgaatctgtgctgaagacagttgatgcaagaagtgcaacacctcaaagttatttatactgccatactgagagtgagaggagtgtaccagaacctttcaactgtgataaacttggcgccgacagcctccctttttcaaacactgctccaaagccaaggatgcgctggacacctgagcttcatgagtgtttcgttgatgctgttaacaagctcggtgggagcgaaaaagcaactccaaaagcagtccagaaggttatgaaggtcgatggattaactatataccatgtaaaaagccatctgcagaaacaccgtatagttcaacatcgttctgaaacatcgggtggtgtgcctggaaggagaggcagccataccgaagtagatgatgactccatcccgcaatcaaaaggcgaagggggcgttgaaggaggactagtgtcgcagattggcttgcagaaacaacttcatgaacaacttgagatccaaagaaggctgcagctgcaagtcgaggaacacaacaagtaccttgaaacggtaatcgcgaagcaaaacgagagccttaaaaagcttagagcgctacgtggttttcgagaccgagtgcggcgtgttttgcaagacagtgaagcacccggagtgcgggcacattgtgcacaagcacaacagagatcgtgagaaatggaatggcagctccgatccagcaggcgaagagttacagcaacctagctatctgtttcttgcggtacattgtaggataggattgatttatttcagtacaaatggag

SEQ ID NO: 56333 - DNA, 1399 bp, Zea Mays
tagcaggtccagaaccatggtccccaccccagacctctgaaaggaaaacaattgatgattccagatggtgctaatctcacttctatttaagatttaaagttcagcagcaccttttttatcgattccattacctgaagaaacaaattaaactgatgggtattacatgcagccatacatcaaccatgaatcggcttcacagtggaagagttcccccatgcctttcatcagctataacaccagtaccagcgttctcagaggcatcatttcctagttttacagaacagagatcatcttttgctgaaaggaaattacctgttagttctgtcgcctcaattggtacttctatggctgcttatgataccatgtcaacccatatgttagcttccaacttcaccaatgaatcacctaataggcagctttgttctggatcatatgttactgagccatctgatcctgatactccattgctagcaacacattcatcattaatggctgattcaacgcccttattcgtggacttttcagaagtatctgaacatatatgtttgaaccaaggccaacttctaggtttatttgattatccagcaagtgttgatttttacaaatcaaaaaatatgaccatctttggtcaacaaattcaagacaccattacagtcgatcctaacactcaccttacaccgcaaaatgagttgttctctgggagttcaatgcagcttcagaaaactgtaggttctgctgaatctgtgctgaagacagttgatgcaagaagtgcaacacctcaaagttatttatactgccatactgagagtgagaggagtgtaccagaacctttcaactgtgataaacttggcgccgacagcctccctttttcaaacactgctccaaagccaaggatgcgctggacacctgagcttcatgagtgtttcgttgatgctgttaacaagctcggtgggagcgaaaaagcaactccaaaagcagtccagaaggttatgaaggtcgatggattaactatataccatgtaaaaagccatctgcagaaacaccgtatagttcaacatcgttctgaaacatcgggtgcaggtgtgcctggaaggagaggcagccataccgaagtagatgatgactccatcccgcaatcaaaaggcgaagggggcgttgaaggaggactagtgtcgcagattggcttgcagaaacaacttcatgaacaacttgagatccaaagaaggctgcagctgcaagtcgaggaacacaacaagtaccttgaaacggtaatcgcgaagcaaaacgagagccttaaaaagcttagagcgctacgtggttttcgagaccgagtgcggcgtgttttgcaagacagtgaagcacccggagtgcgggcacattgtgcacaagcacaacagag

SEQ ID NO: 56334 - DNA, 886 bp, Zea Mays
caccatattcctaatatatttaaaattagatttttttacatatgtatttattatagtctaaaatggtatgtacatattaattctgtatttaattcgtattttagagcataaaaaatttagaggaaaagagagaaccccatatatttagatgcatgaggatctgactctttaatttagagtgccttttagaggcaacgacagtagctttagggtgtgtctaaaactttagggaacgctttaggcaagcacccttgaagaaagttttacacactatgctgggccttctgacatgttttaatctaacaaaaagttctttggaacagactgcataatagttttattagttataattagcggcaacgactgctatgcaagcagtgtttctgtgcaagcgtgcaagcaaaccatctgatccattaaattatgatccaaccacagatacaaccatgatttgttagagttttttttataaaaattattgagctggtgatggaagggtttaaatgttagatatgaattacggttggatcacgatctaatggatcagatggtttgcttgcacgcttgcacagaagcactgcttgcataacagtcgttctcttaattagcatgcctttcagagatccctcaagaaataaaatgcataatgggcctgtcatatctcacaataacaattgttagcaagagggcgtatattttaaatcttggtatctacaatgttttgtttactcagacctcctgaaataatgtatcttcatccaaagctttgaactacaggaaaaggatattcttgactatgcaagacagtcactatagagtgagattactgaaaggattcaatgtcttcgacgcattccatattcagaaaattcatctaatggttcca

SEQ ID NO: 56335 - DNA, 965 bp, Zea Mays
caccatattcctaatatatttaaaattagatttttttacatatgtatttattatagtctaaaatggtatgtacatattaattctgtatttaattcgtattttagagcataaaaaatttagaggaaaagagagaaccccatatatttagatgcatgaggatctgactctttaatttagagtgccttttagaggcaacgacagtagctttagggtgtgtctaaaactttagggaacgctttaggcaagcacccttgaagaaagttttacacactatgctgggccttctgacatgttttaatctaacaaaaagttctttggaacagactgcataatagttttattagttataattagcggcaacgactgctatgcaagcagtgtttctgtgcaagcgtgcaagcaaaccatctgatccattaaattatgatccaaccacagatacaaccatgatttgttagagttttttttataaaaattattgagctggtgatggaagggtttaaatgttagatatgaattacggttggatcacgatctaatggatcagatggtttgcttgcacgcttgcacagaagcactgcttgcataacagtcgttctcttaattagcatgcctttcagagatccctcaagaaataaaatgcataatgggcctgtcatatctcacaataacaattgttagcaagagggcgtatattttaaatcttggtatctacaatgttttgtttactcagacctcctgaaataatgtatcttcatccaaagctttgaactacaggaaaaggatattcttgactatgcaagacagtcactatagagtaaaccatccttactatggcttctacataaagttattatgtgttaatgtttacgatgaaatagatcagcatcgtaattgtgagattactgaaaggattcaatgtcttcgacgcattccatattcagaaaattcatctaatggttcca

SEQ ID NO: 56336 - DNA, 2156 bp, Zea Mays
atttctttcttttaagtaacgaaaaagaaaagagattcacgcggaacataattaattaaggatacgtggtacccagctttggattaaaaaaagataccgtcaactcttgcttcatgcgtggtttcttgtttttgagcttgcagattcataggaaagatcatgctcttcctcgcgaaaaaaaaaccatgcagaatatatactcattcatcatacttaattatgatggtaagaacgatttttttcagttttgatgagtaacagcagtaccacactccgaaagcacaattttgaatacaagcagttccctgttgcgttcactaacaatttgttcttcagtcagtcccaggctgacttccatgtttgcttcaatatctccaccgattattttatccgtaatcacaaacaattggctctttatttttatacagaacattgcatgcactgatacacacaaggtcccagtgtatgcaattccctatgaacgtttgcctcattggagcatagaaaggcaaggcatgaggtccacaacttcagcgagtgcctgtcagttactccgatttgttctcagagttaatctgctgggctagcaacagcagcccaaaagccgcgaataaggataggccggtagatgtgtagccaagaacaagcagtgcggtcttgagcgacttggccaactgcagtgcattgtcatttgtgtattgcgttgtattgtcaggaatactttgcacgcctcgtgctagttgccatgagattaatctggatcaagtaacaagtgtcagatcagatgtatttactttctaatatcacagatgcgctaaaccaaacagtatgacagtccaatgataacacaaaattatgtggaggtgaattctttacagaaagaaatgggttgaccagcgtttgaactttgaacctcgtttcgatgccagggggcaattctaccctctaaccgtgacaagaaaacagaagggaaaatgtagcccaattctaccctctaccaatcaagggcacagctaggttatccatttgataaatggtgttaactagttgcagataactttggagaatcttttgacgacaaatcacaaatcatgttggcataaactatgtagccacatgaagtgaagcatcaacttcataccacgcatctattgtatttccatatgtattcacatgcatacttgagaattaaccgatatcaatctagtgaaaccaaattatactttcagaatatgaaattttgtgttagtttgaatgttacccaaaaattgccgctactgcagaaccgatagtggcactttgagcagtcactccgaactcaaaagcaattacctttagtctccttttttctttcatagcctgaacatcagattgaaccactgggtgtttcgatagcagcttaccattcttgatcattgtttcagcaatctacaaaatcatgttacatttgcacatgccctgtggtttaatctcttgacaatagccgataaaaggtaaattagcaatgatgcagagaaaaaatgcattgatttcagtagtgataaattggccatgctggaatcaactttttataaaacagaaagaaagaagatatgtttatgtggaaccaatttttttagcaaaaagacaacaggcaattggtggcctgaactttatatataaatcatatgccaaggtcagagcatacatgatttgtgaaggtacgtggaaccattttaatctctgatcccactcatagcaaatagcatcaacaaggtatcaaatttggtcatatcatcaagtagttagccaggtataaggttgaaagcaactaatagccgggtggctagagcgtgagcaagtagctaacctttttgagttctccctggttgtactgtcccattgactgaaacctccttccagctgacaccagccgcttgccaaacgctacactatgtaaagcaaacagcaagggacgcgaccttcagacaattgaggactgaattctgacaagtgacaacatcatatggatgcagtccatgcctgatttggcgctgcgcgtcaagtagggctccatcaacggcagctgcttggcaatgctatttgatgttgacgtatcagctaactcccatgcttttgccaggttcaggagcagatcacccacttcttggccacac

SEQ ID NO: 56337 - DNA, 1392 bp, Zea Mays
aaaccctcccttgccttgcccagttgcccccaaaccccagccaccagctataccaatggcggccaccgcgatggaccatgacggcggcgacgacgtggtcacaccaggggagcttctcggaaactcattaaccctcgcggccggacgtggcgcctacgccgacggtcgctctgtgcgcgcgtcggtcaccgggcgccgccgcatcgtgccgcccgcacctggctccgacgaccaggctgcagagatccacggtggaggtggtggggcacaaggcccatggagctgtgccgcagccgggaagcgtcgtcatcgcccgagtaagatgctcagaaatactgggcataatatggtttcaagaattgcaattcatttgcttttgtgaaaacactcaatggcaattggccatgctctgaaatttccaattaccacacgcatcccctggttcaggttggaggtggggcgatgcatgtgtctgaaagtcagagccattactcttgtagttgtctatagggtaataatgggcacaccatcgtatttttcaggcatctttgctgcaggaagtcgtcgaacatagtcacaatgtttttttaaaaagcagaagtttctaaaccgctgattcctgaaagctgtcacttttgcaggtaacaaaggttatggctagaatggcctctgcagatatcatgtgtgttgactcaaaggctatcagagaaaagttcactggcatgataaggcagcaagatgttcgtgcaactgaaattgacaaggtggatatgtaccaatcatatcgtcctggggacattgttaaagctatggttctttctcttggtgatgcaagggcatattacctttccactgcgaaaaatgaacttggagtcgtttcagcacaaagcatagctggtggtacattggttccaatcagttggactgagatgcaatgtgatttgaccggtcaaattgagcaaaggaaagttgcaaaggtggaatagatgtgctgtggccctcctgataaatggtaaacatgtggtggcggtatacaaattgtggaccagtgacaccaggtccttgggcggactacccaattctgcgacgcccaacttcattacagctgcattgagcatgggtttttaaaaccctggctgaatttaactagacatgaatcgtagccatgggtcctgtaacccaaccttgggatctgaatcatagccatgggttctgtaacccagtaaccttgcccttgtgatttgttactctgtgagctaatgacattgcagttttccacctcgtgatttctacaagttttgttgcgcattgttgagaacttgagatctgttgctgtctttctggcatgatgtcaaatggctgtaccggacttgtttcaaacggatcgggggt

SEQ ID NO: 56338 - DNA, 1063 bp, Zea Mays
cgaaaaccctcccttgccttgcccagttgcccccaaaccccagccaccagctataccaatggcggccaccgcgatggaccatgacggcggcgacgacgtggtcacaccaggggagcttctcggaaactcattaaccctcgcggccggacgtggcgcctacgccgacggtcgctctgtgcgcgcgtcggtcaccgggcgccgccgcatcgtgccgcccgcacctggctccgacgaccaggctgcagagatccacggtggaggtggtggggcacaaggcccatggagctgtgccgcagccgggaagcgtcgtcatcgcccgagtaacaaaggttatggctagaatggcctctgcagatatcatgtgtgttgactcaaaggctatcagagaaaagttcactggcatgataaggcagcaagatgttcgtgcaactgaaattgacaaggtggatatgtaccaatcatatcgtcctggggacattgttaaagctatggttctttctcttggtgatgcaagggcatattacctttccactgcgaaaaatgaacttggagtcgtttcagcacaaagcatagctggtggtacattggttccaatcagttggactgagatgcaatgtgatttgaccggtcaaattgagcaaaggaaagttgcaaaggtggaatagatgtgctgtggccctcctgataaatggtggtggcggtatacaaattgtggaccagtgacaccaggtccttgggcggactacccaattctgcgacgcccaacttcattacagctgcattgagcatgggtttttaaaaccctggctgaatttaactagacatgaatcgtagccatgggtcctgtaacccaaccttgggatctgaatcatagccatgggttctgtaacccagtaaccttgcccttgtgatttgttactctgtgagctaatgacattgcagttttccacctcgtgatttctacaagttttgttgcgcattgttgagaacttgagatctgttgctgtctttctggcatgatgtcaaatggctgtaccggacttgtttcaaacggatcgggggt

SEQ ID NO: 56339 - DNA, 1136 bp, Zea Mays
ttgctctcaggtccattgacgactagtatcatcattagaaagcccacgtagtcgagcgaggaggaaaggcggcgaaaaccctcccttgccttgcccagttgcccccaaaccccagccaccagctataccaatggcggccaccgcgatggaccatgacggcggcgacgacgtggtcacaccaggggagcttctcggaaactcattaaccctcgcggccggacgtggcgcctacgccgacggtcgctctgtgcgcgcgtcggtcaccgggcgccgccgcatcgtgccgcccgcacctggctccgacgaccagagatccacggtggaggtggtggggcacaaggcccatggagctgtgccgcagccgggaagcgtcgtcatcgcccgagtaacaaaggttatggctagaatggcctctgcagatatcatgtgtgttgactcaaaggctatcagagaaaagttcactggcatgataaggcagcaagatgttcgtgcaactgaaattgacaaggtggatatgtaccaatcatatcgtcctggggacattgttaaagctatggttctttctcttggtgatgcaagggcatattacctttccactgcgaaaaatgaacttggagtcgtttcagcacaaagcatagctggtggtacattggttccaatcagttggactgagatgcaatgtgatttgaccggtcaaattgagcaaaggaaagttgcaaaggtggaatagatgtgctgtggccctcctgataaatggtaaacatgtggtggcggtatacaaattgtggaccagtgacaccaggtccttgggcggactacccaattctgcgacgcccaacttcattacagctgcattgagcatgggtttttaaaaccctggctgaatttaactagacatgaatcgtagccatgggtcctgtaacccaaccttgggatctgaatcatagccatgggttctgtaacccagtaaccttgcccttgtgatttgttactctgtgagctaatgacattgcagttttccacctcgtgatttctacaagttttgttgcgcattgttgagaacttgagatctgttgctgtctttctggcatgatgtcaaatggctgtaccggacttgtttcaaacggatcgggggt

SEQ ID NO: 56340 - DNA, 2988 bp, Zea Mays
ctctctagctactctgtagattgacagagagacaagagcgctcttgctaccaatctcctcctcgtcgccgccgcggccgctctcgctcccacgatccggcgctgccacgagcttccagatccgccgcccgggcaatgctgtagctgcccgcgccgagatgggcggcgtcggcgccggctctctcgccctgctgcggctgctcctcctcctgctcctccgcgccgaggcctccgctctccacgcgactatattacctagcccagcaccaagtccatcaaaagcccctgaagcgagatcgtttggacctcgaatttccccttcacatcctccgagtgcactacctccaggatctcctggcgttgatgcgcgccatcattcacacaagcacccgcaccacagagagtcaaatcagggcccttcaccatcctcagcacccacacctgaaggttgttctagttatatctgcaccgagccactgactgcaacaccaattggttccccttgtggctgtgtcgagcctattagtgttatcgttgatctggacttagctccttatctactgttcatgagcatagctgagttagaagttgaggttgcagctgggacatttcttaaacaaagccaggtgaagatcatggctgcagttgcaagtatccaggatgaccagaagacacgggtgaccatttatttggtgccgctaagagaacagttcgatacttatacggcatccctaatatctgataggttcatggagaaaaaggttcagataaattcatctatatttggagattataaagttatcaatatcagctatcatggattgcaatccccgccatcatctctgcctggaggatcggatccttcaggaactgaagaatatcctataactgcagaggtgcctgatcagaagaaaaagcacaataaatcagatattttggtcatcgtggtagtgttagggtcttctcttggacttctgatgacatgtgctgttctgctgatcttactagtaagatggaagaaacttggacggcttcatgaggctatgacccctgcaactatcccagcagttaatagaagatatggcaccaggccaactttgtcaaccagcatggtgagctctgcgtcagcatcagtgttttcaacagtggctacttgcacaacatctgtaaagacattttcactagcccaacttcagaaggccacagatggttttgattcaagaagagttttgggtcaagggggctttgggcgtgtctaccatgggacgatagaggatggaaacgaaattgctgttaaattgcttacaagggaggacaggagtggtgaccgtgagtttattgcagaagtggaaatgctcagtcgattgcaccaccggaatcttgtcaaattgattggtatttgcattgagcggagtaaaagatgtcttgtgtatgagctcatacgaaacggaagtgtggaatcccatcttcatggcgctgacaaggctaagggtaagctgaactgggatgttaggatgaaaattgctcttggcgctgctcgaggcttagcatatctgcatgaagattcaaaccctcatgtcatacaccgtgacttcaaggccagcaatatattattagaggaagatttcactcctaaagtgaccgattttggtttagcaagggaagcatccaatgcgactcaacctatatctaccaggttatgttgctccagaatatgcaatgacgggccatcttcttgttaagagcgatgtctacagttatggggttgtcttgctggaacttatatcaggaaggaagcctgtaaacatctctgagtccaaggatcctgagaaccttgtaacttgggcccgtcctctgctaagccataaggagggcctggagaagttaattgatccgtctctggatggaaattttaacttcgacaatgtagcgaaggtggcatccatcgcttccatgtgtgtgcacacagatccatcgcagaggccgttcatgggtgaagttgtccaggcactgaagctgatctacaatgatccagatgaggcttgcgacgattcctacagtccaaggaattcatctgaccaagacggtgactacgaaggagacctggtctttgagagtggaagctggggctttggggcctctgggtgtctagactaccggaattccttaccgtttgtcactatggactacagttctggccgaatagaagggccgcacgaccctcgcgcggcattgtcagcgggatcccatgcccagtcaccagtgctgcagaatagatcaggccccttgcggatgaagaagaagctggcctccttctaccgctctagaggcagcattagtgagcatgggcacctgccacgccattgatcagtcagtgaactagtgttaggctgttagcttcggttgactctgggattgaggctggcgggggttgtcattacctgattcgtgcctcatgttagtgtacagttcgtggtgacccttcacccttgggtatgggtgttttctctctctctttgccttctgcttcttccccggaagcaatgaggatggggttggcaggtgctctctaattttcgcaaattgcggttcatttctcatgcatctgattggtttcttgccggagttctgggcatcatgttgttgtgactaggtggttgtactggatgcagttcgttgtaaacagacagtgtcagggatctacctcgcgttggagaggtgaactatacagccggctcagttcctcaaatgtcaggtggtacctgtgttaatattcttttggttcttactttgcatggtcttattgcattttttttttactttggtcatgagtgatgttcgttctagtcttgtggataactggatatcatggttccgtgttcaattcatgttctctagcacaagcggccctaccttcggacaacggtgtattctttggttgtaaacccaagattctttttactattactaattggagcttttaatgttg

SEQ ID NO: 56341 - DNA, 2817 bp, Zea Mays
gcaatttaatgcgttcccctcctctccccatccctctctagctactctgtagattgacagagagacaagagcgctcttgctaccaatctcctcctcgtcgccgccgcggccgctctcgctcccacgatccggcgctgccacgagcttccagatccgccgcccgggcaatgctgtagctgcccgcgccgagatgggcggcgtcggcgccggctctctcgccctgctgcggctgctcctcctcctgctcctccgcgccgaggcctccgctctccacggttgttctagttatatctgcaccgagccactgactgcaacaccaattggttccccttgtggctgtgtcgagcctattagtgttatcgttgatctggacttagctccttatctactgttcatgagcatagctgagttagaagttgaggttgcagctgggacatttcttaaacaaagccaggtgaagatcatggctgcagttgcaagtatccaggatgaccagaagacacgggtgaccatttatttggtgccgctaagagaacagttcgatacttatacggcatccctaatatctgataggttcatggagaaaaaggttcagataaattcatctatatttggagattataaagttatcaatatcagctatcatggattgcaatccccgccatcatctctgcctggaggatcggatccttcaggaactgaagaatatcctataactgcagaggtgcctgatcagaagaaaaagcacaataaatcagatattttggtcatcgtggtagtgttagggtcttctcttggacttctgatgacatgtgctgttctgctgatcttactagtaagatggaagaaacttggacggcttcatgaggctatgacccctgcaactatcccagcagttaatagaagatatggcaccaggccaactttgtcaaccagcatggtgagctctgcgtcagcatcagtgttttcaacagtggctacttgcacaacatctgtaaagacattttcactagcccaacttcagaaggccacagatggttttgattcaagaagagttttgggtcaagggggctttgggcgtgtctaccatgggacgatagaggatggaaacgaaattgctgttaaattgcttacaagggaggacaggagtggtgaccgtgagtttattgcagaagtggaaatgctcagtcgattgcaccaccggaatcttgtcaaattgattggtatttgcattgagcggagtaaaagatgtcttgtgtatgagctcatacgaaacggaagtgtggaatcccatcttcatggcgctgacaaggctaagggtaagctgaactgggatgttaggatgaaaattgctcttggcgctgctcgaggcttagcatatctgcatgaagattcaaaccctcatgtcatacaccgtgacttcaaggccagcaatatattattagaggaagatttcactcctaaagtgaccgattttggtttagcaagggaagcatccaatgcgactcaacctatatctaccaggttatgttgctccagaatatgcaatgacgggccatcttcttgttaagagcgatgtctacagttatggggttgtcttgctggaacttatatcaggaaggaagcctgtaaacatctctgagtccaaggatcctgagaaccttgtaacttgggcccgtcctctgctaagccataaggagggcctggagaagttaattgatccgtctctggatggaaattttaacttcgacaatgtagcgaaggtggcatccatcgcttccatgtgtgtgcacacagatccatcgcagaggccgttcatgggtgaagttgtccaggcactgaagctgatctacaatgatccagatgaggcttgcgacgattcctacagtccaaggaattcatctgaccaagacggtgactacgaaggagacctggtctttgagagtggaagctggggctttggggcctctgggtgtctagactaccggaattccttaccgtttgtcactatggactacagttctggccgaatagaagggccgcacgaccctcgcgcggcattgtcagcgggatcccatgcccagtcaccagtgctgcagaatagatcaggccccttgcggatgaagaagaagctggcctccttctaccgctctagaggcagcattagtgagcatgggcacctgccacgccattgatcagtcagtgaactagtgttaggctgttagcttcggttgactctgggattgaggctggcgggggttgtcattacctgattcgtgcctcatgttagtgtacagttcgtggtgacccttcacccttgggtatgggtgttttctctctctctttgccttctgcttcttccccggaagcaatgaggatggggttggcaggtgctctctaattttcgcaaattgcggttcatttctcatgcatctgattggtttcttgccggagttctgggcatcatgttgttgtgactaggtggttgtactggatgcagttcgttgtaaacagacagtgtcagggatctacctcgcgttggagaggtgaactatacagccggctcagttcctcaaatgtcaggtggtacctgtgttaatattcttttggttcttactttgcatggtcttattgcattttttttttactttggtcatgagtgatgttcgttctagtcttgtggataactggatatcatggttccgtgttcaattcatgttctctagcacaagcggccctaccttcggacaacggtgtattctttggttgtaaacccaagattctttttactattactaattggagcttttaatgttg

SEQ ID NO: 56342 - DNA, 2966 bp, Zea Mays
actcactaacccctgattagctgctcattaactccacccccgatctgaattggcagtagcagatcggcgtgccattgcatcaccgccagcagcagcagcaagaccaccaaacccaacgagagagcagccgaggcaatttaatgcgttcccctcctctccccatccctctctagctactctgtagattgacagagagacaagagcgctcttgctaccaatctcctcctcgtcgccgccgcggccgctctcgctcccacgatccggcgctgccacgagcttccagatccgccgcccgggcaatgctgtagctgcccgcgccgagatgggcggcgtcggcgccggctctctcgccctgctgcggctgctcctcctcctgctcctccgcgccgaggcctccgctctccacggttgttctagttatatctgcaccgagccactgactgcaacaccaattggttccccttgtggctgtgtcgagcctattagtgttatcgttgatctggacttagctccttatctactgttcatgagcatagctgagttagaagttgaggttgcagctgggacatttcttaaacaaagccaggtgaagatcatggctgcagttgcaagtatccaggatgaccagaagacacgggtgaccatttatttggtgccgctaagagaacagttcgatacttatacggcatccctaatatctgataggttcatggagaaaaaggttcagataaattcatctatatttggagattataaagttatcaatatcagctatcatggattgcaatccccgccatcatctctgcctggaggatcggatccttcaggaactgaagaatatcctataactgcagaggtgcctgatcagaagaaaaagcacaataaatcagatattttggtcatcgtggtagtgttagggtcttctcttggacttctgatgacatgtgctgttctgctgatcttactagtaagatggaagaaacttggacggcttcatgaggctatgacccctgcaactatcccagcagttaatagaagatatggcaccaggccaactttgtcaaccagcatggtgagctctgcgtcagcatcagtgttttcaacagtggctacttgcacaacatctgtaaagacattttcactagcccaacttcagaaggccacagatggttttgattcaagaagagttttgggtcaagggggctttgggcgtgtctaccatgggacgatagaggatggaaacgaaattgctgttaaattgcttacaagggaggacaggagtggtgaccgtgagtttattgcagaagtggaaatgctcagtcgattgcaccaccggaatcttgtcaaattgattggtatttgcattgagcggagtaaaagatgtcttgtgtatgagctcatacgaaacggaagtgtggaatcccatcttcatggcgctgacaaggctaagggtaagctgaactgggatgttaggatgaaaattgctcttggcgctgctcgaggcttagcatatctgcatgaagattcaaaccctcatgtcatacaccgtgacttcaaggccagcaatatattattagaggaagatttcactcctaaagtgaccgattttggtttagcaagggaagcatccaatgcgactcaacctatatctaccagggtaatgggtactttcggttatgttgctccagaatatgcaatgacgggccatcttcttgttaagagcgatgtctacagttatggggttgtcttgctggaacttatatcaggaaggaagcctgtaaacatctctgagtccaaggatcctgagaaccttgtaacttgggcccgtcctctgctaagccataaggagggcctggagaagttaattgatccgtctctggatggaaattttaacttcgacaatgtagcgaaggtggcatccatcgcttccatgtgtgtgcacacagatccatcgcagaggccgttcatgggtgaagttgtccaggcactgaagctgatctacaatgatccagatgaggcttgcgacgattcctacagtccaaggaattcatctgaccaagacggtgactacgaaggagacctggtctttgagagtggaagctggggctttggggcctctgggtgtctagactaccggaattccttaccgtttgtcactatggactacagttctggccgaatagaagggccgcacgaccctcgcgcggcattgtcagcgggatcccatgcccagtcaccagtgctgcagaatagatcaggccccttgcggatgaagaagaagctggcctccttctaccgctctagaggcagcattagtgagcatgggcacctgccacgccattgatcagtcagtgaactagtgttaggctgttagcttcggttgactctgggattgaggctggcgggggttgtcattacctgattcgtgcctcatgttagtgtacagttcgtggtgacccttcacccttgggtatgggtgttttctctctctctttgccttctgcttcttccccggaagcaatgaggatggggttggcaggtgctctctaattttcgcaaattgcggttcatttctcatgcatctgattggtttcttgccggagttctgggcatcatgttgttgtgactaggtggttgtactggatgcagttcgttgtaaacagacagtgtcagggatctacctcgcgttggagaggtgaactatacagccggctcagttcctcaaatgtcaggtggtacctgtgttaatattcttttggttcttactttgcatggtcttattgcattttttttttactttggtcatgagtgatgttcgttctagtcttgtggataactggatatcatggttccgtgttcaattcatgttctctagcacaagcggccctaccttcggacaacggtgtattctttggttgtaaacccaagattctttttactattactaattggagcttttaatgttg

SEQ ID NO: 56343 - DNA, 3169 bp, Zea Mays
aaacaatctacacgtactacgcaggtccgggacgccagaaagcagctcgccagcgtgcgtcactctccctccccgccctcgattcgaaacccacacaagcggagcggaaggggaggccactcactaacccctgattagctgctcattaactccacccccgatctgaattggcagtagcagatcggcgtgccattgcatcaccgccagcagcagcagcaagaccaccaaacccaacgagagagcagccgaggcaatttaatgcgttcccctcctctccccatccctctctagctactctgtagattgacagagagacaagagcgctcttgctaccaatctcctcctcgtcgccgccgcggccgctctcgctcccacgatccggcgctgccacgagcttccagatccgccgcccgggcaatgctgtagctgcccgcgccgagatgggcggcgtcggcgccggctctctcgccctgctgcggctgctcctcctcctgctcctccgcgccgaggcctccgctctccacgcgactatattacctagcccagcaccaagtccatcaaaagcccctgaagcgagatcgtttggacctcgaatttccccttcacatcctccgagtgcactacctccaggatctcctggcgttgatgcgcgccatcattcacacaagcacccgcaccacagagagtcaaatcagggcccttcaccatcctcagcacccacacctgaaggttgttctagttatatctgcaccgagccactgactgcaacaccaattggttccccttgtggctgtgtcgagcctattagtgttatcgttgatctggacttagctccttatctactgttcatgagcatagctgagttagaagttgaggttgcagctgggacatttcttaaacaaagccaggttcatggagaaaaaggttcagataaattcatctatatttggagattataaagttatcaatatcagctatcatggattgcaatccccgccatcatctctgcctggaggatcggatccttcaggaactgaagaatatcctataactgcagaggtgcctgatcagaagaaaaagcacaataaatcagatattttggtcatcgtggtagtgttagggtcttctcttggacttctgatgacatgtgctgttctgctgatcttactagtaagatggaagaaacttggacggcttcatgaggctatgacccctgcaactatcccagcagttaatagaagatatggcaccaggccaactttgtcaaccagcatggtgagctctgcgtcagcatcagtgttttcaacagtggctacttgcacaacatctgtaaagacattttcactagcccaacttcagaaggccacagatggttttgattcaagaagagttttgggtcaagggggctttgggcgtgtctaccatgggacgatagaggatggaaacgaaattgctgttaaattgcttacaagggaggacaggagtggtgaccgtgagtttattgcagaagtggaaatgctcagtcgattgcaccaccggaatcttgtcaaattgattggtatttgcattgagcggagtaaaagatgtcttgtgtatgagctcatacgaaacggaagtgtggaatcccatcttcatggcgctgacaaggctaagggtaagctgaactgggatgttaggatgaaaattgctcttggcgctgctcgaggcttagcatatctgcatgaagattcaaaccctcatgtcatacaccgtgacttcaaggccagcaatatattattagaggaagatttcactcctaaagtgaccgattttggtttagcaagggaagcatccaatgcgactcaacctatatctaccagggtaatgggtactttcggttatgttgctccagaatatgcaatgacgggccatcttcttgttaagagcgatgtctacagttatggggttgtcttgctggaacttatatcaggaaggaagcctgtaaacatctctgagtccaaggatcctgagaaccttgtaacttgggcccgtcctctgctaagccataaggagggcctggagaagttaattgatccgtctctggatggaaattttaacttcgacaatgtagcgaaggtggcatccatcgcttccatgtgtgtgcacacagatccatcgcagaggccgttcatgggtgaagttgtccaggcactgaagctgatctacaatgatccagatgaggcttgcgacgattcctacagtccaaggaattcatctgaccaagacggtgactacgaaggagacctggtctttgagagtggaagctggggctttggggcctctgggtgtctagactaccggaattccttaccgtttgtcactatggactacagttctggccgaatagaagggccgcacgaccctcgcgcggcattgtcagcgggatcccatgcccagtcaccagtgctgcagaatagatcaggccccttgcggatgaagaagaagctggcctccttctaccgctctagaggcagcattagtgagcatgggcacctgccacgccattgatcagtcagtgaactagtgttaggctgttagcttcggttgactctgggattgaggctggcgggggttgtcattacctgattcgtgcctcatgttagtgtacagttcgtggtgacccttcacccttgggtatgggtgttttctctctctctttgccttctgcttcttccccggaagcaatgaggatggggttggcaggtgctctctaattttcgcaaattgcggttcatttctcatgcatctgattggtttcttgccggagttctgggcatcatgttgttgtgactaggtggttgtactggatgcagttcgttgtaaacagacagtgtcagggatctacctcgcgttggagaggtgaactatacagccggctcagttcctcaaatgtcaggtggtacctgtgttaatattcttttggttcttactttgcatggtcttattgcattttttttttactttggtcatgagtgatgttcgttctagtcttgtggataactggatatcatggttccgtgttcaattcatgttctctagcacaagcggccctaccttcggacaacggtgtattctttggttgtaaacccaagattctttttactattactaattggagcttttaatgttg

SEQ ID NO: 56344 - DNA, 849 bp, Zea Mays
gtggttatcagctgcagctgcgcgctgtccaggccctccaggtacggcagcagcgccggccccagcttcagcatccacaagtgctggaagaaacgttggcagatgagccatcaggttgtcctccgagaatcgcatcacaagctgaaacgaaggaaggatagagatcaggggagcgtccaatttgggaaatacacatgcctagttgcatccctcacacctaacacgggtcaaggcaagacgatgagctgtacacatgaatgcgcgcggcaaaacctggtgggctgactacataccttgctcagactattgatgcttacaataagaactttctcatcctggctggccagctgagaagcgatggcctgcacgtttacatgagaaacacaagattacttgcagtgacgacggcaaacaaaaaaaaaaaacagcaacacaagatttcttgtagttaaacagcaacacttaacgacgatgcaaaacaagcttaccccaaggcatctgagtgggtcgaactgagtgaccacagttgtcaagcagatatgggcctgatttacaacctgcagcgacagtgacataaataaaggcttcagatgccagctttgtggttgcaccagcaaatgcgagccgaaccaagcactgcaactgtgcattaccttcaaggcaccgtctttggttgcatgcagcagtttaactacaagaagctcaacgcagttctccatcgccttctgctggacgggaagggcaaggcaaagggtcgttatcatggggaaacggtatccaatggtggcgcgtgtaaacagacgagtagtcactgctaacgactctcagaaaaaaaaaagcttacgtgct

SEQ ID NO: 56345 - DNA, 2092 bp, Zea Mays
ggagtccggatcggggatctgcgacaactacgttgtttaacaataataacggacgtgctgatggagggagagtcaagacgaagccaagaaaggccgaggcaggtgccaacaagcactagcagttgtgcccttgctgtgtttggttgggccctcctcttcctcttctccttctccagtcctgttggcatcgcgtacaagagggcagccagtggaccctcgctgccgccattgctggggtgggccgtgctccagccttgtgcggttggcaggcctactagctgtagagtatagtggaggggaaggggagcgtcgaccaattcgtcccgccctcgccgcgccgctggcctcgctcgcgtgccctccccgatggcggcagcggcgatccaccagttcgccgagtgtatcacctgccacgcctggagccccgaccagtcgatgattgccttttgcccaaacaaccatgaagtacatatctataaattcttcacagacaagtgggagaaacttcatgttttgtcaaagcatgatcaaatagtttcgggaatagactggagtaattcatccaacaaaatcgtaacagtttcacatgatagaaattcatatgtttggacacaagaaggatctgattggatacctactctggttattctaaagttaaatcgtgcagctttatgtgttcagtggagcccaaaagaaaacaagtttgccgtgggaagtggtgccaaatctgtgtgtatttgttattatgaacaagaaaacaattggtggattagcaaggttatcaggaaaaggcatgaatcttctgtcactagtcttgcatggcatccaaacaatatatatcttgcaacaacgtctacagatggtaaatgcagagtgttctctacttttatcaagggtgtagacacaaggggatcacaatcgagcacttcaaccaattcaaaattcggagagcaaattgctcagcttgatctatcatctacctgggtatttggtgtaaggtggtcaccaagtgggaagacattggcctatgcagggcataactccatggtttatgtcatcgatgaagttgaatcttctcctgtggcccaaaacttgacgctgcgtgatctgcctctccgtgatgtgggttctttttgtctctgagcgcacattggttggtgtcggatttgactgcaatcctatgatctttgctgctgatgatactgggctttggagtttcgtaagattcttggacgagatgaaagctgctccatcagcttcaaaagcctcacagctctctgaagcccttggaaagctatatggacaatcaaagcagggggctagtagcgacactgttgaaccatcgaaagctcgtggtggggcccatgagaattgcataacgtgtattgtacccttgagaaaaggaagcgatggtactatcaaacgattcagcacgtcaggattggatggtaaggtcgtggtatgggatttggaaaaccacgtcagcattgcaaaatagctcgagggaaggctttcgttaacaatcaaatcgagggggcttctgtcattacccatcgtgctcaggggaccaccattcgtggcagcggggtcctgcaggttttcaagatccagggccagccaggatcgaaaaactcgcctgatggttgaattgtgtgaccgcggaccaccatgtgtaatccaacagtagaataggatggttccatgaaagcaggccctgctgatatgtggcctgtggggagtggggacctgctctattggtggatccccatacgctaatctttgctttgcccctgttcagggacatcccaccgggtcggtcagttttggcagcatgtgcatgagcttctggttttattactagctgtatgctcgctttgcttttgttctcgagggctagttcggaaactctatttatttaagagatttatatttttctaaaaaaaaattattagaaaaatagaaatctcttgtgaaaatgggattcttaaactagctctgaaatttaaacccctttcgggattgaaggggattagagagggaattagtttatttccactttaatcctcaccctgaaggagattcgaagttccca

SEQ ID NO: 56346 - DNA, 2722 bp, Zea Mays
ggagtccggatcggggatctgcgacaactacgttgtttaacaataataacggacgtgctgatggagggagagtcaagacgaagccaagaaaggccgaggcaggtgccaacaagcactagcagttgtgcccttgctgtgtttggttgggccctcctcttcctcttctccttctccagtcctgttggcatcgcgtacaagagggcagccagtggaccctcgctgccgccattgctggggtgggccgtgctccagccttgtgcggttggcaggcctactagctgtagagtatagtggaggtggagtagtatttttcgcttccattggcctccatccacctctcctccactcgacctgcgcttcactacagcccactggcaggggaaggggagcgtcgaccaattcgtcccgccctcgccgcgccgctggcctcgctcgcgtgccctccccgatggcggcagcggcgatccaccagttcgccgagtgtatcacctgccacgcctggagccccgaccagtcgatgattgccttttgcccaaacaaccatgaagtacatatctataaattcttcacagacaagtgggagaaacttcatgttttgtcaaagcatgatcaaatagtttcgggaatagactggagtaattcatccaacaaaatcgtaacagtttcacatgatagaaattcatatgtttggacacaagaaggatctgattggatacctactctggttattctaaagttaaatcgtgcagctttatgtgttcagtggagcccaaaagaaaacaagtttgccgtgggaagtggtgccaaatctgtgtgtatttgttattatgaacaagaaaacaattggtggattagcaaggttatcaggaaaaggcatgaatcttctgtcactagtcttgcatggcatccaaacaatatatatcttgcaacaacgtctacagatggtaaatgcagagtgttctctacttttatcaagggtgtagacacaaggggatcacaatcgagcacttcaaccaattcaaaattcggagagcaaattgctcagcttgatctatcatctacctgggtatttggtgtaaggtggtcaccaagtgggaagacattggcctatgcagggcataactccatggtttatgtcatcgatgaagttgaatcttctcctgtggcccaaaacttgacgctgcgtgatctgcctctccgtgatgtgggttctttttgtctctgagcgcacattggttggtgtcggatttgactgcaatcctatgatctttgctgctgatgatactgggctttggagtttcgtaagattcttggacgagatgaaagctgctccatcagcttcaaaagcctcacaggtctataccttgtcttgcataacatcaatttatgtagtgaatgcctgtccatattataacttgagtttgttttgctattatgtgagagtgctgttcactctatgtttatcaagtgtttactttatcctaaattgttaagtattaggtgaaccaattcctttcttaatgattgagcttggtttaaattgtttgttcatacaagatgaccccacccccaccctagttgctacatattacaaaccctgcttgcaaaatttggttttctaatggctgtcttattatggctatcttttcagccaatagtctgacctttatgctagtggttctcggtaaggctttgtttggatgtagtcaatcctggtccagttggaattcggtcataaagatttacatgtaatctattccgcggtgtttgaccaatttattttgatgccaaactgatctaatgctgctgaagttctgatcactgagaagctttgtgattgagttgaactcaccaagtcaacatcaggcatgaactaataataccggggggaacaacatttcagctctctgaagcccttggaaagctatatggacaatcaaagcagggggctagtagcgacactgttgaaccatcgaaagctcgtggtggggcccatgagaattgcataacgtgtattgtacccttgagaaaaggaagcgatggtactatcaaacgattcagcacgtcaggattggatggtaaggtcgtggtatgggatttggaaaaccacgtcagcattgcaaaatagctcgagggaaggctttcgttaacaatcaaatcgagggggcttctgtcattacccatcgtgctcaggggaccaccattcgtggcagcggggtcctgcaggttttcaagatccagggccagccaggatcgaaaaactcgcctgatggttgaattgtgtgaccgcggaccaccatgtgtaatccaacagtagaataggatggttccatgaaagcaggccctgctgatatgtggcctgtggggagtggggacctgctctattggtggatccccatacgctaatctttgctttgcccctgttcagggacatcccaccgggtcggtcagttttggcagcatgtgcatgagcttctggttttattactagctgtatgctcgctttgcttttgttctcgagggctagttcggaaactctatttatttaagagatttatatttttctaaaaaaaaattattagaaaaatagaaatctcttgtgaaaatgggattcttaaactagctctgaaatttaaacccctttcgggattgaaggggattagagagggaattagtttatttccactttaatcctcaccctgaaggagattcgaagttccca

SEQ ID NO: 56347 - DNA, 2480 bp, Zea Mays
ggagtccggatcggggatctgcgacaactacgttgtttaacaataataacggacgtgctgatggagggagagtcaagacgaagccaagaaaggccgaggcaggtgccaacaagcactagcagttgtgcccttgctgtgtttggttgggccctcctcttcctcttctccttctccagtcctgttggcatcgcgtacaagagggcagccagtggaccctcgctgccgccattgctggggtgggccgtgctccagccttgtgcggttggcaggcctactagctgtagagtatagtggaggtggagtagtatttttcgcttccattggcctccatccacctctcctccactcgacctgcgcttcactacagcccactggcaggggaaggggagcgtcgaccaattcgtcccgccctcgccgcgccgctggcctcgctcgcgtgccctccccgatggcggcagcggcgatccaccagttcgccgagtgtatcacctgccacgcctggagccccgaccagtcgatgattgccttttgcccaaacaaccatgaagtacatatctataaattcttcacagacaagtgggagaaacttcatgttttgtcaaagcatgatcaaatagtttcgggaatagactggagtaattcatccaacaaaatcgtaacagtttcacatgatagaaattcgtaagtatatgtcaaagtgcaaatttctagaagatctatcttgtttcttactctggcaggggataggtgggtacatatatatattttcatttgacctcagatatgtttggacacaagaaggatctgattggatacctactctggttattctaaagttaaatcgtgcagctttatgtgttcagtggagcccaaaagaaaacaagtttgccgtgggaagtggtgccaaatctgtgtgtatttgttattatgaacaagaaaacaattggtatttaaccccactttaccacccctctttcatcagttgactaccatttttggatgaccttagttatccattattttgtgttgcgtctcccaattggtgatttatgagtacgagtccttgatcatgttctcataatccgtagggttatgtgacactcttgaagtgttgatacacatgtttaactgtcttatatgatacactgtgccgcaggtggattagcaaggttatcaggaaaaggcatgaatcttctgtcactagtcttgcatggcatccaaacaatatatatcttgcaacaacgtctacagatggtaaatgcagagtgttctctacttttatcaagggtgtagacacaaggggatcacaatcgagcacttcaaccaattcaaaattcggagagcaaattgctcagcttgatctatcatctacctgggtatttggtgtaaggtggtcaccaagtgggaagacattggcctatgcagggcataactccatggtttatgtcatcgatgaagttgaatcttctcctgtggcccaaaacttgacgctgcgtgatctgcctctccgtgatgttctttttgtctctgagcgcacattggttggtgtcggatttgactgcaatcctatgatctttgctgctgatgatactgggctttggagtttcgtaagattcttggacgagatgaaagctgctccatcagcttcaaaagcctcacagctctctgaagcccttggaaagctatatggacaatcaaagcagggggctagtagcgacactgttgaaccatcgaaagctcgtggtggggcccatgagaattgcataacgtgtattgtacccttgagaaaaggaagcgatggtactatcaaacgattcagcacgtcaggattggatggtaaggtcgtggtatgggatttggaaaaccacgtcagcattgcaaaatagctcgagggaaggctttcgttaacaatcaaatcgagggggcttctgtcattacccatcgtgctcaggggaccaccattcgtggcagcggggtcctgcaggttttcaagatccagggccagccaggatcgaaaaactcgcctgatggttgaattgtgtgaccgcggaccaccatgtgtaatccaacagtagaataggatggttccatgaaagcaggccctgctgatatgtggcctgtggggagtggggacctgctctattggtggatccccatacgctaatctttgctttgcccctgttcagggacatcccaccgggtcggtcagttttggcagcatgtgcatgagcttctggttttattactagctgtatgctcgctttgcttttgttctcgagggctagttcggaaactctatttatttaagagatttatatttttctaaaaaaaaattattagaaaaatagaaatctcttgtgaaaatgggattcttaaactagctctgaaatttaaacccctttcgggattgaaggggattagagagggaattagtttatttccactttaatcctcaccctgaaggagattcgaagttccca

SEQ ID NO: 56348 - DNA, 3026 bp, Zea Mays
ggagtccggatcggggatctgcgacaactacgttgtttaacaataataacggacgtgctgatggagggagagtcaagacgaagccaagaaaggccgaggcaggtgccaacaagcactagcagttgtgcccttgctgtgtttggttgggccctcctcttcctcttctccttctccagtcctgttggcatcgcgtacaagagggcagccagtggaccctcgctgccgccattgctggggtgggccgtgctccagccttgtgcggttggcaggcctactagctgtagagtatagtggaggtggagtagtatttttcgcttccattggcctccatccacctctcctccactcgacctgcgcttcactacagcccactggcaggggaaggggagcgtcgaccaattcgtcccgccctcgccgcgccgctggcctcgctcgcgtgccctccccgatggcggcagcggcgatccaccagttcgccgagtgtatcacctgccacgcctggagccccgaccagtcgatgattgccttttgcccaaacaaccatgaagtacatatctataaattcttcacagacaagtgggagaaacttcatgttttgtcaaagcatgatcaaatagtttcgggaatagactggagtaattcatccaacaaaatcgtaacagtttcacatgatagaaattcatatgtttggacacaagaaggatctgattggatacctactctggttattctaaagttaaatcgtgcagctttatgtgttcagtggagcccaaaagaaaacaagtttgccgtgggaagtggtgccaaatctgtgtgtatttgttattatgaacaagaaaacaattggtggattagcaaggttatcaggaaaaggcatgaatcttctgtcactagtcttgcatggcatccaaacaatatatatcttgcaacaacgtctacagatggtaaatgcagagtgttctctacttttatcaagggtgtagacacaaggggatcacaatcgagcacttcaaccaattcaaaattcggagagcaaattgctcagcttgatctatcatctacctgggtatttggtgtaaggtggtcaccaagtgggaagacattggcctatgcagggcataactccatggtttatgtcatcgatgaagttgaatcttctcctgtggcccaaaacttgacgctgcgtgatctgcctctccgtgatgtgggttctttttgtctctgagcgcacattggttggtgtcggatttgactgcaatcctatgatctttgctgctgatgatactgggctttggagtttcgtaagattcttggacgagatgaaagctgctccatcagcttcaaaagcctcacaggtctataccttgtcttgcataacatcaatttatgtagtgaatgcctgtccatattataacttgagtttgttttgctattatgtgagagtgctgttcactctatgtttatcaagtgtttactttatcctaaattgttaagtattaggtgaaccaattcctttcttaatgattgagcttggtttaaattgtttgttcatacaagatgaccccacccccaccctagttgctacatattacaaaccctgcttgcaaaatttggttttctaatggctgtcttattatggctatcttttcagccaatagtctgacctttatgctagtggttctcggtaaggctttgtttggatgtagtcaatcctggtccagttggaattcggtcataaagatttacatgtaatctattccgcggtgtttgaccaatttattttgatgccaaactgatctaatgctgctgaagttctgatcactgagaagctttgtgattgagttgaactcaccaagtcaacatcaggcatgaactaataataccggggggaacaacatttcagctctctgaagcccttggaaagctatatggacaatcaaagcagggggctagtagcgacactgttgaaccatcgaaagctcgtggtggggcccatgagaattgcataacgtgtattgtacccttgagaaaaggaagcgatggtactatcaaacgattcagcacgtcagcttacaggattggatggtaaggtcgtggtatgggatttggaaaaccacgtcagcattgcaaaatagctcgagggaaggctttcgttaacaatcaaatcgagggggcttctgtcattacccatcgtgctcaggggaccaccattcgtggcagcggggtcctgcaggttttcaagatccagggccagccaggtagattttttttgggtgcctgtacacagaaacattgccttagcgtagggagaacttgcatctatcaagtagattcaatttttggcgagtaattgtcctttgaattgagtccatacgtattgtgtatccttgctcccaaacaaacccgtaccgtatagtttttagctaggtaggtaggcaattgacgtcatctcttatttctggcgccatgtgtaaaataaccacacacggaattcatccgcggatgctgtgttgggacttatggacgcctcgtttcttctgccggttcttttgcaggatcgaaaaactcgcctgatggttgaattgtgtgaccgcggaccaccatgtgtaatccaacagtagaataggatggttccatgaaagcaggccctgctgatatgtggcctgtggggagtggggacctgctctattggtggatccccatacgctaatctttgctttgcccctgttcagggacatcccaccgggtcggtcagttttggcagcatgtgcatgagcttctggttttattactagctgtatgctcgctttgcttttgttctcgagggctagttcggaaactctatttatttaagagatttatatttttctaaaaaaaaattattagaaaaatagaaatctcttgtgaaaatgggattcttaaactagctctgaaatttaaacccctttcgggattgaaggggattagagagggaattagtttatttccactttaatcctcaccctgaaggagattcgaagttccca

SEQ ID NO: 56349 - DNA, 3015 bp, Zea Mays
ggagtccggatcggggatctgcgacaactacgttgtttaacaataataacggacgtgctgatggagggagagtcaagacgaagccaagaaaggccgaggcaggtgccaacaagcactagcagttgtgcccttgctgtgtttggttgggccctcctcttcctcttctccttctccagtcctgttggcatcgcgtacaagagggcagccagtggaccctcgctgccgccattgctggggtgggccgtgctccagccttgtgcggttggcaggcctactagctgtagagtatagtggaggtggagtagtatttttcgcttccattggcctccatccacctctcctccactcgacctgcgcttcactacagcccactggcaggggaaggggagcgtcgaccaattcgtcccgccctcgccgcgccgctggcctcgctcgcgtgccctccccgatggcggcagcggcgatccaccagttcgccgagtgtatcacctgccacgcctggagccccgaccagtcgatgattgccttttgcccaaacaaccatgaagtacatatctataaattcttcacagacaagtgggagaaacttcatgttttgtcaaagcatgatcaaatagtttcgggaatagactggagtaattcatccaacaaaatcgtaacagtttcacatgatagaaattcatatgtttggacacaagaaggatctgattggatacctactctggttattctaaagttaaatcgtgcagctttatgtgttcagtggagcccaaaagaaaacaagtttgccgtgggaagtggtgccaaatctgtgtgtatttgttattatgaacaagaaaacaattggtggattagcaaggttatcaggaaaaggcatgaatcttctgtcactagtcttgcatggcatccaaacaatatatatcttgcaacaacgtctacagatggtaaatgcagagtgttctctacttttatcaagggtgtagacacaaggggatcacaatcgagcacttcaaccaattcaaaattcggagagcaaattgctcagcttgatctatcatctacctgggtatttggtgtaaggtggtcaccaagtgggaagacattggcctatgcagggcataactccatggtttatgtcatcgatgaagttgaatcttctcctgtggcccaaaacttgacgctgcgtgatctgcctctccgtgatgttctttttgtctctgagcgcacattggttggtgtcggatttgactgcaatcctatgatctttgctgctgatgatactgggctttggagtttcgtaagattcttggacgagatgaaagctgctccatcagcttcaaaagcctcacaggtctataccttgtcttgcataacatcaatttatgtagtgaatgcctgtccatattataacttgagtttgttttgctattatgtgagagtgctgttcactctatgtttatcaagtgtttactttatcctaaattgttaagtattaggtgaaccaattcctttcttaatgattgagcttggtttaaattgtttgttcatacaagatgaccccacccccaccctagttgctacatattacaaaccctgcttgcaaaatttggttttctaatggctgtcttattatggctatcttttcagccaatagtctgacctttatgctagtggttctcggtaaggctttgtttggatgtagtcaatcctggtccagttggaattcggtcataaagatttacatgtaatctattccgcggtgtttgaccaatttattttgatgccaaactgatctaatgctgctgaagttctgatcactgagaagctttgtgattgagttgaactcaccaagtcaacatcaggcatgaactaataataccggggggaacaacatttcagctctctgaagcccttggaaagctatatggacaatcaaagcagggggctagtagcgacactgttgaaccatcgaaagctcgtggtggggcccatgagaattgcataacgtgtattgtacccttgagaaaaggaagcgatggtactatcaaacgattcagcacgtcaggattggatggtaaggtcgtggtatgggatttggaaaaccacgtcagcattgcaaaatagctcgagggaaggctttcgttaacaatcaaatcgagggggcttctgtcattacccatcgtgctcaggggaccaccattcgtggcagcggggtcctgcaggttttcaagatccagggccagccaggtagattttttttgggtgcctgtacacagaaacattgccttagcgtagggagaacttgcatctatcaagtagattcaatttttggcgagtaattgtcctttgaattgagtccatacgtattgtgtatccttgctcccaaacaaacccgtaccgtatagtttttagctaggtaggtaggcaattgacgtcatctcttatttctggcgccatgtgtaaaataaccacacacggaattcatccgcggatgctgtgttgggacttatggacgcctcgtttcttctgccggttcttttgcaggatcgaaaaactcgcctgatggttgaattgtgtgaccgcggaccaccatgtgtaatccaacagtagaataggatggttccatgaaagcaggccctgctgatatgtggcctgtggggagtggggacctgctctattggtggatccccatacgctaatctttgctttgcccctgttcagggacatcccaccgggtcggtcagttttggcagcatgtgcatgagcttctggttttattactagctgtatgctcgctttgcttttgttctcgagggctagttcggaaactctatttatttaagagatttatatttttctaaaaaaaaattattagaaaaatagaaatctcttgtgaaaatgggattcttaaactagctctgaaatttaaacccctttcgggattgaaggggattagagagggaattagtttatttccactttaatcctcaccctgaaggagattcgaagttccca

SEQ ID NO: 56350 - DNA, 2361 bp, Zea Mays
ggagtccggatcggggatctgcgacaactacgttgtttaacaataataacggacgtgctgatggagggagagtcaagacgaagccaagaaaggccgaggcaggtgccaacaagcactagcagttgtgcccttgctgtgtttggttgggccctcctcttcctcttctccttctccagtcctgttggcatcgcgtacaagagggcagccagtggaccctcgctgccgccattgctggggtgggccgtgctccagccttgtgcggttggcaggcctactagctgtagagtatagtggaggtggagtagtatttttcgcttccattggcctccatccacctctcctccactcgacctgcgcttcactacagcccactggcaggggaaggggagcgtcgaccaattcgtcccgccctcgccgcgccgctggcctcgctcgcgtgccctccccgatggcggcagcggcgatccaccagttcgccgagtgtatcacctgccacgcctggagccccgaccagtcgatgattgccttttgcccaaacaaccatgaagtacatatctataaattcttcacagacaagtgggagaaacttcatgttttgtcaaagcatgatcaaatagtttcgggaatagactggagtaattcatccaacaaaatcgtaacagtttcacatgatagaaattcgtaagtatatgtcaaagtgcaaatttctagaagatctatcttgtttcttactctggcaggggataggtgggtacatatatatattttcatttgacctcagatatgtttggacacaagaaggatctgattggatacctactctggttattctaaagttaaatcgtgcagctttatgtgttcagtggagcccaaaagaaaacaagtttgccgtgggaagtggtgccaaatctgtgtgtatttgttattatgaacaagaaaacaattggtggattagcaaggttatcaggaaaaggcatgaatcttctgtcactagtcttgcatggcatccaaacaatatatatcttgcaacaacgtctacagatggtaaatgcagagtgttctctacttttatcaagggtgtagacacaaggggatcacaatcgagcacttcaaccaattcaaaattcggagagcaaattgctcagcttgatctatcatctacctgggtatttggtgtaaggtggtcaccaagtgggaagacattggcctatgcagggcataactccatggtttatgtcatcgatgaagttgaatcttctcctgtggcccaaaacttgacgctgcgtgatctgcctctccgtgatgttctttttgtctctgagcgcacattggttggtgtcggatttgactgcaatcctatgatctttgctgctgatgatactgggctttggagtttcgtaagattcttggacgagatgaaagctgctccatcagcttcaaaagcctcacagttctgatcactgagaagctttgtgattgagttgaactcaccaagtcaacatcaggcatgaactaataataccggggggaacaacatttcagctctctgaagcccttggaaagctatatggacaatcaaagcagggggctagtagcgacactgttgaaccatcgaaagctcgtggtggggcccatgagaattgcataacgtgtattgtacccttgagaaaaggaagcgatggtactatcaaacgattcagcacgtcaggattggatggtaaggtcgtggtatgggatttggaaaaccacgtcagcattgcaaaatagctcgagggaaggctttcgttaacaatcaaatcgagggggcttctgtcattacccatcgtgctcaggggaccaccattcgtggcagcggggtcctgcaggttttcaagatccagggccagccaggatcgaaaaactcgcctgatggttgaattgtgtgaccgcggaccaccatgtgtaatccaacagtagaataggatggttccatgaaagcaggccctgctgatatgtggcctgtggggagtggggacctgctctattggtggatccccatacgctaatctttgctttgcccctgttcagggacatcccaccgggtcggtcagttttggcagcatgtgcatgagcttctggttttattactagctgtatgctcgctttgcttttgttctcgagggctagttcggaaactctatttatttaagagatttatatttttctaaaaaaaaattattagaaaaatagaaatctcttgtgaaaatgggattcttaaactagctctgaaatttaaacccctttcgggattgaaggggattagagagggaattagtttatttccactttaatcctcaccctgaaggagattcgaagttccca

SEQ ID NO: 56351 - DNA, 1164 bp, Zea Mays
tttcgtgtctctctattgtcttagcttagggtaacaagttacttaccatttggtggcggaccaaggaaatgtgtgggtgacatgtttgctacttttgagactgtggtggcaacagcaatgcttgtcaagcgatttgactttcagatggctccaggagcacctccggttgacatgacaactggagcaacgattcacacgactgagggattaaaaatgactgttactcgaagaacaaggccaccagtaattccaaacctggagatgaaaattattaccgattcacaagaatccacactttctgccccatcgatggttgttagtgctgcttctgttgcttcaggagaagaccaagggggcatctcctgatttaagcagtttcaacatagagaacgagcatatccatttatattgctctggaagtatttggctagtttacagcatttgattacgcaagcagtacaaaacagagatagtctcctggcgtgctacaacgaaaaactccaaacccttccgcagacttgttaccgatggatggcacagcagactcctataggttacagggggtgtgtttgtttactttctagattatatatgttggattatggtggaagggtaatagggtaaaaatcactttaggactgcaaataagctaaaataatctaacattgggtagtttatttcagcttatttgtgatcttaaagttgtattttaccctattactctttcaccataatccaacttatataatctagaatggaaacaaatagggcctaggtctccttgctgatactcaaaagcatcaaaagcaccatggacatatctacatatttacaagaagtttctgacttccatgcatggatttgtgcgctcctaaatcttcagcatgccttccaacacacgaagaacatcagcacgggcaattatacctgttgatagtgtttagaaccccattaggcttgcaacatactctgtgttgtcaatgttaattaaggataatacaaatgaagtatgtacatgcagtttttttatctctagtttgtcagcattctgatactcacatattacttgttcatcctgattctcagctggtaatctcacttattactaatctgtggatctccatcttgagcatccgaaccacagcatctatagacactaaacgt

SEQ ID NO: 56352 - DNA, 2701 bp, Zea Mays
cccctgcagcctctcgctgcccactttccatgtcactgcaccactgccgcgctgccacgacgcccgccatgcccgccaccggcctctcgtccgcgggcgcttccccgttccgcctgcccgcctccagctcctccgcccagggccacctccgtctctccccccctgctgccactgccagtgccaccgcctgccgccgccgcttgcttctccgctgcgccgcctcttctggcggtggcggcggcagcggctccgacccggtcctagaggagcagcggcgccgccaggccgagctcgccgcgcgcattgcgtccggcgagttcaccgtgcaaggccccgggtggattgcgcctctcgtggggaggctctccaagctgggcccgccgggggagctcgccgccgcgctgctcaccagggtagcgggcgctggcggcccggagatcccgcaggcagtggggtcgatcaacgcggtcgtgggccaggccttcttcgtgcccctgtacgacctcttcctcacctacggcggcatctttcgcctcaactttggccctaagtcgtttcttattgtctccgatccggctatcgctaagcacatcctgagggagaactccaaagcttattccaaggtttgatcccagctgatggggagatttggcgtgttcggaggcgtgctatcgtccccgcactgcatcagaagtatgtgactgcgatgattggtctctttggggaagcttcacaacggctctgcgagaaattggacaaggcagcagtggatggggaggacatggagatggagtcgctgttctctcgactcacactggatgtcatcgggaaggcggtgttcaattatgattttgactcattatcttatgataacgggatagtcgaggcagtgtatgtaacactaagggaagcagagatgcgtagcacttctcctataccaacatgggaaatacccatttggaaggacatttccccacggcagaagaaggtcaacgaagctctcaagttgataaatagtactctcgatgaactaattgccatctgcaagagacttgtagagcaagaagatcttcagtttcatgaggaatacatgaacgagcaagacccaagtattcttcacttccttttggcatctggagatgatgtctccagcaagcaactccgtgatgatttgatgaccatgctcattgctggtcatgagacttcagcagctgtcttgacatggacattttatcttctatctaagtatccaaaggtaatggccaagctccaagatgaggctgatagtgttctaggtgatggtttgccaacaattgaggatgtgaagaaactaaagtacacgactcgggttattaatgaatcattgagactatatccacagccgccggttttaattcgtaggtcacttgaggacgatatcctgggagggtacccaattggccgaggagaagatatttttatttctgtctggaatcttcaccactgcccaaagcactgggatgatgcagaagttttcaatccagaaagatggcctttggatggaccaaatccaaacgagataaaccaaaatttcagttacttaccatttggtggcggaccaaggaaatgtgtgggtgacatgtttgctacttttgagactgtggtggcaacagcaatgcttgtcaagcgatttgactttcagatggctccaggagcacctccggttgacatgacaactggagcaacgattcacacgactgagggattaaaaatgactgttactcgaagaacaaggccaccagtaattccaaacctggagatgaaaattattaccgattcacaagaatccacactttctgccccatcgatggttgttagtgctgcttctgttgcttcaggagaagaccaagggggcatctcctgatttaagcagtttcaacatagagaacgagcatatccatttatattgctctggaagtatttggctagtttacagcatttgattacgcaagcagtacaaaacagagatagtctcctggcgtgctacaacgaaaaactccaaacccttccgcagacttgttaccgatggatggcacagcagactcctataggttacagggggtgtgtttgtttactttctagattatatatgttggattatggtggaagggtaatagggtaaaaatcactttaggactgcaaataagctaaaataatctaacattgggtagtttatttcagcttatttgtgatcttaaagttgtattttaccctattactctttcaccataatccaacttatataatctagaatggaaacaaatagggcctaggtctccttgctgatactcaaaagcatcaaaagcaccatggacatatctacatatttacaagaagtttctgacttccatgcatggatttgtgcgctcctaaatcttcagcatgccttccaacacacgaagaacatcagcacgggcaattatacctgttgatagtgtttagaaccccattaggcttgcaacatactctgtgttgtcaatgttaattaaggataatacaaatgaagtatgtacatgcagtttttttatctctagtttgtcagcattctgatactcacatattacttgttcatcctgattctcagctggtaatctcacttattactaatctgtggatctccatcttgagcatccgaaccacagcatctatagacactaaacgt

SEQ ID NO: 56353 - DNA, 2755 bp, Zea Mays
gggcactgcccgattccacccctgcagcctctcgctgcccactttccatgtcactgcaccactgccgcgctgccacgacgcccgccatgcccgccaccggcctctcgtccgcgggcgcttccccgttccgcctgcccgcctccagctcctccgcccagggccacctccgtctctccccccctgctgccactgccagtgccaccgcctgccgccgccgcttgcttctccgctgcgccgcctcttctggcggtggcggcggcagcggctccgacccggtcctagaggagcagcggcgccgccaggccgagctcgccgcgcgcattgcgtccggcgagttcaccgtgcaaggccccgggtggattgcgcctctcgtggggaggctctccaagctgggcccgccgggggagctcgccgccgcgctgctcaccagggtagcgggcgctggcggcccggagatcccgcaggcagtggggtcgatcaacgcggtcgtgggccaggccttcttcgtgcccctgtacgacctcttcctcacctacggcggcatctttcgcctcaactttggccctaagtcgtttcttattgtctccgatccggctatcgctaagcacatcctgagggagaactccaaagcttattccaagggaattcttgctgagatattggagtttgtgatgggcacaggtttgatcccagctgatggggagatttggcgtgttcggaggcgtgctatcgtccccgcactgcatcagaagtatgtgactgcgatgattggtctctttggggaagcttcacaacggctctgcgagaaattggacaaggcagcagtggatggggaggacatggagatggagtcgctgttctctcgactcacactggatgtcatcgggaaggcggtgttcaattatgattttgactcattatcttatgataacgggatagtcgagtgtatgtaacactaagggaagcagagatgcgtagcacttctcctataccaacatgggaaatacccatttggaaggacatttccccacggcagaagaaggtcaacgaagctctcaagttgataaatagtactctcgatgaactaattgccatctgcaagagacttgtagagcaagaagatcttcagtttcatgaggaatacatgaacgagcaagacccaagtattcttcacttccttttggcatctggagatgatgtctccagcaagcaactccgtgatgatttgatgaccatgctcattgctggtcatgagacttcagcagctgtcttgacatggacattttatcttctatctaagtatccaaaggtaatggccaagctccaagatgaggctgatagtgttctaggtgatggtttgccaacaattgaggatgtgaagaaactaaagtacacgactcgggttattaatgaatcattgagactatatccacagccgccggttttaattcgtaggtcacttgaggacgatatcctgggagggtacccaattggccgaggagaagatatttttatttctgtctggaatcttcaccactgcccaaagcactgggatgatgcagaagttttcaatccagaaagatggcctttggatggaccaaatccaaacgagataaaccaaaatttcagttacttaccatttggtggcggaccaaggaaatgtgtgggtgacatgtttgctacttttgagactgtggtggcaacagcaatgcttgtcaagcgatttgactttcagatggctccaggagcacctccggttgacatgacaactggagcaacgattcacacgactgagggattaaaaatgactgttactcgaagaacaaggccaccagtaattccaaacctggagatgaaaattattaccgattcacaagaatccacactttctgccccatcgatggttgttagtgctgcttctgttgcttcaggagaagaccaagggggcatctcctgatttaagcagtttcaacatagagaacgagcatatccatttatattgctctggaagtatttggctagtttacagcatttgattacgcaagcagtacaaaacagagatagtctcctggcgtgctacaacgaaaaactccaaacccttccgcagacttgttaccgatggatggcacagcagactcctataggttacagggggtgtgtttgtttactttctagattatatatgttggattatggtggaagggtaatagggtaaaaatcactttaggactgcaaataagctaaaataatctaacattgggtagtttatttcagcttatttgtgatcttaaagttgtattttaccctattactctttcaccataatccaacttatataatctagaatggaaacaaatagggcctaggtctccttgctgatactcaaaagcatcaaaagcaccatggacatatctacatatttacaagaagtttctgacttccatgcatggatttgtgcgctcctaaatcttcagcatgccttccaacacacgaagaacatcagcacgggcaattatacctgttgatagtgtttagaaccccattaggcttgcaacatactctgtgttgtcaatgttaattaaggataatacaaatgaagtatgtacatgcagtttttttatctctagtttgtcagcattctgatactcacatattacttgttcatcctgattctcagctggtaatctcacttattactaatctgtggatctccatcttgagcatccgaaccacagcatctatagacactaaacgt

SEQ ID NO: 56354 - DNA, 2962 bp, Zea Mays
gtgaggggctgcaaacagcctggtttgcagccgggctgcaacaaattttttttccttcagctctgtttcgtcgtgtcttgtcccgcccgggctctcgtcggtctcggaccggtacgcaacaaacggggggagcacccgactccacgtcctcttccaccaccaccaccaccgcctcatcccccaccaccgagcagcacagcacagggcactgcccgattccacccctgcagcctctcgctgcccactttccatgtcactgcaccactgccgcgctgccacgacgcccgccatgcccgccaccggcctctcgtccgcgggcgcttccccgttccgcctgcccgcctccagctcctccgcccagggccacctccgtctctccccccctgctgccactgccagtgccaccgcctgccgccgccgcttgcttctccgctgcgccgcctcttctggcggtggcggcggcagcggctccgacccggtcctagaggagcagcggcgccgccaggccgagctcgccgcgcgcattgcgtccggcgagttcaccgtgcaaggccccgggtggattgcgcctctcgtggggaggctctccaagctgggcccgccgggggagctcgccgccgcgctgctcaccagggtagcgggcgctggcggcccggagatcccgcaggcagtggggtcgatcaacgcggtcgtgggccaggccttcttcgtgcccctgtacgacctcttcctcacctacggcggcatctttcgcctcaactttggccctaagtcgtttcttattgtctccgatccggctatcgctaagcacatcctgagggagaactccaaagcttattccaagggaattcttgctgagatattggagtttgtgatgggcacaggtttgatcccagctgatggggagatttggcgtgttcggaggcgtgctatcgtccccgcactgcatcagaagtatgtgactgcgatgattggtctctttggggaagcttcacaacggctctgcgagaaattggacaaggcagcagtggatggggaggacatggagatggagtcgctgttctctcgactcacactggatgtcatcgggaaggcggtgttcaattatgattttgactcattatcttatgataacgggatagtcgaggcagtgtatgtaacactaagggaagcagagatgcgtagcacttctcctataccaacatgggaaatacccatttggaaggacatttccccacggcagaagaaggtcaacgaagctctcaagttgataaatagtactctcgatgaactaattgccatctgcaagagacttgtagagcaagaagatcttcagtttcatgaggaatacatgaacgagcaagacccaagtattcttcacttccttttggcatctggagatgatgtctccagcaagcaactccgtgatgatttgatgaccatgctcattgctggtcatgagacttcagcagctgtcttgacatggacattttatcttctatctaagtatccaaaggtaatggccaagctccaagatgaggctgatagtgttctaggtgatggtttgccaacaattgaggatgtgaagaaactaaagtacacgactcgggttattaatgaatcattgagactatatccacagccgccggttttaattcgtaggtcacttgaggacgatatcctgggagggtacccaattggccgaggagaagatatttttatttctgtctggaatcttcaccactgcccaaagcactgggatgatgcagaagttttcaatccagaaagatggcctttggatggaccaaatccaaacgagataaaccaaaatttcagttacttaccatttggtggcggaccaaggaaatgtgtgggtgacatgtttgctacttttgagactgtggtggcaacagcaatgcttgtcaagcgatttgactttcagatggctccaggagcacctccggttgacatgacaactggagcaacgattcacacgactgagggattaaaaatgactgttactcgaagaacaaggccaccagtaattccaaacctggagatgaaaattattaccgattcacaagaatccacactttctgccccatcgatggttgttagtgctgcttctgttgcttcaggagaagaccaagggggcatctcctgatttaagcagtttcaacatagagaacgagcatatccatttatattgctctggaagtatttggctagtttacagcatttgattacgcaagcagtacaaaacagagatagtctcctggcgtgctacaacgaaaaactccaaacccttccgcagacttgttaccgatggatggcacagcagactcctataggttacagggggtgtgtttgtttactttctagattatatatgttggattatggtggaagggtaatagggtaaaaatcactttaggactgcaaataagctaaaataatctaacattgggtagtttatttcagcttatttgtgatcttaaagttgtattttaccctattactctttcaccataatccaacttatataatctagaatggaaacaaatagggcctaggtctccttgctgatactcaaaagcatcaaaagcaccatggacatatctacatatttacaagaagtttctgacttccatgcatggatttgtgcgctcctaaatcttcagcatgccttccaacacacgaagaacatcagcacgggcaattatacctgttgatagtgtttagaaccccattaggcttgcaacatactctgtgttgtcaatgttaattaaggataatacaaatgaagtatgtacatgcagtttttttatctctagtttgtcagcattctgatactcacatattacttgttcatcctgattctcagctggtaatctcacttattactaatctgtggatctccatcttgagcatccgaaccacagcatctatagacactaaacgt

SEQ ID NO: 56355 - DNA, 4441 bp, Zea Mays
gttgaagttaataatcctatataaagaatgacaagtacattccattagaagtgaattgccaaatcatagattcatagtatcctcttcaactgaaaaaataatggttgaagctagctgaactatttccatccacatttgccgcttagattcatctactgctcttctaaggtccatttggttgagtgagatgggatggagccgatccattctgcttttggttggagagcaaacggagcggtcagggtggaacggctctaaatcaggaatattcccaccggatttggaacaagctcgctccaaaaaacggtggaatcctaccgttcaacttctccctatctctttgcggtgggtccaaacagaaaatggaacgattctactccgctctcagaatctggaatgcagctgctccaccctctaaatctggaatggaaccgctccactcccctggctctccaaccaaacgggccctaaaagagcatctcagagcttacagctctttcaccagtctttctctattctgccatctcattcccagaagtcataagatcagttgcacaagtgcctgattaattgtaatccttgcagtgaattcaagacaaatctaggttagcagctgcgccaggaaaacagagattaacctaccatatcagaagctgactaccagagcttgtacacaagatttgaaaatgcatcaccattgacctatatgtttcctttcaaaacttagcctaacattggaactaacacccctactttatattttcagcgaatactcagagtgatgaatggcaagtaccatatgtacaatggttggtgacaccttctgttggggtttcaggaagtgagtttatcaaggaaaatgctagagcagctgtctctcgatattccaagcagccttctcccaatgcatcctgaaaaaaatccaatgccttggacatcttcaggcatccaatcaatcacctttccctgagggtggagctcggaagtatcagtaattacaatctgataaacagtatcattcgatgtgagttctactaggtacatctgtgctcagatttgtgctttatagcttttctcgcccttgcagatagctctttcctcttctcatcagaaaataagccagataaggtcagcttttcaggcttgtaggtagcatctaatccgagaatttgcctctctacaagcttcctaatcttgttatttccatggatcttgcaagctgtcagaagagatgaccatatcacaagatttgctttgaaaggcatattctggataaagttgtaagcatcatcaagacgtccagctcttccaagaagatcagccatgcaagcgtgatgcttgacatctggtttgacaccgtacttgtccagcattgatgagaacatcttacacccttgttcgaccaagttactgcgactgcatgcgcacaggattcccacaaatgtgatgtcatcaggttggagccccaggctttccattttatcaaaaagtgagatagctttctcaccataaccatggtgagcgagtccatgtatcatagcattgaacaactccacagtcttgaattcatcagtgattccacgaaacacatccatagctgtctgtatgcacccatgttttgcatatatgtgcacgaagctggtggcaactcttgcatttctgctaaccaatccattctggttcatacgataatggagcctctttacaaggctaatagcatcattctgggcacaagctgaaagcacggtgacgaccgtcatctcatcagcctcaagtcctgccgcttccatctcctcgaacaacccaagtgcctccttgtatctacctgcctgcacatatccaccgaccaaaactgtccacgcaaccaagtccttattgggcatctcatcaaacaacttccgagccatgccgatctccccaaccctagcataccctgataccatcacactccaaactctcacgtccttcaccttctccccaaacaaatcaaatgttttcctggcgaggtgcactgcaccacacttgacatacatgtccactaacccaatcaccacctctccagagtcgagcaatctatgcctcaatgtcctgctggcaaacccatgcgcagctttggccaccatgaaatcgcctagcccagcacaggcacccagcaacgctctgatggtccactcgtccagccggaaccctccctccaccatgttcctgaacaccaccaacgcgcgttcaacgcgtcccgactgcacgtacgaaccgatcagggtgttgaacgacacggtgtccctggtcggcatttcgtcgaacagcttgcacgcgagggcgtggagaccgaacgcggcatagaaatggaggagcgaattggcggcgaagacgtcggaggcgaatcccgactttaggaggaaggcgtggatgcagagtccgggggaaggggactcgaggcgggagcaggctgcgagaaccgcggagagggagcgggagtcgggaacagccccctcctcctgggaagcggtggcgccggttgtggcggggtggtggtcgcggagcacgcggaggaagaggcggagcgaggcaagcggatggccggcgcggaggtgcgggcggaggaggtgtgaggccgcggcggggggcagcgggaggcccaagagcaggagctgcgcgtgcgcctgaagcgaggggcggtggcggagggaggcgagcagggagaggtggaggaaaccgccgggcgcggcggcgatggcgcggccggcatggcggcgcaagggcatgggcaaacgacggggaggcctccgccgaccgcgtgggtgttccggcgtttgaatcggtggaggcgtgaacgtgcgacgaaggcgtaactgaggaatacgtatccggtgagctttaggagatgcaacgaggcccgggcgcccggcccatcgagtatagcagtcgatggcccatcgagtatagcagacgaagttgtagttgctctcctccgagaaccctcgccgccgccacccaccggagctccggtttgcagttcttcgctgaaggccatggatcacgacagattgaatttgccgagcacgtcggctatttcgctggaggtgatgggccaccagctacatatttcacaggatccaaactccaagcaccatgggaccacggtctgggatgcatcaatggtgtttgtcaagtttttggtaatttctttgagttccaggccttcctgcacaagttgatgaaaagaatagcagaaaaggtcgcttttgtccgtccaaactaaaaggaaagagagtgattgaattgggagctggctgcggtctagctgggttcggaatggccttgttgggtggtgatgttacaacaactgaccaagccgaggtgctcccactgcttatgagaaatgttgaacggaacagatcttggatctcacaatcgaaccccgactcagatatattggcaaacacaaaaacagattccgttggctcaattacagttgcagaattggactgggggaacaaagaacatatcaaggccgttgaacctccatttgattacattgtaggaactgacgttgtttattcggagcatctgttgcaacctctaatggagacgattactgcattatctggtcctaaaacaaaaatattgctagggtacgagatccgttcgacaactgtccatgagaagatgatggaaatgtggaaaagcaatttcattgtgaaaacggtctctagatcgaagatggatgtgaaatatcagcatcctagcatacatctctacatgatggacctgaaggcaccattgatccctgaggttgaggctgccgacaatgggaactacgaggaagaggttgaggttgctgtgaatcaagaggaagacgaagatcctggagtgaagagcgaatcttgttccggctcgtcaccagaggctaagagcggcagtctggatgattgggaaatcagaaggtgtggggctatggctgcaaggcttctgaaggatgtgaaactgtaaacatgaatcctagagatcgttttccccccttgtcagagaactctagagctcctttatgttgttgtccttgatagttgttgtactgcccatggcagtctatgttattgtatcttattgcatcagtggatattgataccattccaaaagaaaaaggaagtttctctatctctctctctgatagatgtcaggacaacacggctaatgagtcagataagaggggctcttgcttgcaccggcgcctggcggtagaaacaaggtaaatgatggggtgaaaaacaagggcagctgtggttggtttgtgtttatgacaggttgttcgttttgtattaaagccaattatttagactgctgcagctacaatttatatggacaaaatactgtaaaagaattatagccaaacgaacagttaaggaaatagaagctggtacgaaagccaaacgaacagtta

SEQ ID NO: 56356 - DNA, 1135 bp, Zea Mays
gttacttgttagcaactggcaagagtgattgcgattgaatttgccgagcacgtcggctatttcgctggaggtgatgggccaccagctacatatttcacaggatccaaactccaagcaccatgggaccacggtctgggatgcatcaatggtgtttgtcaagtttttggtaatttctttgagttccaggccttcctgcacaagttgatgaaaagaatagcagaaaaggtcgcttttgtccgtccaaactaaaaggaaagagagtgattgaattgggagctggctgcggtctagctgggttcggaatggccttgttgggtggtgatgttacaacaactgaccaagccgaggtgctcccactgcttatgagaaatgttgaacggaacagatcttggatctcacaatcgaaccccgactcagattccgttggctcaattacagttgcagaattggactgggggaacaaagaacatatcaaggccgttgaacctccatttgattacattgtttattcggagcatctgttgcaacctctaatggagacgattactgcattatctggtcctaaaacaaaaatattgctagggtacgagatccgttcgacaactgtccatgagaagatgatggaaatgtggaaaagcaatttcattgtgaaaacggtctctagatcgaagatggatgtgaaatatcagcatcctagcatacatctctacatgatggacctgaaggcaccattgatccctgaggttgaggctgccgacaatgggaactacgaggaagaggttgaggttgctgtgaatcaagaggaagacgaagatcctggagtgaagagcgaatcttgttccggctcgtcaccagaggctaagagcggcagtctggatgattgggaaatcagaaggtgtggggctatggctgcaaggcttctgaaggatgtgaaactgtaaacatgaatcctagagatcgttttccccccttgtcagagaactctagagctcctttatgttgttgtccttgatagttgttgtactgcccatggcagtctatgttattgtatcttattgcatcagtggatattgataccattccaaaagaaaaaggaagtttctctatctctctctctgatagatgtcaggacaac

SEQ ID NO: 56357 - DNA, 1360 bp, Zea Mays
cagttttttaaaaaccaagaagctggtcactcctggctaaaaaataaaagcagtttcttagaaactgagtttcttccaaacaggacctagtttttttgttttgaagaaactaagaatccagattctataaattagggtataagctggtgtgtttggaaccacctcagttttcataaaccagttttttaaaaactggatgcttccaaacaggcccttacatggtgattggtgatggtggtgattgaaccttgttacttgttagcaactggcaagagtgattgcgattgaatttgccgagcacgtcggctatttcgctggaggtgatgggccaccagctacatatttcacaggatccaaactccaagcaccatgggaccacggtctgggatgcatcaatggtgtttgtcaagtttttggaaaagaatagcagaaaaggtcgcttttgtccgtccaaactaaaaggaaagagagtgattgaattgggagctggctgcggtctagctgggttcggaatggccttgttgggtggtgatgttacaacaactgaccaagccgaggtgctcccactgcttatgagaaatgttgaacggaacagatcttggatctcacaatcgaaccccgactcagattccgttggctcaattacagttgcagaattggactgggggaacaaagaacatatcaaggccgttgaacctccatttgattacattgtaggaactgacgttgtttattcggagcatctgttgcaacctctaatggagacgattactgcattatctggtcctaaaacaaaaatattgctagggtacgagatccgttcgacaactgtccatgagaagatgatggaaatgtggaaaagcaatttcattgtgaaaacggtctctagatcgaagatggatgtgaaatatcagcatcctagcatacatctctacatgatggacctgaaggcaccattgatccctgaggttgaggctgccgacaatgggaactacgaggaagaggttgaggttgctgtgaatcaagaggaagacgaagatcctggagtgaagagcgaatcttgttccggctcgtcaccagaggctaagagcggcagtctggatgattgggaaatcagaaggtgtggggctatggctgcaaggcttctgaaggatgtgaaactgtaaacatgaatcctagagatcgttttccccccttgtcagagaactctagagctcctttatgttgttgtccttgatagttgttgtactgcccatggcagtctatgttattgtatcttattgcatcagtggatattgataccattccaaaagaaaaaggaagtttctctatctctctctctgatagatgtcaggacaac

SEQ ID NO: 56358 - DNA, 1366 bp, Zea Mays
gcagcatccagcatcgggtcaaaacgaaacgaagcatccacgtttgtcgctcccacgctggcaatggccgccgccgcatctcccgccaccgccgccgccgtccgcgaagcggcgccggcccacagacaaattggaatccgtccgggtcatggtccggccccattccgtatcggcttcctcgccaaaccgtcctcccggtgggccgcgatctctgtgccgcctgggcctcgccgcgcggctccggcggcgtccgcggccagggagagggtcacggaggaggaggagaggcccgtgtcggtggagctggaacccatcgccagcgagcagcagctggactgggtccttggggaggcgcggcagctccagctccccatcgtcctgctgtggatggcgagttggtgcaggaaatgtatatatctgaagcctaagcttgagaagttggcagcagaatatcatccaagaatccggttctactgcatcgatgtgaattgtgttccacaaaagcttgtgaaccgcgctggagtaacacttgtctgcagcaactgcgtgcatacacaagtgacaaagcagatccctagtacgtttgttaaactaacacgcacgctaatggctccttttgttgggacttgtgaaatctgcaccgcggggctcgagcagaagatgccttgtatacagctgtggagcgactcccggaaacaggcggaggtgatcggcggcgggcacaagtcttggctggtgatcgatgacgtccggaggatgatcgagcaggaggaatgatccggcgtgtccttttagcgcagcgacctcagtattgccgcttgctcatagtcctagactgggcgtctgggccaggtgtttggtcgtcttgcatatattaggaaccatccatgatcagaggttttgaaaaatcgccggttcgtcttccatatatgaactctctccctggtgtcgcgatcaggaaaatgaaggaattgggctaccagtcatctgcgatgtccttgatgtatccatgtgtgtgtattaaaactggaacttgctgctgtatgagcaataatccagcacagcacggcaggacttattgccggtgtactgactggccttgccattagccactggatctggatggtagcactgttcatggatatgaagattagcatagcgagtacaatctctgctttagggttgtcaaaataacactggtcttgtttacaaacactagcttgtcttgtagcttgcttcttgaattctcaagagacaaattgtagccagctgggaaagtggcagcaggtttccctgtttttcttggtttgctcctgcatatactatgttctcactcctatctaaataacattctggcctttttaga

SEQ ID NO: 56359 - DNA, 1616 bp, Zea Mays
acttaaaaatttcagctggtttcaagttttgtgttgagggctagatcagttacacacttcaattttattccttgtcgatgttccatttgactcaatctttggtccatctgatctgtaacagatcctgggtccaaacattctttgctggctttgccctactgcgacggggcatctgaacgatggcaccgagttccaaatcacgaacaactgatgaatgcgccagcagcatttccagttaccacgtgctaccgtgtagatttccctgttcattcttgtaaccaaattgctccggtagtgctgggcccacacgcagtgacacactgacactcaagtcggcgaataggagaaaacaagtacgcggctttcttcacagatcacagcagcatccagcatcgggtcaaaacgaaacgaagcatccacgtttgtcgctcccacgctggcaatggccgccgccgcatctcccgccaccgccgccgccgtccgcgaagcggcgccggcccacagacaaattggaatccgtccgggtcatggtccggccccattccgtatcggcttcctcgccaaaccgtcctcccggtgggccgcgatctctgtgccgcctgggcctcgccgcgcggctccggcggcgtccgcggccagggagagggtcacggaggaggaggagaggcccgtgtcggtggagctggaacccatcgccagcgagcagcagctggactgggtccttggggaggcgcggcagctccagctccccatcgtcctgctgtggatggcgagttggtgcaggaaatgtatatatctgaagcctaagcttgagaagttggcagcagaatatcatccaagaatccggttctactgcatcgatgtgaattgtgttccacaaaagcttgtgaaccgcgctggagtaacaaagatgccttgtatacagctgtggagcgactcccggaaacaggcggaggtgatcggcggcgggcacaagtcttggctggtgatcgatgacgtccggaggatgatcgagcaggaggaatgatccggcgtgtccttttagcgcagcgacctcagtattgccgcttgctcatagtcctagactgggcgtctgggccaggtgtttggtcgtcttgcatatattaggaaccatccatgatcagaggttttgaaaaatcgccggttcgtcttccatatatgaactctctccctggtgtcgcgatcaggaaaatgaaggaattgggctaccagtcatctgcgatgtccttgatgtatccatgtgtgtgtattaaaactggaacttgctgctgtatgagcaataatccagcacagcacggcaggacttattgccggtgtactgactggccttgccattagccactggatctggatggtagcactgttcatggatatgaagattagcatagcgagtacaatctctgctttagggttgtcaaaataacactggtcttgtttacaaacactagcttgtcttgtagcttgcttcttgaattctcaagagacaaattgtagccagctgggaaagtggcagcaggtttccctgtttttcttggtttgctcctgcatatactatgttctcactcctatctaaataacattctggcctttttaga

SEQ ID NO: 56360 - DNA, 3560 bp, Zea Mays
  misc_feature (3559)..(3560): n is a, c, g, or t
tcttccaaggtcgccggccaccacccttgctccccgtcgtcagcctcctctcctccttttcccacccacccctctgctgctcttcctggaggctgctcgaaggctcagcgatggtgtgaagacgaaggccctgacgcttcatctgctgcttctttggggtagcagtggatcgcgtcgttcttataaggaggtgctgatcgcagaaaagcccccagacccccgcgttggcgatggtggctgggtgagggttgtgggacaacgggatcatcgtcggagatcctgtctttcaaagccttcttctagtcctgtccctgttgacctgcgtggaaagtgtttcaattgcttctcgccttcccactgtgcggccgtgtgtcgtagcctggtgcggtgtttcctttgccgattgtctgggcaccatgtccacgtgcgcccaggtcggaggacggctctgcattctcctagacacgcgttggggtggcgcccagtttcagggaaccctcaccagtggaggcttccatctgtgctatggagggtaactctagggtcggcggtgctggcaatggtggaggactaaagaagcgcactcgccggggacaaagacgccggaagaaggtcctaggtggaggtcaggatgttcatggctcttctagtcgtgcttcgcctcttccatcatcttcctccccctcgaaggattctgcccctcttgtgagaatcttcgggcgttcaaggatggttgatcgggctgaagatgaccttcattgtgcgctggtcgtaaccgttcttggccaggagagttctgactgcgccgcggaggtcctgtatgcgctcgcctcgaggcttggccttgcagctgatgagctccagctccggcgtgctgcatccaattctttcatggtcttcttcccctttgaggatcatgttgttcacgcctacaatggaggacaatctcttttcatcccatctcggttgcatcttaaaaggcgacaaccgcgtttgcaggaccgtcagccttcctctgttcggacttcggtgcttgatcgcctgggacctcgttttgcttcgtcttcggcggtgagagaaccagttgatgccgcttctctcccgaacgcctcggttgaagagttgtcggcgcctgtgttctcccctctgagtgacccctcggtttctgttgtggggagaccagttgatgccattactctcccaacaacctcggttgaagagttggtggcgcctgcgtcttccaccattcctgggtcctctctagcggtgggatatcccttgctgaacgcttcggatgccggtccgctgcccgcatttatgtcgtccacccagctggcttcttctgttccagatggtgaggtaggggatattcaagttgggttggctgttaaatcttctttggcgccaacttctggttctgggcctgcttggttgattcctgctccttctgtggcggaacagatggagtttggctcgctgctggctagttctggtttgatgatgcttaaaaatcatgaggatatcctttgcattgcttctgtggggacaggcgatctggccttgaatttggctatggaagccggtgatctgtgtgatctgtgggcctgcagaatcaaagctaaacccccttgctttaaagtctatgtccgaagaagggtgcaggttcagccgccacagtctgaaaataatgggctttcttctcccttgctgaaattcaaagaagggattgcaaaaaaagactgatggattattgcccctccccttagtctgccaaacgaaagaagaagatgccaagcaactttcagctgatgcaaagtaggagggtggccaagatgccacctgaattgggctctaactctgctgcacacgtgtgtaggctcttgggtttttgtgatgaacaagaaaatatctccttccaggatgcaagaaaagtacgctaaactgtttgattcagccctttccagggagcacattgctgctttggcggccttgtttggctgggaggtgcctccactcgggcagacctgatcagtgtagttttggtggagctggtagctggtctattttgtttccatggattgtagcggttttctgatatggaatgtgagggaccttaatgatagtgctaagagactctgttaagtctctgtttttttacatccaaccttctattgtttgtctgcaagaaaccaagttgtgctccatctcagattttgatattctttccattcttggtttgggctatagtaattttgtgtataaccctgcgcatgggaccagggggggtattcttgtggcatggcgcgatggatccttttccattggtgcctcggttatcaaggacttctctgtgtcagtacaatttcagatgatgtctggtcaactttggtggttcacaggtgtgtatgggccttatcaggacaatctcaaacaagcttttctccatgagctgagagaggtcaggaacaaatgtgggggcccatggatcattgcgggtgattttaatatgatttacagatcggaagacaagaacaattccaatgtaaaccagaccttgttgggtagtttcagaaactcagtcaactccttggatttgaaggaaattctgttggctggaaggagattcacttggtcaaatcagagggaggatcctactcttgttaagctagatcatgtattctgtactagcagctgggaagagtttttcccggatcgtatgctctatagtaatgccaccgaaacctctgaccattgtcctttgattctcaagctcaaaatggacctcaagggaaagcgcaggttacacttagaaagtttgtggcctaaattccctgggttcttggatgaggttgctgcctcttgaaccagccagttcaaggctcctgccctctagagaaggtgtctttgaagcttaaaagattgtccaaaagattgcagtactgggggcacaaagtggtaggcaatgttgggttccaatttggattagctcgggtgctgcatagattggagattgctcaggacagcatggtattgtcagaagaagaagaagtttggtcattgagaaagctgaagcagcacagccttgtccttgcttctctggaaaggacagttgctcgcttgagatcccggatccattacttgaaggaaagagatgccaacacaaggttctttcatatgcaggcttgtattcggaagaagaggaattttatttccaaattggaagatgatggaaggattgttaccaatcatggtcaaatgcaggatgtgctggatggcttcttttcccaatctattgggttctgaaattcagagaccattcacccttgatttggtaaattgccatagaaatgcagttgatctgagcgccttggagactccttttctgaaaaggaggttcgggacacgattgcaagtcttccttatgacaaggcccctgggtcctgatgggttcatagggagattttataaagcttgttggcacatcattaagacagatataatggctgccctggaatctcttcttcatggaaatgctcacaaactagagctgctgaattcnn

SEQ ID NO: 56361 - DNA, 2245 bp, Zea Mays
cactattgcgctcacatgtgtggtttgtgatcggcgattttgacatgaaaaaagattagcaagagagtattcaatgtgatgaagagtgaattcttggccacatcaaagtcagatggggcaaccaaacaagaaaattatcctgcctttggccttggagatggtacagatactccaaaaatgttggagagaagcaatagcagcgtaccatttgaattatacaagaaccagactaccgttgttgtttcaagagaggagtttgtaagtgttgtatgtgatgccctctctttgtacaagtatgttggacccaaccagaaagctgacctgcttcttgcttgcagaattaaagagagaaaggaatcggtggcaatactcttgtgtgggacaagtggatgtggcaagtccactttatcatctttgctgggtagtaggttgggtatcacgacagtagtttctactgattccatacgacatatgatgagaagctttgcagatgaaaaacaaagtcctcttctctatgcatcaacctaccatgcagtggagacaaagatgtgacttcaggtgacaaatctcagcatggatcttcagaattacctcctagagctgaattgattggcaacaagcaaatggcagtagaaggctacaaggcgcaaagtgagatggtgatcgacagcctggacaggttaattacatcctgggaagagcagaaagaatctgtgattgttgaaggagtgcatctaagccttaactttgtgatgggattaatgaagaaacatccttccataataccatttatggtatacattacaaatgaggataaacacatggaacgatttgctgtacgtgcaaagtacatgactctagacccagcaaagaacagatacatcaaatacattcgaaatattagagctatccaggaatacctatgcaaccgagctgacaagcatcttgtgccgaagatcaacaataccaatgttgaccagagtgtggctgctatacatgcaacagtcttcagctgtcttcgcaggcgagcagccggggagcaactgtatgacctcaacacaaacactgttgctgtagtggatgaggaatacaggaaccagcgtgcagctaacaccttgggttctaagggcatgtttcagttgatccaaaggaaggggtcttcaaggaatctgatggcacttcttaacaccgacggttcagtcaccaaagcttggcatgtaagtgcaagtgatggcaatgggaatcttaatggtatcacaaacaacaagaagtctcctgaaaatcctatgctggatccctcacaaatcgggaaggcagaagccgtcaatctccagtttggtccttttgggatcagtgcctggatgagtgacacgggtggaaccagccatactgggagtgtggaagacctgaggcctgatagtgtggagactggtggtagaaattattcgtcgtgctgcagttcgccaaagatgtcagattccacctcgaaggagcttatggaggactactcagtctatggcagtgacgaagaagctgacgaccctcgtgatgctgaaactgatgatgacctaactgatgaagaaagagacatgcacgagatagatgcaggctctgtagacgagcactcaaccaagtcggatgaggaatacgaggacttagccatgcgtgatgtgatggagaatggtgactggtctgacgacgaccaagctgtgggcaaaaccaagaactcaccagccctggagagcatccatgggagtggggcagctgaagatgatggcataaagagccggtaccaccacaacctggacctgttcctgaaaatgtccaaggaggtagctggcaccagaatgccttgcgcgtcatagtgccaccagggtggagagaaggccggcgacacgctgctctggtcccagtgggtggtatgtttcttgggcacctgcttttgtgatgctgtgagcttgtgctgttgagtgtacaccggtggctgtggctttgtagcatgtacctgtccaaactacaaaatgctctcacctggttgtaaagagaggacctgatgctttgtcatatcatgtagtaggagtattatgtttgacaataatgtcctggccctgctgctgatgaagtcacctcacgtgaactatgtgccatatcatgcatgtcctttggttgatcaatgtttacaaagatgtgtcgtaagactgtcttcagcagttcaaataagaccatcttcagcagttcaaatggt

SEQ ID NO: 56362 - DNA, 2215 bp, Zea Mays
ccactattgcgctcacatgtgtggtttgtgatcggcgattttgacatgaaaaaagattagcaagagagtattcaatgtgatgaagagtgaattcttggccacatcaaagtcagatggggcaaccaaacaagaaaattatcctgcctttggccttggagatggtacagatactccaaaaatgttggagagaagcaatagcagcgtaccatttgaattatacaagaaccagactaccgttgttgtttcaagagaggagtttgtaagtgttgtatgtgatgccctctctttgtacaagtatgttggacccaaccagaaagctgacctgcttcttgcttgcagaattaaagagagaaaggaatcggtggcaatactcttgtgtgggacaagtggatgtggcaagtccactttatcatctttgctggtgaatatttggatcctattgcagttgctcaggcaaaggcaaagcgcaatgcaaataaacccacagttgtttctcatccaaataccagtggagacaaagatgtgacttcaggtgacaaatctcagcatggatcttcagaattacctcctagagctgaattgattggcaacaagcaaatggcagtagaaggctacaaggcgcaaagtgagatggtgatcgacagcctggacaggttaattacatcctgggaagagcagaaagaatctgtgattgttgaaggagtgcatctaagccttaactttgtgatgggattaatgaagaaacatccttccataataccatttatggtatacattacaaatgaggataaacacatggaacgatttgctgtacgtgcaaagtacatgactctagacccagcaaagaacagatacatcaaatacattcgaaatattagagctatccaggaatacctatgcaaccgagctgacaagcatcttgtgccgaagatcaacaataccaatgttgaccagagtgtggctgctatacatgcaacagtcttcagctgtcttcgcaggcgagcagccggggagcaactgtatgacctcaacacaaacactgttgctgtagtggatgaggaatacaggaaccagcgtgcagctaacaccttgggttctaagggcatgtttcagttgatccaaaggaaggggtcttcaaggaatctgatggcacttcttaacaccgacggttcagtcaccaaagcttggcatgtaagtgcaagtgatggcaatgggaatcttaatggtatcacaaacaacaagaagtctcctgaaaatcctatgctggatccctcacaaatcgggaaggcagaagccgtcaatctccagtttggtccttttgggatcagtgcctggatgagtgacacgggtggaaccagccatactgggagtgtggaagacctgaggcctgatagtgtggagactggtggtagaaattattcgtcgtgctgcagttcgccaaagatgtcagattccacctcgaaggagcttatggaggactactcagtctatggcagtgacgaagaagctgacgaccctcgtgatgctgaaactgatgatgacctaactgatgaagaaagagacatgcacgagatgcaggctctgtagacgagcactcaaccaagtcggatgaggaatacgaggacttagccatgcgtgatgtgatggagaatggtgactggtctgacgacgaccaagctgtgggcaaaaccaagaactcaccagccctggagagcatccatgggagtggggcagctgaagatgatggcataaagagccggtaccaccacaacctggacctgttcctgaaaatgtccaaggaggtagctggcaccagaatgccttgcgcgtcatagtgccaccagggtggagagaaggccggcgacacgctgctctggtcccagtgggtggtatgtttcttgggcacctgcttttgtgatgctgtgagcttgtgctgttgagtgtacaccggtggctgtggctttgtagcatgtacctgtccaaactacaaaatgctctcacctggttgtaaagagaggacctgatgctttgtcatatcatgtagtaggagtattatgtttgacaataatgtcctggccctgctgctgatgaagtcacctcacgtgaactatgtgccatatcatgcatgtcctttggttgatcaatgtttacaaagatgtgtcgtaagactgtcttcagcagttcaaataagaccatcttcagcagttcaaatggt

SEQ ID NO: 56363 - DNA, 2470 bp, Zea Mays
cgtggcagaaccgccattgaagcgggaagaaattcgaagaaccctcgaaatcaggagaaggaaacaaatcatcctcccatcccgagaagagatggcaacaccaacagccaacagaaggtaggggacatggcggaggaggcgtcgccgtcgccgtcgccgcccaagttgctctacattgccatcgccgacggcggggtccgccgggcgttccggtacacgcgccccgtgctgcagagcaccctgcatctcatgggatgcaagcctcgccatgccttcaagattagcaagagagtattcaatgtgatgaagagtgaattcttggccacatcaaagtcagatggggcaaccaaacaagaaaattatcctgcctttggccttggagatggtacagatactccaaaaatgttggagagaagcaatagcagcgtaccatttgaattatacaagaaccagactaccgttgttgtttcaagagaggagtttgtaagtgttgtatgtgatgccctctctttgtacaagtatgttggacccaaccagaaagctgacctgcttcttgcttgcagaattaaagagagaaaggaatcggtggcaatactcttgtgtgggacaagtggatgtggcaagtccactttatcatctttgctgggtagtaggttgggtatcacgacagtagtttctactgattccatacgacatatgatgagaagctttgcagatgaaaaacaaagtcctcttctctatgcatcaacctaccatgcagtggagacaaagatgtgacttcaggtgacaaatctcagcatggatcttcagaattacctcctagagctgaattgattggcaacaagcaaatggcagtagaaggctacaaggcgcaaagtgagatggtgatcgacagcctggacaggttaattacatcctgggaagagcagaaagaatctgtgattgttgaaggagtgcatctaagccttaactttgtgatgggattaatgaagaaacatccttccataataccatttatggtatacattacaaatgaggataaacacatggaacgatttgctgtacgtgcaaagtacatgactctagacccagcaaagaacagatacatcaaatacattcgaaatattagagctatccaggaatacctatgcaaccgagctgacaagcatcttgtgccgaagatcaacaataccaatgttgaccagagtgtggctgctatacatgcaacagtcttcagctgtcttcgcaggcgagcagccggggagcaactgtatgacctcaacacaaacactgttgctgtagtggatgaggaatacaggaaccagcgtgcagctaacaccttgggttctaagggcatgtttcagttgatccaaaggaaggggtcttcaaggaatctgatggcacttcttaacaccgacggttcagtcaccaaagcttggcatgtaagtgcaagtgatggcaatgggaatcttaatggtatcacaaacaacaagaagtctcctgaaaatcctatgctggatccctcacaaatcgggaaggcagaagccgtcaatctccagtttggtccttttgggatcagtgcctggatgagtgacacgggtggaaccagccatactgggagtgtggaagacctgaggcctgatagtgtggagactggtggtagaaattattcgtcgtgctgcagttcgccaaagatgtcagattccacctcgaaggagcttatggaggactactcagtctatggcagtgacgaagaagctgacgaccctcgtgatgctgaaactgatgatgacctaactgatgaagaaagagacatgcacgagatagatgcaggctctgtagacgagcactcaaccaagtcggatgaggaatacgaggacttagccatgcgtgatgtgatggagaatggtgactggtctgacgacgaccaagctgtgggcaaaaccaagaactcaccagccctggagagcatccatgggagtggggcagctgaagatgatggcataaagagccggtaccaccacaacctggacctgttcctgaaaatgtccaaggaggtagctggcaccagaatgccttgcgcgtcatagtgccaccagggtggagagaaggccggcgacacgctgctctggtcccagtgggtggtatgtttcttgggcacctgcttttgtgatgctgtgagcttgtgctgttgagtgtacaccggtggctgtggctttgtagcatgtacctgtccaaactacaaaatgctctcacctggttgtaaagagaggacctgatgctttgtcatatcatgtagtaggagtattatgtttgacaataatgtcctggccctgctgctgatgaagtcacctcacgtgaactatgtgccatatcatgcatgtcctttggttgatcaatgtttacaaagatgtgtcgtaagactgtcttcagcagttcaaataagaccatcttcagcagttcaaatggt

SEQ ID NO: 56364 - DNA, 2590 bp, Zea Mays
cgtggcagaaccgccattgaagcgggaagaaattcgaagaaccctcgaaatcaggagaaggaaacaaatcatcctcccatcccgagaagagatggcaacaccaacagccaacagaaggtggggggaaggggacaccgaggcgggcaacgggagcaggtcgggtgggcggtggggggaggaaacgaacaaggccgcgcggtgcgcgggccgccatgtggacgccatgcgcggacgcggcgtggacgtcgtgacgacgcgacacccgccgctcctcccggcccgcaccgccatggccccgccgccgccgcaatgcgcctcaaaacgtccctccgcgcctgcccccgccctccaggtaggggacatggcggaggaggcgtcgccgtcgccgtcgccgcccaagttgctctacattgccatcgccgacggcggggtccgccgggcgttccggtacacgcgccccgtgctgcagagcaccctgcatctcatgggatgcaagcctcgccatgccttcaagattagcaagagagtattcaatgtgatgaagagtgaattcttggccacatcaaagtcagatggggcaaccaaacaagaaaattatcctgcctttggccttggagatggtacagatactccaaaaatgttggagagaagcaatagcagcgtaccatttgaattatacaagaaccagactaccgttgttgtttcaagagaggagtttgtaagtgttgtatgtgatgccctctctttgtacaagtatgttggacccaaccagaaagctgacctgcttcttgcttgcagaattaaagagagaaaggaatcggtggcaatactcttgtgtgggacaagtggatgtggcaagtccactttatcatctttgctgtggagacaaagatgtgacttcaggtgacaaatctcagcatggatcttcagaattacctcctagagctgaattgattggcaacaagcaaatggcagtagaaggctacaaggcgcaaagtgagatggtgatcgacagcctggacaggttaattacatcctgggaagagcagaaagaatctgtgattgttgaaggagtgcatctaagccttaactttgtgatgggattaatgaagaaacatccttccataataccatttatggtatacattacaaatgaggataaacacatggaacgatttgctgtacgtgcaaagtacatgactctagacccagcaaagaacagatacatcaaatacattcgaaatattagagctatccaggaatacctatgcaaccgagctgacaagcatcttgtgccgaagatcaacaataccaatgttgaccagagtgtggctgctatacatgcaacagtcttcagctgtcttcgcaggcgagcagccggggagcaactgtatgacctcaacacaaacactgttgctgtagtggatgaggaatacaggaaccagcgtgcagctaacaccttgggttctaagggcatgtttcagttgatccaaaggaaggggtcttcaaggaatctgatggcacttcttaacaccgacggttcagtcaccaaagcttggcatgtaagtgcaagtgatggcaatgggaatcttaatggtatcacaaacaacaagaagtctcctgaaaatcctatgctggatccctcacaaatcgggaaggcagaagccgtcaatctccagtttggtccttttgggatcagtgcctggatgagtgacacgggtggaaccagccatactgggagtgtggaagacctgaggcctgatagtgtggagactggtggtagaaattattcgtcgtgctgcagttcgccaaagatgtcagattccacctcgaaggagcttatggaggactactcagtctatggcagtgacgaagaagctgacgaccctcgtgatgctgaaactgatgatgacctaactgatgaagaaagagacatgcacgagatagatgcaggctctgtagacgagcactcaaccaagtcggatgaggaatacgaggacttagccatgcgtgatgtgatggagaatggtgactggtctgacgacgaccaagctgtgggcaaaaccaagaactcaccagccctggagagcatccatgggagtggggcagctgaagatgatggcataaagagccggtaccaccacaacctggacctgttcctgaaaatgtccaaggaggtagctggcaccagaatgccttgcgcgtcatagtgccaccagggtggagagaaggccggcgacacgctgctctggtcccagtgggtggtatgtttcttgggcacctgcttttgtgatgctgtgagcttgtgctgttgagtgtacaccggtggctgtggctttgtagcatgtacctgtccaaactacaaaatgctctcacctggttgtaaagagaggacctgatgctttgtcatatcatgtagtaggagtattatgtttgacaataatgtcctggccctgctgctgatgaagtcacctcacgtgaactatgtgccatatcatgcatgtcctttggttgatcaatgtttacaaagatgtgtcgtaagactgtcttcagcagttcaaataagaccatcttcagcagttcaaatggt

SEQ ID NO: 56365 - DNA, 1653 bp, Zea Mays
atcgaatcgctgatctctgttagcgctccgctcccacagacggacagcttgggctcgacggatgaacatgtgtgagaaagatcagaatttgccatggggatacgacctgttccgcgacccttttgctcctcccaacgggtactacgggcctcctcccggttactgtgatggccactgttgtgacctccatcattacggtagagcatcacatccagatgagactcagttgcattcttctcaactcgcatatgatatgtacaacccatcagtaggcatctaccatcctggaagcacccatgagcacgagcacgagcacgagacagtatatgtagaaccgtctagttcctctccagacacaggtggtgacggttgttttgagatggaggaggaagtagggaagaggttttaccccatggtcccagttccccatgtccccaaaattaatggagaaatcccatcaattgatgaagccactatggaccatgaaaggctgacagaaaggttgaggctgtatgagctggttgaaaacaaggtgaaaggagatggcaactgtcagttccgagcactatcagatcagctttaccaaagtccggatcaccatgaatttgtgaggtcgcagataattaaccagcttaaaactaaccgtgacgcctatgatggatacgttcccatggcatatgatgattacttggagaaagttgcacggaacggtgaatggggtgaccatgtgacgctgcaggctgctgctgacaagtatggagtaaaaatcttcgtgatgacatcgttcaaggatacttgctacatcgagatcctgcctaaggttcagaagtccaacaaagtgatactgttgagcttctgggcggaggtgcactacaactccatacatccgcagaacgatgctccgaggtcgcagacgaccaagaggagaagatggtggccgttctcgcagcaccaccaccattgatggcgggttcagctctcttggggctggatggatgttcaggatcaggtggtggtcccggtcccggccatcgtccagatgatactacaagggacgtacgacattatgattaatatatatatacccagagcggagcagaaagacctgataagggaattagttgggatgaatgaaatggaataaacatgggatgggatgggaatcgtcgtcccgtatatagtttagagtggaggccggtgagcgccaactcaaactctttgtattgttgtttatatctacaaattttgccggaacgaggctagaattattggggaacaattatggtaataataaatcggttaagaattgagatgacccagctgttggcagagctcggatcatcatatgaccagaatcagaatggattccccagtgcatctagttttcctctggaagaacagaacaacataaaagaaaaacgttgaacactgaagtgggaagctgtaaccagaaatcttagatttgagcccaactgctctttttggaaggcaatatctagtttttggcccatgagtccaggacattttcagagggcccatgagtcatttcacaggtgaacaaccattgtagccattatacatacagagtaggctggtgtcttattttcgggttcaattgtaaatgattagtcaatgccatacagtcatttttgg

SEQ ID NO: 56366 - DNA, 1678 bp, Zea Mays
aatcgaatcgctgatctctgttagcgctccgctcccacagacggacagcttgggctcgacggatgaacatgtgtgagaaagatcagaatttgccatggggatacgacctgttccgcgacccttttgctcctcccaacgggtactacgggcctcctcccggttactgtgatggccactgttgtgacctccatcattacggtagagcatcacatccagatgagactcagttgcattcttctcaactcgcatatgatatgtacaacccatcagaagcacccatgagcacgagcacgagcacgagacagtatatgtagaaccgtctagttcctctccagacacaggtggtgacggttgttttgagatggaggaggaagtagggaagaggttttaccccatggtcccagttccccatgtccccaaaattaatggagaaatcccatcaattgatgaagccactatggaccatgaaaggctgacagaaaggttgaggctgtatgagctggttgaaaacaaggtgaaaggagatggcaactgtcagttccgagcactatcagatcagctttaccaaagtccggatcaccatgaatttgtgaggtcgcagataattaaccagcttaaaactaaccgtgacgcctatgatggatacgttcccatggcatatgatgattacttggagaaagttgcacggaacggtgaatggggtgaccatgtgacgctgcaggctgctgctgacaagtatggagtaaaaatcttcgtgatgacatcgttcaaggatacttgctacatcgagatcctgcctaaggttcagaagtccaacaaagtgatactgttgagcttctgggcggaggtgcactacaactccatacatccgcagaacggtgagtaggcgtgccgttggcatgccgggccttcaccgccaacatgctccgaggtcgcagacgaccaagaggagaagatggtggccgttctcgcagcaccaccaccattgatggcgggttcagctctcttggggctggatggatgttcaggatcaggtggtggtcccggtcccggccatcgtccagatgatactacaagggacgtacgacattatgattaatatatatatacccagagcggagcagaaagacctgataagggaattagttgggatgaatgaaatggaataaacatgggatgggatgggaatcgtcgtcccgtatatagtttagagtggaggccggtgagcgccaactcaaactctttgtattgttgtttatatctacaaattttgccggaacgaggctagaattattggggaacaattatggtaataataaatcggttaagaattgagatgacccagctgttggcagagctcggatcatcatatgaccagaatcagaatggattccccagtgcatctagttttcctctggaagaacagaacaacataaaagaaaaacgttgaacactgaagtgggaagctgtaaccagaaatcttagatttgagcccaactgctctttttggaaggcaatatctagtttttggcccatgagtccaggacattttcagagggcccatgagtcatttcacaggtgaacaaccattgtagccattatacatacagagtaggctggtgtcttattttcgggttcaattgtaaatgattagtcaatgccatacagtcatttttgg

SEQ ID NO: 56367 - DNA, 2681 bp, Zea Mays
cgttagtgcgagcttgatgaatcgaatcgctgatctctgttagcgctccgctcccacagacggacagcttgggctcgacggatgaacatgtgtgagaaagatcagaatttgccatggggatacgacctgttccgcgacccttttgctcctcccaacgggtactacgggcctcctcccggttactgtgatggccactgttgtgacctccatcattacggtagagcatcacatccagatgagactcagttgcattcttctcaactcgcatatgatatgtacaacccatcagtaggcatctaccatcctggaagcacccatgagcacgagcacgagcacgagacagtatatgtagaaccgtctagttcctctccagacacaggtggtgacggttgttttgagatggaggaggaagtagggaagaggttttaccccatggtcccagttcccctgccagaataatgaaagtttcgcttctaaggaagtctacctagatcatcagcaaaaattcctgtatatgtctgttgtatagccaaagcctcattggaagagggaaaaaacaacatggatatcactttcagttggaccactaaccttaaatgccaaatgactttaagaaatgatgttgacatcaaattcctctacaagtctttaattaactgaatggctaagtaactttgcatattcttggtcttaatgcgtgtctttgaagaattatcctatgcgaaaatcatgtctacctacttttattggtagacctctgtggacaaagctgtaggtattaacttttcttatacactgtatgatttgttgtgctactagcagtttcactgccctcagatagtattcctatttgttattgcttttaaatttagaatgatactatccaatattcttagtaacagtgtggcacccccaacaccctatcctagttgctttgaaggaaatgaacctgttgtgaatgctgtgctgtatatctgtaattttttccctgttcctctgactccatctccaactgtggtccaataatccgtgtctgccttgtccagcatgtccccaaaattaatggagaaatcccatcaattgatgaagccactatggaccatgaaaggctgacagaaaggttgaggctgtatgagctggttgaaaacaaggtgaaaggagatggcaactgtcagttccgagcactatcagatcagctttaccaaagtccggatcaccatgaatttgtgaggtcgcagataattaaccagcttaaaactaaccgtgacgcctatgatggatacgttcccatggcatatgatgattacttggagaaagttgcacggaacggtgaatggggtgaccatgtgacgctgcaggctgctgctgacaaggttagtctttataatctatgtttccagctgtcattcctggcatatcctgtgtggtggagctgacaagactgccattgttttactcacatcctaatgtaatgtaagacaacgatctggtgcagtatggagtaaaaatcttcgtgatgacatcgttcaaggatacttgctacatcgagatcctgcctaaggttcagaagtccaacaaaggtaaacatttggtcctcaagggccacctaccgggtatttcgattcttgactggttactggcttctggcatctaaatctggcttcctgcctgtgtggttgcagtgatactgttgagcttctgggcggaggtgcactacaactccatacatccgcagaacggtgagtaggcgtgccgttggcatgccgggccttcaccgccaacgtatgcaaccaacatgctgctatatactgtcaatagtctttcttttgttctgagtagtggtaggaatcatgtgcaagcacaaccaaacaagctctgtctattgtgttggtgaagacgattctgtggtttgtgaatgctgcagatgctccgaggtcgcagacgaccaagaggagaagatggtggccgttctcgcagcaccaccaccattgatggcgggttcagctctcttggggctggatggatgttcaggatcaggtggtggtcccggtcccggccatcgtccagatgatactacaagggacgtacgacattatgattaatatatatatacccagagcggagcagaaagacctgataagggaattagttgggatgaatgaaatggaataaacatgggatgggatgggaatcgtcgtcccgtatatagtttagagtggaggccggtgagcgccaactcaaactctttgtattgttgtttatatctacaaattttgccggaacgaggctagaattattggggaacaattatggtaataataaatcggttaagaattgagatgacccagctgttggcagagctcggatcatcatatgaccagaatcagaatggattccccagtgcatctagttttcctctggaagaacagaacaacataaaagaaaaacgttgaacactgaagtgggaagctgtaaccagaaatcttagatttgagcccaactgctctttttggaaggcaatatctagtttttggcccatgagtccaggacattttcagagggcccatgagtcatttcacaggtgaacaaccattgtagccattatacatacagagtaggctggtgtcttattttcgggttcaattgtaaatgattagtcaatgccatacagtcatttttgg

SEQ ID NO: 56368 - DNA, 1745 bp, Zea Mays
gtgtcctggccggcgagcaatccaatccggtccgaatctttcttagtcgccgccaggaatccagcccacccggctctgcgctccgctcccacagacggacagcttgggctcgacggatgaacatgtgtgagaaagatcagaatttgccatggggatacgacctgttccgcgacccttttgctcctcccaacgggtactacgggcctcctcccggttactgtgatggccactgttgtgacctccatcattacgcatcacatccagatgagactcagttgcattcttctcaactcgcatatgatatgtacaacccatcagtaggcatctaccatcctggaagcacccatgagcacgagcacgagcacgagacagtatatgtagaaccgtctagttcctctccagacacaggtggtgacggttgttttgagatggaggaggaagtagggaagaggttttaccccatggtcccagttccccatgtccccaaaattaatggagaaatcccatcaattgatgaagccactatggaccatgaaaggctgacagaaaggttgaggctgtatgagctggttgaaaacaaggtgaaaggagatggcaactgtcagttccgagcactatcagatcagctttaccaaagtccggatcaccatgaatttgtgaggtcgcagataattaaccagcttaaaactaaccgtgacgcctatgatggatacgttcccatggcatatgatgattacttggagaaagttgcacggaacggtgaatggggtgaccatgtgacgctgcaggctgctgctgacaagtatggagtaaaaatcttcgtgatgacatcgttcaaggatacttgctacatcgagatcctgcctaaggttcagaagtccaacaaagtgatactgttgagcttctgggcggaggtgcactacaactccatacatccgcagaacggtgagtaggcgtgccgttggcatgccgggccttcaccgccaacatgctccgaggtcgcagacgaccaagaggagaagatggtggccgttctcgcagcaccaccaccattgatggcgggttcagctctcttggggctggatggatgttcaggatcaggtggtggtcccggtcccggccatcgtccagatgatactacaagggacgtacgacattatgattaatatatatatacccagagcggagcagaaagacctgataagggaattagttgggatgaatgaaatggaataaacatgggatgggatgggaatcgtcgtcccgtatatagtttagagtggaggccggtgagcgccaactcaaactctttgtattgttgtttatatctacaaattttgccggaacgaggctagaattattggggaacaattatggtaataataaatcggttaagaattgagatgacccagctgttggcagagctcggatcatcatatgaccagaatcagaatggattccccagtgcatctagttttcctctggaagaacagaacaacataaaagaaaaacgttgaacactgaagtgggaagctgtaaccagaaatcttagatttgagcccaactgctctttttggaaggcaatatctagtttttggcccatgagtccaggacattttcagagggcccatgagtcatttcacaggtgaacaaccattgtagccattatacatacagagtaggctggtgtcttattttcgggttcaattgtaaatgattagtcaatgccatacagtcatttttgg

SEQ ID NO: 56369 - DNA, 2360 bp, Zea Mays
gctttgttctgtgtcctggccggcgagcaatccaatccggtccgaatctttcttagtcgccgccaggaatccagcccacccggctctgcgctccgctcccacagacggacagcttgggctcgacggatgaacatgtgtgagaaagatcagaatttgccatggggatacgacctgttccgcgacccttttgctcctcccaacgggtactacgggcctcctcccggttactgtgatggccactgttgtgacctccatcattacggtagagcatcacatccagatgagactcagttgcattcttctcaactcgcatatgatatgtacaacccatcagtaggcatctaccatcctggaagcacccatgagcacgagcacgagcacgagacagtatatgtagaaccgtctagttcctctccagacacaggtggtgacggttgttttgagatggaggaggaagtagggaagaggttttaccccatggtcccagttcccctgccagaataatgaaagtttcgcttctaaggaagtctacctagatcatcagcaaaaattcctgtatatgtctgttgtatagccaaagcctcattggaagagggaaaaaacaacatggatatcactttcagttggaccactaaccttaaatgccaaatgactttaagaaatgatgttgacatcaaattcctctacaagtctttaattaactgaatggctaagtaactttgcatattcttggtcttaatgcgtgtctttgaagaattatcctatgcgaaaatcatgtctacctacttttattggtagacctctgtggacaaagctgtaggtattaacttttcttatacactgtatgatttgttgtgctactagcagtttcactgccctcagatagtattcctatttgttattgcttttaaatttagaatgatactatccaatattcttagtaacagtgtggcacccccaacaccctatcctagttgctttgaaggaaatgaacctgttgtgaatgctgtgctgtatatctgtaattttttccctgttcctctgactccatctccaactgtggtccaataatccgtgtctgccttgtccagcatgtccccaaaattaatggagaaatcccatcaattgatgaagccactatggaccatgaaaggctgacagaaaggttgaggctgtatgagctggttgaaaacaaggtgaaaggagatggcaactgtcagttccgagcactatcagatcagctttaccaaagtccggatcaccatgaatttgtgaggtcgcagataattaaccagcttaaaactaaccgtgacgcctatgatggatacgttcccatggcatatgatgattacttggagaaagttgcacggaacggtgaatggggtgaccatgtgacgctgcaggctgctgctgacaagtatggagtaaaaatcttcgtgatgacatcgttcaaggatacttgctacatcgagatcctgcctaaggttcagaagtccaacaaagtgatactgttgagcttctgggcggaggtgcactacaactccatacatccgcagaacggtgagtaggcgtgccgttggcatgccgggccttcaccgccaacatgctccgaggtcgcagacgaccaagaggagaagatggtggccgttctcgcagcaccaccaccattgatggcgggttcagctctcttggggctggatggatgttcaggatcaggtggtggtcccggtcccggccatcgtccagatgatactacaagggacgtacgacattatgattaatatatatatacccagagcggagcagaaagacctgataagggaattagttgggatgaatgaaatggaataaacatgggatgggatgggaatcgtcgtcccgtatatagtttagagtggaggccggtgagcgccaactcaaactctttgtattgttgtttatatctacaaattttgccggaacgaggctagaattattggggaacaattatggtaataataaatcggttaagaattgagatgacccagctgttggcagagctcggatcatcatatgaccagaatcagaatggattccccagtgcatctagttttcctctggaagaacagaacaacataaaagaaaaacgttgaacactgaagtgggaagctgtaaccagaaatcttagatttgagcccaactgctctttttggaaggcaatatctagtttttggcccatgagtccaggacattttcagagggcccatgagtcatttcacaggtgaacaaccattgtagccattatacatacagagtaggctggtgtcttattttcgggttcaattgtaaatgattagtcaatgccatacagtcatttttgg

SEQ ID NO: 56370 - DNA, 1901 bp, Zea Mays
attttaaaaaaacatgtttagggtttgtacataaactgtgtgcagattcactcttgccatgtgccatgggggtgtcgtgtggtttcgtgtaaacggccgctttgaagagcgtgccaaagaagttgttagttgggaccctggccccacaaaaaggtgactttctttttctactagcattttcttgccaaccaaagagatggaaaagcagcagtgactgactctgcaacgttggctgctctctctctcgtgcagttgcggcggcgcggggacacagagcgattgcgagtcgtctccaataaatttgtcgcgtccggcgatccatccgtcttccccctccctctgccctcgtgctcctcccgtcaccctcgtctccactccccgtgacgaccaggaaggaattcttcctccgtccccgttcgccccgtcgtctcgtcgttttctcacctgcgtgctgcgttcgcggacaaacttcttggttggtgactcggcggatcctgagccagagcctcgcaggagggagaggggggagagcggaggagaaaccacctttctttccgttccagacaagctcccagctttgaccgccgccgccgccgccgctgtgtgtgtgtgctcccttagtagttagtccctgtcgcgtcccggatcggagctcccctccgtgcacgggacaccgccggtccgggcgtctccactcccccccggatcgatcagctccgcctccgcaagataggcaagcaatgaggtgcctgcctttcttgcatggagacaccaaagagaaggatccagtcactaagtcggcctctctacggtccatgagcacaacatcaacggagcgcgatgtccgctccggttcagacttcacctccttgaatgtttccgacatgagcgccgagtcgataaggaggacgcagtaccccagcttcactgaccgcccgtctaacctgagggtgttctcctttgctgaactgaagagtgccacccgcaacttcagccggtctctcatggttggcgagggtggctttggctgtgtgtacaggggtgtcatcaagacctccgatgaaccgaacgaacgaattgagatcgctgttaagcagttgaatcgtaaaggacttcaggggcagaaggagtggttaacagagatgaatgtgcttggaattgtggatcatccaaacctagttaaacttataggctactgtgctgaagatgatgagaggggagtacaacggcttttagtgtacgaatatatgcctaatggaagtgtggatgatcacttgtcgagtaggtcaacttctactctgtcatggccaatgagactaaaagtagctcttgattctgctcggggactgaagtatctgcatgaagaaatggaattccaggtaactcctttactttatggtcatggaggccataacacttgcacaatctgaaacatctatggggcaatagcatccctctgcatctgtacctcgcacaaggaatacatgaaataccaaacactgcagtatgctttaactgttccataaaccatatctaccctctaaatttaagacatgcatgcaggttattttccgggacctgaaaacatctaacattttgttggatgagaactggaatgctaaactgtcagactttggtttggctaggcatggaccagcagaaggtctgacccatgtctccacagcgaggagcaagagcgggcggggaacggttgcagataaatccagagcccgtcgtagcgcggggcccgccgccgtcagatgccgagcagagcgccaggattcccccgccgctgacaactgacagccccggcccctatgcaaaagattcccggcttcattcacccaacatcctacattcctacgtcactccaatcaaatgtgctgcttgggagagcaacg

SEQ ID NO: 56371 - DNA, 1321 bp, Zea Mays
tagctaaggttggtttgagctggactcggtaggatttggggctgtccatagttacagcaatgaggtgcctgcctttcttgcatggagacaccaaagagaaggatccagtcactaagtcggcctctctacggtccatgagcacaacatcaacggagcgcgatgtccgctccggttcagacttcacctccttgaatgtttccgacatgagcgccgagtcgataaggaggacgcagtaccccagcttcactgaccgcccgtctaacctgagggtgttctcctttgctgaactgaagagtgccacccgcaacttcagccggtctctcatggttggcgagggtggctttggctgtgtgtacaggggtgtcatcaagacctccgatgaaccgaacgaacgaattgagatcgctgttaagcagttgaatcgtaaaggacttcaggggcagaaggagtggttaacagagatgaatgtgcttggaattgtggatcatccaaacctagttaaacttataggctactgtgctgaagatgatgagaggggagtacaacggcttttagtgtacgaatatatgcctaatggaagtgtggatgatcacttgtcgagtaggtcaacttctactctgtcatggccaatgagactaaaagtagctcttgattctgctcggggactgaagtatctgcatgaagaaatggaattccaggttattttccgggacctgaaaacatctaacattttgttggatgagaactggaatgctaaactgtcagactttggtttggctaggcatggaccagcagaaggtctgacccatgtctccacagcgatcctgtgatcactcaccaagctgacataaggaaagtgtgtgatagcgtagtgatgttggcatggaaaagggactggaatatggttgagattcagactagacgtgacctgggatgctgccacaggcgtccaatccgaaagaaccggcggcctatcctgagctcacattcagaacgatgcgacggcgatgatgggtgactccggccattcacccatcctcttgtccagctagcggaggcggccttttgtttgcattgcaacgcatggctgtgtgtgaatccagcttcctcaaaaaacctttctttgcaatgcaatgcaatgcaatcgagtggtggttgtttttctttctcttcttcttcttttttttaaaaaaagggggagagagagataaatatttgctcttgagaaagcaatgtcaatggctggtgagatgcaacgcatggaggagggtgaaaatgtttttttttgttgttgttgttttcttgaaagagaactaacttg

SEQ ID NO: 56372 - DNA, 2246 bp, Zea Mays
gtcttccccctccctctgccctcgtgctcctcccgtcaccctcgtctccactccccgtgacgaccaggaaggaattcttcctccgtccccgttcgccccgtcgtctcgtcgttttctcacctgcgtgctgcgttcgcggacaaagtgtgggaaaatgaaaacctgagcgcaaacaaacactctgagcctcgcaggagggagaggggggagagcggaggagaaaccacctttctttccgttccagacaagctcccagctttgaccgccgccgccgccgccgctgtgtgtgtgtgctcccttagtagttagtccctgtcgcgtcccggatcggagctcccctccgtgcacgggacaccgccggtccgggcgtctccactcccccccggatcgatcagctccgcctccgcaagataggcaagcaatgaggtgcctgcctttcttgcatggagacaccaaagagaaggatccagtcactaagtcggcctctctacggtccatgagcacaacatcaacggagcgcgatgtccgctccggttcagacttcacctccttgaatgtttccgacatgagcgccgagtcgataaggaggacgcagtaccccagcttcactgaccgcccgtctaacctgagggtgttctcctttgctgaactgaagagtgccacccgcaacttcagccggtctctcatggttggcgagggtggctttggctgtgtgtacaggggtgtcatcaagacctccgatgaaccgaacgaacgaattgagatcgctgttaagcagttgaatcgtaaaggacttcaggggcagaaggagtggttaacagagatgaatgtgcttggaattgtggatcatccaaacctagttaaacttataggctactgtgctgaagatgatgagaggggagtacaacggcttttagtgtacgaatatatgcctaatggaagtgtggatgatcacttgtcgagtaggtcaacttctactctgtcatggccaatgagactaaaagtagctcttgattctgctcggggactgaagtatctgcatgaagaaatggaattccaggttattttccgggacctgaaaacatctaacattttgttggatgagaactggaatgctaaactgtcagactttggtttggctaggcatggaccagcagaaggtctgacccatgtctccacagcggtggtcgggactctaggctacgcagctccagagtacatgcagactgggcgcctgaccgcgaagagcgacatatggagctacggcgtcctcctgtacgagctgatcacaggccgccgccccatcgaccggaaccgcccaaagagcgagcagaagctcctggactgggtgaagccgtacatctcggacgtgaaacggttccccatcatcgtcgacccgcggctggaggggcactacaacctcaagtccatgacgaagctgtccagtgtggcgaaccggtgcctggtccggatgcccaagtctcgccccaagatgagcgaggtgtacgacatggtgcagaagatcgtggactgcgtggggaccggcccgccgcagcccccgctgctgcactaccacggctcggcctctgagcctggccctggcgacaagcgcgccaggaaagggtcggtgaagaggaggaggctctgggagctcaggttcggctgccggcacatcgtgtggcgcggctggaagcctgcgatcgtgaaggacatctgaggagggcggggtggctccggtgcttgcagatcctgtgatcactcaccaagctgacataaggaaagtgtgtgatagcgtagtgatgttggcatggaaaagggactggaatatggttgagattcagactagacgtgacctgggatgctgccacaggcgtccaatccgaaagaaccggcggcctatcctgagctcacattcagaacgatgcgacggcgatgatgggtgactccggccattcacccatcctcttgtccagctagcggaggcggccttttgtttgcattgcaacgcatggctgtgtgtgaatccagcttcctcaaaaaacctttctttgcaatgcaatgcaatgcaatcgagtggtggttgtttttctttctcttcttcttcttttttttaaaaaaagggggagagagagataaatatttgctcttgagaaagcaatgtcaatggctggtgagatgcaacgcatggaggagggtgaaaatgtttttttttgttgttgttgttttcttgaaagagaactaacttg

SEQ ID NO: 56373 - DNA, 2241 bp, Zea Mays
gtcttccccctccctctgccctcgtgctcctcccgtcaccctcgtctccactccccgtgacgaccaggaaggaattcttcctccgtccccgttcgccccgtcgtctcgtcgttttctcacctgcgtgctgcgttcgcggacaaagtgtgggaaaatgaaaacctgagcgcaaacaaacactctgagcctcgcaggagggagaggggggagagcggaggagaaaccacctttctttccgttccagacaagctcccagctttgaccgccgccgccgccgccgctgtgtgtgtgtgctcccttagtagttagtccctgtcgcgtcccggatcggagctcccctccgtgcacgggacaccgccggtccgggcgtctccactcccccccggatcgatcagctccgcctccgcaagataggcaagcaatgaggtgcctgcctttcttgcatggagacaccaaagagaaggatccagtcactaagtcggcctctctacggtccatgagcacaacatcaacggagcgcgatgtccgctccggttcagacttcacctccttgaatgtttccgacatgagcgccgagtcgataaggaggacgcagtaccccagcttcactgaccgcccgtctaacctgagggtgttctcctttgctgaactgaagagtgccacccgcaacttcagccggtctctcatggttggcgagggtggctttggctgtgtgtacaggggtgtcatcaagacctccgatgaaccgaacgaacgaattgagatcgctgttaagcagttgaatcgtaaaggacttcaggggcagaaggagtggttaacagagatgaatgtgcttggaattgtggatcatccaaacctagttaaacttataggctactgtgctgaagatgatgagaggggagtacaacggcttttagtgtacgaatatatgcctaatggaagtgtggatgatcacttgtcgagtaggtcaacttctactctgtcatggccaatgagactaaaagtagctcttgattctgctcggggactgaagtatctgcatgaagaaatggaattccaggttattttccgggacctgaaaacatctaacattttgttggatgagaactggaatgctaaactgtcagactttggtttggctaggcatggaccagcagaaggtctgacccatgtctccacagcggtggtcgggactctaggctacgcagctccagagtacatgcagactgggcgcctgaccgcgaagagcgacatatggagctacggcgtcctcctgtacgagctgatcacaggccgccgccccatcgaccggaaccgcccaaagagcgagcagaagctcctggactgggtgaagccgtacatctcggacgtgaaacggttccccatcatcgtcgacccgcggctggaggggcactacaacctcaagtccatgacgaagctgtccagtgtggcgaaccggtgcctggtccggatgcccaagtctcgccccaagatgagcgaggtgtacgacatggtgcagaagatcgtggactgcgtggggaccggcccgccgcagcccccgctgctgcactaccacggctcggcctctgagcctggccctggcgacaagcgcgccaggaaagggtcggtgaagaggaggaggctctgggagctcaggttcggctgccggcacatcgtgtggcgcggctggaagcctgcgatcgtgaaggacatctgaggagggcggggtggctccggtgctatcctgtgatcactcaccaagctgacataaggaaagtgtgtgatagcgtagtgatgttggcatggaaaagggactggaatatggttgagattcagactagacgtgacctgggatgctgccacaggcgtccaatccgaaagaaccggcggcctatcctgagctcacattcagaacgatgcgacggcgatgatgggtgactccggccattcacccatcctcttgtccagctagcggaggcggccttttgtttgcattgcaacgcatggctgtgtgtgaatccagcttcctcaaaaaacctttctttgcaatgcaatgcaatgcaatcgagtggtggttgtttttctttctcttcttcttcttttttttaaaaaaagggggagagagagataaatatttgctcttgagaaagcaatgtcaatggctggtgagatgcaacgcatggaggagggtgaaaatgtttttttttgttgttgttgttttcttgaaagagaactaacttg

SEQ ID NO: 56374 - DNA, 2241 bp, Zea Mays
gtcttccccctccctctgccctcgtgctcctcccgtcaccctcgtctccactccccgtgacgaccaggaaggaattcttcctccgtccccgttcgccccgtcgtctcgtcgttttctcacctgcgtgctgcgttcgcggacaaacttcttggttggtgactcggcggatcctgagccagagcctcgcaggagggagaggggggagagcggaggagaaaccacctttctttccgttccagacaagctcccagctttgaccgccgccgccgccgccgctgtgtgtgtgtgctcccttagtagttagtccctgtcgcgtcccggatcggagctcccctccgtgcacgggacaccgccggtccgggcgtctccactcccccccggatcgatcagctccgcctccgcaagataggcaagcaatgaggtgcctgcctttcttgcatggagacaccaaagagaaggatccagtcactaagtcggcctctctacggtccatgagcacaacatcaacggagcgcgatgtccgctccggttcagacttcacctccttgaatgtttccgacatgagcgccgagtcgataaggaggacgcagtaccccagcttcactgaccgcccgtctaacctgagggtgttctcctttgctgaactgaagagtgccacccgcaacttcagccggtctctcatggttggcgagggtggctttggctgtgtgtacaggggtgtcatcaagacctccgatgaaccgaacgaacgaattgagatcgctgttaagcagttgaatcgtaaaggacttcaggggcagaaggagtggttaacagagatgaatgtgcttggaattgtggatcatccaaacctagttaaacttataggctactgtgctgaagatgatgagaggggagtacaacggcttttagtgtacgaatatatgcctaatggaagtgtggatgatcacttgtcgagtaggtcaacttctactctgtcatggccaatgagactaaaagtagctcttgattctgctcggggactgaagtatctgcatgaagaaatggaattccaggttattttccgggacctgaaaacatctaacattttgttggatgagaactggaatgctaaactgtcagactttggtttggctaggcatggaccagcagaaggtctgacccatgtctccacagcggtggtcgggactctaggctacgcagctccagagtacatgcagactgggcgcctgaccgcgaagagcgacatatggagctacggcgtcctcctgtacgagctgatcacaggccgccgccccatcgaccggaaccgcccaaagagcgagcagaagctcctggactgggtgaagccgtacatctcggacgtgaaacggttccccatcatcgtcgacccgcggctggaggggcactacaacctcaagtccatgacgaagctgtccagtgtggcgaaccggtgcctggtccggatgcccaagtctcgccccaagatgagcgaggtgtacgacatggtgcagaagatcgtggactgcgtggggaccggcccgccgcagcccccgctgctgcactaccacggctcggcctctgagcctggccctggcgacaagcgcgccaggaaagggtcggtgaagaggaggaggctctgggagctcaggttcggctgccggcacatcgtgtggcgcggctggaagcctgcgatcgtgaaggacatctgaggagggcggggtggctccggtgcttgcagatcctgtgatcactcaccaagctgacataaggaaagtgtgtgatagcgtagtgatgttggcatggaaaagggactggaatatggttgagattcagactagacgtgacctgggatgctgccacaggcgtccaatccgaaagaaccggcggcctatcctgagctcacattcagaacgatgcgacggcgatgatgggtgactccggccattcacccatcctcttgtccagctagcggaggcggccttttgtttgcattgcaacgcatggctgtgtgtgaatccagcttcctcaaaaaacctttctttgcaatgcaatgcaatgcaatcgagtggtggttgtttttctttctcttcttcttcttttttttaaaaaaagggggagagagagataaatatttgctcttgagaaagcaatgtcaatggctggtgagatgcaacgcatggaggagggtgaaaatgtttttttttgttgttgttgttttcttgaaagagaactaacttg

SEQ ID NO: 56375 - DNA, 2218 bp, Zea Mays
gtcttccccctccctctgccctcgtgctcctcccgtcaccctcgtctccactccccgtgacgaccaggaaggaattcttcctccgtccccgttcgccccgtcgtctcgtcgttttctcacctgcgtgctgcgttcgcggacaaacttcttggttggtgactcggcggatcctgagccagagcctcgcaggagggagaggggggagagcggaggagaaaccacctttctttccgttccagacaagctcccagctttgaccgccgccgccgccgccgctgtgtgtgtgtgctcccttagtagttagtccctgtcgcgtcccggatcggagctcccctccgtgcacgggacaccgccggtccgggcgtctccactcccccccggatcgatcagctccgcctccgcaagataggcaagcaatgaggtgcctgcctttcttgcatggagacaccaaagagaaggatccagtcactaagtcggcctctctacggtccatgagcacaacatcaacggagcgcgatgtccgctccggttcagacttcacctccttgaatgtttccgacatgagcgccgagtcgataaggaggacgcagtaccccagcttcactgaccgcccgtctaacctgagggtgttctcctttgctgaactgaagagtgccacccgcaacttcagccggtctctcatggttggcgagggtggctttggctgtgtgtacaggggtgtcatcaagacctccgatgaaccgaacgaacgaattgagatcgctgttaagcagttgaatcgtaaaggacttcaggggcagaaggagtggttaacagagatgaatgtgcttggaattgtggatcatccaaacctagttaaacttataggctactgtgctgaagatgatgagaggggagtacaacggcttttagtgtacgaatatatgcctaatggaagtgtggatgatcacttgtcgagtaggtcaacttctactctgtcatggccaatgagactaaaagtagctcttgattctgctcggggactgaagtatctgcatgaagaaatggaattccaggttattttccgggacctgaaaacatctaacattttgttggatgagaactggaatgctaaactgtcagactttggtttggctaggcatggaccagcagaaggtggtcgggactctaggctacgcagctccagagtacatgcagactgggcgcctgaccgcgaagagcgacatatggagctacggcgtcctcctgtacgagctgatcacaggccgccgccccatcgaccggaaccgcccaaagagcgagcagaagctcctggactgggtgaagccgtacatctcggacgtgaaacggttccccatcatcgtcgacccgcggctggaggggcactacaacctcaagtccatgacgaagctgtccagtgtggcgaaccggtgcctggtccggatgcccaagtctcgccccaagatgagcgaggtgtacgacatggtgcagaagatcgtggactgcgtggggaccggcccgccgcagcccccgctgctgcactaccacggctcggcctctgagcctggccctggcgacaagcgcgccaggaaagggtcggtgaagaggaggaggctctgggagctcaggttcggctgccggcacatcgtgtggcgcggctggaagcctgcgatcgtgaaggacatctgaggagggcggggtggctccggtgcttgcagatcctgtgatcactcaccaagctgacataaggaaagtgtgtgatagcgtagtgatgttggcatggaaaagggactggaatatggttgagattcagactagacgtgacctgggatgctgccacaggcgtccaatccgaaagaaccggcggcctatcctgagctcacattcagaacgatgcgacggcgatgatgggtgactccggccattcacccatcctcttgtccagctagcggaggcggccttttgtttgcattgcaacgcatggctgtgtgtgaatccagcttcctcaaaaaacctttctttgcaatgcaatgcaatgcaatcgagtggtggttgtttttctttctcttcttcttcttttttttaaaaaaagggggagagagagataaatatttgctcttgagaaagcaatgtcaatggctggtgagatgcaacgcatggaggagggtgaaaatgtttttttttgttgttgttgttttcttgaaagagaactaacttg

SEQ ID NO: 56376 - DNA, 1766 bp, Zea Mays
ctctcgtgcagttgcggcggcgcggggacacagagcgattgcgagtcgtctccaataaatttgtcgcgtccggcgatccatccgtcttccccctccctctgccctcgtgctcctcccgtcaccctcgtctccactccccgtgacgaccaggaaggaattcttcctccgtccccgttcgccccgtcgtctcgtcgttttctcacctgcgtgctgcgttcgcggacaaacttcttggttggtgactcggcggatcctgagccagagcctcgcaggagggagaggggggagagcggaggagaaaccacctttctttccgttccagacaagctcccagctttgaccgccgccgccgccgccgctgtgtgtgtgtgctcccttagtagttagtccctgtcgcgtcccggatcggagctcccctccgtgcacgggacaccgccggtccgggcgtctccactcccccccggatcgatcagctccgcctccgcaagataggcaagcaatgaggtgcctgcctttcttgcatggagacaccaaagagaaggatccagtcactaagtcggcctctctacggtccatgagcacaacatcaacggagcgcgatgtccgctccggttcagacttcacctccttgaatgtttccgacatgagcgccgagtcgataaggaggacgcagtaccccagcttcactgaccgcccgtctaacctgagggtgttctcctttgctgaactgaagagtgccacccgcaacttcagccggtctctcatggttggcgagggtggctttggctgtgtgtacaggggtgtcatcaagacctccgatgaaccgaacgaacgaattgagatcgctgttaagcagttgaatcgtaaaggacttcaggggcagaaggagtggttaacagagatgaatgtgcttggaattgtggatcatccaaacctagttaaacttataggctactgtgctgaagatgatgagaggggagtacaacggcttttagtgtacgaatatatgcctaatggaagtgtggatgatcacttgtcgagtaggtcaacttctactctgtcatggccaatgagactaaaagtagctcttgattctgctcggggactgaagtatctgcatgaagaaatggaattccaggttattttccgggacctgaaaacatctaacattttgttggatgagaactggaatgctaaactgtcagactttggtttggctaggcatggaccagcagaaggtctgacccatgtctccacagcgtgcagatcctgtgatcactcaccaagctgacataaggaaagtgtgtgatagcgtagtgatgttggcatggaaaagggactggaatatggttgagattcagactagacgtgacctgggatgctgccacaggcgtccaatccgaaagaaccggcggcctatcctgagctcacattcagaacgatgcgacggcgatgatgggtgactccggccattcacccatcctcttgtccagctagcggaggcggccttttgtttgcattgcaacgcatggctgtgtgtgaatccagcttcctcaaaaaacctttctttgcaatgcaatgcaatgcaatcgagtggtggttgtttttctttctcttcttcttcttttttttaaaaaaagggggagagagagataaatatttgctcttgagaaagcaatgtcaatggctggtgagatgcaacgcatggaggagggtgaaaatgtttttttttgttgttgttgttttcttgaaagagaactaacttg

SEQ ID NO: 56377 - DNA, 1773 bp, Zea Mays
ctctctcgtgcagttgcggcggcgcggggacacagagcgattgcgagtcgtctccaataaatttgtcgcgtccggcgatccatccgtcttccccctccctctgccctcgtgctcctcccgtcaccctcgtctccactccccgtgacgaccaggaaggaattcttcctccgtccccgttcgccccgtcgtctcgtcgttttctcacctgcgtgctgcgttcgcggacaaagtgtgggaaaatgaaaacctgagcgcaaacaaacactctgagcctcgcaggagggagaggggggagagcggaggagaaaccacctttctttccgttccagacaagctcccagctttgaccgccgccgccgccgccgctgtgtgtgtgtgctcccttagtagttagtccctgtcgcgtcccggatcggagctcccctccgtgcacgggacaccgccggtccgggcgtctccactcccccccggatcgatcagctccgcctccgcaagataggcaagcaatgaggtgcctgcctttcttgcatggagacaccaaagagaaggatccagtcactaagtcggcctctctacggtccatgagcacaacatcaacggagcgcgatgtccgctccggttcagacttcacctccttgaatgtttccgacatgagcgccgagtcgataaggaggacgcagtaccccagcttcactgaccgcccgtctaacctgagggtgttctcctttgctgaactgaagagtgccacccgcaacttcagccggtctctcatggttggcgagggtggctttggctgtgtgtacaggggtgtcatcaagacctccgatgaaccgaacgaacgaattgagatcgctgttaagcagttgaatcgtaaaggacttcaggggcagaaggagtggttaacagagatgaatgtgcttggaattgtggatcatccaaacctagttaaacttataggctactgtgctgaagatgatgagaggggagtacaacggcttttagtgtacgaatatatgcctaatggaagtgtggatgatcacttgtcgagtaggtcaacttctactctgtcatggccaatgagactaaaagtagctcttgattctgctcggggactgaagtatctgcatgaagaaatggaattccaggttattttccgggacctgaaaacatctaacattttgttggatgagaactggaatgctaaactgtcagactttggtttggctaggcatggaccagcagaaggtctgacccatgtctccacagcgtgcagatcctgtgatcactcaccaagctgacataaggaaagtgtgtgatagcgtagtgatgttggcatggaaaagggactggaatatggttgagattcagactagacgtgacctgggatgctgccacaggcgtccaatccgaaagaaccggcggcctatcctgagctcacattcagaacgatgcgacggcgatgatgggtgactccggccattcacccatcctcttgtccagctagcggaggcggccttttgtttgcattgcaacgcatggctgtgtgtgaatccagcttcctcaaaaaacctttctttgcaatgcaatgcaatgcaatcgagtggtggttgtttttctttctcttcttcttcttttttttaaaaaaagggggagagagagataaatatttgctcttgagaaagcaatgtcaatggctggtgagatgcaacgcatggaggagggtgaaaatgtttttttttgttgttgttgttttcttgaaagagaactaacttg

SEQ ID NO: 56378 - DNA, 441 bp, Zea Mays
cttccttgacccacaacacgatgagatggagatctagtatgatgatctccacctagactcatcacgcatgcctccccttgatctacctcgatctatagcaagacgaggtggatattgtggacaatgacatagctcgacgtcatggaggtggatcttcgcctcggtttaatatgctcgtgtgctccttcatctgcctcaacctcaacatgacgaggtggagatcgaggatggggacatacgtcaacaacatggaggcggatctctacctctgatccaccacatccccatgcttcttcgtctaccccggcacacaacgcaaggtggagatcgaggatgatgccatatctcaacattgtaaaggcagatatccgtatagattcaccatgcgtgtgtactccttcatgtgcctcgacctataacataacaaggtggagattgagg

SEQ ID NO: 56379 - DNA, 2170 bp, Zea Mays
gtcttccccctccctctgccctcgtgctcctcccgtcaccctcgtctccactccccgtgacgaccaggaaggaattcttcctccgtccccgttcgccccgtcgtctcgtcgttttctcacctgcgtgctgcgttcgcggacaaagtgtgggaaaatgaaaacctgagcgcaaacaaacactctgagcctcgcaggagggagaggggggagagcggaggagaaaccacctttctttccgttccagacaagctcccagctttgaccgccgccgccgccgccgctgtgtgtgtgtgctcccttagtagttagtccctgtcgcgtcccggatcggagctcccctccgtgcacgggacaccgccggtccgggcgtctccactcccccccggatcgatcagctccgcctccgcaagataggcaagcaatgaggtgcctgcctttcttgcatggagacaccaaagagaaggatccagtcactaagtcggcctctctacggtccatgagcacaacatcaacggagcgcgatgtccgctccggttcagacttcacctccttgaatgtttccgacatgagcgccgagtcgataaggaggacgcagtaccccagcttcactgaccgcccgtctaacctgagggtgttctcctttgctgaactgaagagtgccacccgcaacttcagccggtctctcatggttggcgagggtggctttggctgtgtgtacaggggtgtcatcaagacctccgatgaaccgaacgaacgaattgagatcgctgttaagcagttgaatcgtaaaggacttcaggggcagaaggagtggttaacagagatgaatgtgcttggaattgtggatcatccaaacctagttaaacttataggctactgtgctgaagatgatgagaggggagtacaacggcttttagtgtacgaatatatgcctaatggaagtgtggatgatcacttgtcgagtaggtcaacttctactctgtcatggccaatgagactaaaagtagctcttgattctgctcggggactgaagtatctgcatgaagaaatggaattccaggttattttccgggacctgaaaacatctaacattttgttggatgagaactggaatgctaaactgtcagactttggtttggctaggcatggaccagcagaaggtctgacccatgtctccacagcggtggtcgggactctaggctacgcagctccagagtacatgcagactgggcgcctgaccgcgaagagcgacatatggagctacggcgtcctcctgtacgagctgatcacaggccgccgccccatcgaccggaaccgcccaaagagcgagcagaagctcctggactgggtgaagccgtacatctcggacgtgaaacggttccccatcatcgtcgacccgcggctggaggggcactacaacctcaagtccatgacgaagctgtccagtgtggcgaaccggtgcctggtccggatgcccaagtctcgccccaagatgagcgaggtgtacgacatggtgcagaagatcgtggactgcgtggggaccggcccgccgcagcccccgctgctgcactaccacggctcggcctctgagcctggccctggcgacaagcgcgccaggaaagggtcggtgaagaggaggaggctctgggagctcagggacccagcgcaccctggtctcattcatttcttcgtccacccttctgatggtctcatatacccttttcataacgaggaatggagaaagaggatagatgctagaagacagaagagaaagtatggatcaaaagggtgtagtggaagagagatgggagagcacaacaaggtggagatcgaggatggtggcataccacaatggtgtagagacatatctatgcatggattcgccatgtgtgattgctccttcatgtgcctgaacccacaacacaacaatgttgagattgaggacaacaacatacctcaatggtgtggaggtcggtctccatctagatttattatgttcgcctgctccttcatctacatcggcccacaacatgacaaggtggagatcgacgacgatagccacaggctcaccgcctccttcatccatctttacacacgtgagatctacatgacctcactccatcgccttctccttgggcaaatatgcaagcaaaggaaggagcgaatctaa

SEQ ID NO: 56380 - DNA, 2642 bp, Zea Mays
ctctctcgtgcagttgcggcggcgcggggacacagagcgattgcgagtcgtctccaataaatttgtcgcgtccggcgatccatccgtcttccccctccctctgccctcgtgctcctcccgtcaccctcgtctccactccccgtgacgaccaggaaggaattcttcctccgtccccgttcgccccgtcgtctcgtcgttttctcacctgcgtgctgcgttcgcggacaaagtgtgggaaaatgaaaacctgagcgcaaacaaacactctgagcctcgcaggagggagaggggggagagcggaggagaaaccacctttctttccgttccagacaagctcccagctttgaccgccgccgccgccgccgctgtgtgtgtgtgctcccttagtagttagtccctgtcgcgtcccggatcggagctcccctccgtgcacgggacaccgccggtccgggcgtctccactcccccccggatcgatcagctccgcctccgcaagataggcaagcaatgaggtgcctgcctttcttgcatggagacaccaaagagaaggatccagtcactaagtcggcctctctacggtccatgagcacaacatcaacggagcgcgatgtccgctccggttcagacttcacctccttgaatgtttccgacatgagcgccgagtcgataaggaggacgcagtaccccagcttcactgaccgcccgtctaacctgagggtgttctcctttgctgaactgaagagtgccacccgcaacttcagccggtctctcatggttggcgagggtggctttggctgtgtgtacaggggtgtcatcaagacctccgatgaaccgaacgaacgaattgagatcgctgttaagcagttgaatcgtaaaggacttcaggggcagaaggagtggttaacagagatgaatgtgcttggaattgtggatcatccaaacctagttaaacttataggctactgtgctgaagatgatgagaggggagtacaacggcttttagtgtacgaatatatgcctaatggaagtgtggatgatcacttgtcgagtaggtcaacttctactctgtcatggccaatgagactaaaagtagctcttgattctgctcggggactgaagtatctgcatgaagaaatggaattccaggttattttccgggacctgaaaacatctaacattttgttggatgagaactggaatgctaaactgtcagactttggtttggctaggcatggaccagcagaaggtctgacccatgtctccacagcggtggtcgggactctaggctacgcagctccagagtacatgcagactgggcgcctgaccgcgaagagcgacatatggagctacggcgtcctcctgtacgagctgatcacaggccgccgccccatcgaccggaaccgcccaaagagcgagcagaagctcctggactgggtgaagccgtacatctcggacgtgaaacggttccccatcatcgtcgacccgcggctggaggggcactacaacctcaagtccatgacgaagctgtccagtgtggcgaaccggtgcctggtccggatgcccaagtctcgccccaagatgagcgaggtgtacgacatggtgcagaagatcgtggactgcgtggggaccggcccgccgcagcccccgctgctgcactaccacggctcggcctctgagcctggccctggcgacaagcgcgccaggaaagggtcggtgaagaggaggaggctctgggagctcaggttcggctgccggcacatcgtgtggcgcggctggaagcctgcgatcgtgaaggacatctgaggagggcggggtggctccggtgctgtaagtacagtagctagctagctgttcatagagacggtggtaacagtttgttccaccgtgtagtgcttggttggtatatagggtgagttcatgcttgcataataccagtcgagaagaagaagaagaaaggtgcacagttgagtggggtggcgttggaatggagtacatagagtagtgctgtgtgtaatttccagtgcaacttctgctgctggctttcttcgtctttgggacaagtttggtgtggtcttcggggatgattcagatacccattcccttgtatgccatttttgactgatgtccagggacccagcgcaccctggtctcattcatttcttcgtccacccttctgatggtctcatatacccttttcataacgaggaatggagaaagaggatagatgctagaagacagaagagaaagtatggatcaaaagggtgtagtggaagagagatgggagagcacaacaaggtggagatcgaggatggtggcataccacaatggtgtagagacatatctatgcatggattcgccatgtgtgattgctccttcatgtgcctgaacccacaacacaacaatgttgagattgaggacaacaacatacctcaatggtgtggaggtcggtctccatctagatttattatgttcgcctgctccttcatctacatcggcccacaacatgacaaggtggagatcgacgacgatagccacaggctcaccgcctccttcatccatctttacacacgtgagatctacatgacctcactccatcgccttctccttgggcaaatatgcaagcaaaggaaggagcgaatctaa

SEQ ID NO: 56381 - DNA, 2637 bp, Zea Mays
ctctctcgtgcagttgcggcggcgcggggacacagagcgattgcgagtcgtctccaataaatttgtcgcgtccggcgatccatccgtcttccccctccctctgccctcgtgctcctcccgtcaccctcgtctccactccccgtgacgaccaggaaggaattcttcctccgtccccgttcgccccgtcgtctcgtcgttttctcacctgcgtgctgcgttcgcggacaaacttcttggttggtgactcggcggatcctgagccagagcctcgcaggagggagaggggggagagcggaggagaaaccacctttctttccgttccagacaagctcccagctttgaccgccgccgccgccgccgctgtgtgtgtgtgctcccttagtagttagtccctgtcgcgtcccggatcggagctcccctccgtgcacgggacaccgccggtccgggcgtctccactcccccccggatcgatcagctccgcctccgcaagataggcaagcaatgaggtgcctgcctttcttgcatggagacaccaaagagaaggatccagtcactaagtcggcctctctacggtccatgagcacaacatcaacggagcgcgatgtccgctccggttcagacttcacctccttgaatgtttccgacatgagcgccgagtcgataaggaggacgcagtaccccagcttcactgaccgcccgtctaacctgagggtgttctcctttgctgaactgaagagtgccacccgcaacttcagccggtctctcatggttggcgagggtggctttggctgtgtgtacaggggtgtcatcaagacctccgatgaaccgaacgaacgaattgagatcgctgttaagcagttgaatcgtaaaggacttcaggggcagaaggagtggttaacagagatgaatgtgcttggaattgtggatcatccaaacctagttaaacttataggctactgtgctgaagatgatgagaggggagtacaacggcttttagtgtacgaatatatgcctaatggaagtgtggatgatcacttgtcgagtaggtcaacttctactctgtcatggccaatgagactaaaagtagctcttgattctgctcggggactgaagtatctgcatgaagaaatggaattccaggttattttccgggacctgaaaacatctaacattttgttggatgagaactggaatgctaaactgtcagactttggtttggctaggcatggaccagcagaaggtctgacccatgtctccacagcggtggtcgggactctaggctacgcagctccagagtacatgcagactgggcgcctgaccgcgaagagcgacatatggagctacggcgtcctcctgtacgagctgatcacaggccgccgccccatcgaccggaaccgcccaaagagcgagcagaagctcctggactgggtgaagccgtacatctcggacgtgaaacggttccccatcatcgtcgacccgcggctggaggggcactacaacctcaagtccatgacgaagctgtccagtgtggcgaaccggtgcctggtccggatgcccaagtctcgccccaagatgagcgaggtgtacgacatggtgcagaagatcgtggactgcgtggggaccggcccgccgcagcccccgctgctgcactaccacggctcggcctctgagcctggccctggcgacaagcgcgccaggaaagggtcggtgaagaggaggaggctctgggagctcaggttcggctgccggcacatcgtgtggcgcggctggaagcctgcgatcgtgaaggacatctgaggagggcggggtggctccggtgctgtaagtacagtagctagctagctgttcatagagacggtggtaacagtttgttccaccgtgtagtgcttggttggtatatagggtgagttcatgcttgcataataccagtcgagaagaagaagaagaaaggtgcacagttgagtggggtggcgttggaatggagtacatagagtagtgctgtgtgtaatttccagtgcaacttctgctgctggctttcttcgtctttgggacaagtttggtgtggtcttcggggatgattcagatacccattcccttgtatgccatttttgactgatgtccagggacccagcgcaccctggtctcattcatttcttcgtccacccttctgatggtctcatatacccttttcataacgaggaatggagaaagaggatagatgctagaagacagaagagaaagtatggatcaaaagggtgtagtggaagagagatgggagagcacaacaaggtggagatcgaggatggtggcataccacaatggtgtagagacatatctatgcatggattcgccatgtgtgattgctccttcatgtgcctgaacccacaacacaacaatgttgagattgaggacaacaacatacctcaatggtgtggaggtcggtctccatctagatttattatgttcgcctgctccttcatctacatcggcccacaacatgacaaggtggagatcgacgacgatagccacaggctcaccgcctccttcatccatctttacacacgtgagatctacatgacctcactccatcgccttctccttgggcaaatatgcaagcaaaggaaggagcgaatctaa

SEQ ID NO: 56382 - DNA, 1391 bp, Zea Mays
ctctctctctcgtgcagttgcggcggcgcggggacacagagcgattgcgagtcgtctccaataaatttgtcgcgtccggcgatccatccgtcttccccctccctctgccctcgtgctcctcccgtcaccctcgtctccactccccgtgacgaccaggaaggaattcttcctccgtccccgttcgccccgtcgtctcgtcgttttctcacctgcgtgctgcgttcgcggacaaagtgtgggaaaatgaaaacctgagcgcaaacaaacactctggtattgtactatatagattattataagaaagagggaatggtctttgcctcgcagcttcttggttggtgactcggcggatcctgagccagagcctcgcaggagggagaggggggagagcggaggagaaaccacctttctttccgttccagacaagctcccagctttgaccgccgccgccgccgccgctgtgtgtgtgtgctcccttagtagttagtccctgtcgcgtcccggatcggagctcccctccgtgcacgggacaccgccggtccgggcgtctccactcccccccggatcgatcagctccgcctccgcaagatagcaatgaggtgcctgcctttcttgcatggagacaccaaagagaaggatccagtcactaagtcggcctctctacggtccatgagcacaacatcaacggagcgcgatgtccgctccggttcagacttcacctccttgaatgtttccgacatgagcgccgagtcgataaggaggacgcagtaccccagcttcactgaccgcccgtctaacctgagggtgttctcctttgctgaactgaagagtgccacccgcaacttcagccggtctctcatggttggcgagggtggctttggctgtgtgtacaggggtgtcatcaagacctccgatgaaccgaacgaacgaattgagatcgctgttaagcagttgaatcgtaaaggacttcaggggcagaaggagtggttaacagagatgaatgtgcttggaattgtggatcatccaaacctagttaaacttataggctactgtgctgaagatgatgagaggggagtacaacggcttttagtgtacgaatatatgcctaatggaagtgtggatgatcacttgtcgagtaggtcaacttctactctgtcatggccaatgagactaaaagtagctcttgattctgctcggggactgaagtatctgcatgaagaaatggaattccaggttattttccgggacctgaaaacatctaacattttgttggatgagaactggaatgctaaactgtcagactttggtttggctaggcatggaccagcagaaggtctgacccatgtctccacagcgacatgaagaacagagtcaaaaaaaattgagaatgg

SEQ ID NO: 56383 - DNA, 1285 bp, Zea Mays
gtcttccccctccctctgccctcgtgctcctcccgtcaccctcgtctccactccccgtgacgaccaggaaggaattcttcctccgtccccgttcgccccgtcgtctcgtcgttttctcacctgcgtgctgcgttcgcggacaaacttcttggttggtgactcggcggatcctgagccagagcctcgcaggagggagaggggggagagcggaggagaaaccacctttctttccgttccagacaagctcccagctttgaccgccgccgccgccgccgctgtgtgtgtgtgctcccttagtagttagtccctgtcgcgtcccggatcggagctcccctccgtgcacgggacaccgccggtccgggcgtctccactcccccccggatcgatcagctccgcctccgcaagataggcaagcaatgaggtgcctgcctttcttgcatggagacaccaaagagaaggatccagtcactaagtcggcctctctacggtccatgagcacaacatcaacggagcgcgatgtccgctccggttcagacttcacctccttgaatgtttccgacatgagcgccgagtcgataaggaggacgcagtaccccagcttcactgaccgcccgtctaacctgagggtgttctcctttgctgaactgaagagtgccacccgcaacttcagccggtctctcatggttggcgagggtggctttggctgtgtgtacaggggtgtcatcaagacctccgatgaaccgaacgaacgaattgagatcgctgttaagcagttgaatcgtaaaggacttcaggggcagaaggagtggttaacagagatgaatgtgcttggaattgtggatcatccaaacctagttaaacttataggctactgtgctgaagatgatgagaggggagtacaacggcttttagtgtacgaatatatgcctaatggaagtgtggatgatcacttgtcgagtaggtcaacttctactctgtcatggccaatgagactaaaagtagctcttgattctgctcggggactgaagtatctgcatgaagaaatggaattccaggttattttccgggacctgaaaacatctaacattttgttggatgagaactggaatgctaaactgtcagactttggtttggctaggcatggaccagcagaaggtctgacccatgtctccacagcgtagatgagattaaagtccccagccaccatccaaggaccatcacaagcatttctgatgtctctaagttcctggaggaactgaattttttccccctcaccctgaggtcc

SEQ ID NO: 56384 - DNA, 682 bp, Zea Mays
accaaggcccctctatctttcttccccagcaatgcaattccgcagacagacgcaggcggcaggcagcggcgcagcgcaccgcttcttcctcttctatctctcatctacagccttcgctgcgccgccatggccaccacccgcttgctgccgctgctccgacgccgcctcgccgccgcaatcgccggatcgcctgctccctactccctccgaggaccctcatttcctgcaccagcagctgcagggctaaggtccctcctaaaagctgctggagcgagcgatactgcaacagaaccccaggaccaacagcattccgaaacaactcccccgccggcttctgtcccgacaccggagtccggtctcaaagtcagggacacctccaacctgaagatctcaccaaggcatgacctcgccatgatctttacgtgcaaggtgtgcgagaccaggtccatgaagatggccagcagggactcgtacgagaacggagtcgtggtcgtgcggtgcggtggctgcaacaacctccacctcatggcggacaggcttggctggtttggggagccagggagcattgaggacttcctagcgacgcaaggggaggaggtgaagaaaggttcgacagatactatcagctttactttggacgacttggctgggtctcaggtgaggccatgcgggcagaagaatc

SEQ ID NO: 56385 - DNA, 1915 bp, Zea Mays
ccaatacaagtctttgggtaattgggcacagaagaggagacagagagacggagaggggagacccggtcactgccaatgccaagaacaagaaaccagagaggacagtcgtcaatccaatccgagtctcctccaaaaacccatcaatctgcaggaacgagagcagcaggagagcatcctaggaaaaaagttaggaccaactgaccgagcaaaaaaggtagcatctctgtatcaccaaggcaccgccgatcacagaccaaatccctcccccctcctctggtccatcccacacgtagagcagccgtttcgacaagagtggtgtgagtgttgaagagctcctcaacatgatggatccggccttgcttgacgacgtcatacgccggctgctggaggtgaagaatctcaagcctgggaagaacgcgcagttgtcggagtcggagatcaagcagctctgcgctgccgccaaggagatcttcctgcaccagcccaacctgctggagctcgaggcgcccatcaaaatctgcggtgatgtccatggccagtactctgatctcctgaggctattcgattatggtggctatccgcctcaggccaactaccttttcttgggtgattatgtggatcgtggaaagcaaagcttggaaacaatatgtcttcttttggcctacaaggtcaagtacccagagaacttctttcttctaaggggaaaccatgaatgcgcatcagtaaatcgcatctatggtttttatgacgagtgcaaacgcagattcagtgtaaagctgtggaaaacattcactgactgttttaactgcttgccagtgtcagcattgatagacgaaaagatcctctgtatgcatggtggtctatctccagagttgaacaagctcgaacaaatacttaatctgagtcgccccacagacgtgcctgatactggattgctctgtgaccttctttggtctgatccttctaatgaagcaacaggatgggccataaatgatcgaggtgtttcatatacatttggtcctgataaagtttctgaattccttgagaagcatgatttggacctcatctgccgagcccatcaggttgtcgaagatggatatgagtttttcgctagccgccaactcgtaacaatgttttcagcccctaactactgtggagaatttgataacgctggtgccatgatgagtgtagatgagacattgatgtgctccttccaaatactgaaacctgcgaggaaggtgttgggtggttcaactaataacaaatcaggcttcaagtcatcgagaggatggtgacaatggcaagcctgatatcaggttggttggtgagcagcacgccagtggtcgacggggggttgttccatcataatcatattacagcggctgcaactgacaggcccaatgcatcttctcttccatgttggatcaacactcttgtaatgtattatttactgtgcggatctgagaggatgtgaatgatttcatttgcgtcctcaagttcaaaagattcaggaaggcatgcttgaaataaaaatagccagaaacatgcaaggtgctccacgacgcagcacggcatttccagtgttttctttttgctgtctagttctgaatatattttaccgccagaccagcacgtaagcttgcctggcaatggtttttatttgttgctatgccatctcaaaagtcaaaaccatggatttatatcaaaagtcaaaagactttgagaagtatttatttggtagcctagctacaatgttcctcctctctgatgcatagcataggggatggggatggggatgagatggaagaagagaaatctgatgagtcttgggcggctgtcgtgcgtgccgtctacgacaggcgcaagccgcactaggcgacctggttccatggacgctgacgctgcccgaagaaaa

SEQ ID NO: 56386 - DNA, 1607 bp, Zea Mays
ccaatacaagtctttgggtaattgggcacagaagaggagacagagagacggagaggggagacccggtcactgccaatgccaagaacaagaaaccagagaggacagtcgtcaatccaatccgagtctcctccaaaaacccatcaatctgcaggaacgagagcagcaggagagcatcctaggaaaaaagttaggaccaactgaccgagcaaaaaaggtgatgtccatggccagtactctgatctcctgaggctattcgattatggtggctatccgcctcaggccaactaccttttcttgggtgattatgtggatcgtggaaagcaaagcttggaaacaatatgtcttcttttggcctacaaggtcaagtacccagagaacttctttcttctaaggggaaaccatgaatgcgcatcagtaaatcgcatctatggtttttatgacgagtgcaaacgcagattcagtgtaaagctgtggaaaacattcactgactgttttaactgcttgccagtgtcagcattgatagacgaaaagatcctctgtatgcatggtggtctatctccagagttgaacaagctcgaacaaatacttaatctgagtcgccccacagacgtgcctgatactggattgctctgtgaccttctttggtctgatccttctaatgaagcaacaggatgggccataaatgatcgaggtgtttcatatacatttggtcctgataaagtttctgaattccttgagaagcatgatttggacctcatctgccgagcccatcaggttgtcgaagatggatatgagtttttcgctagccgccaactcgtaacaatgttttcagcccctaactactgtggagaatttgataacgctggtgccatgatgagtgtagatgagacattgatgtgctccttccaaatactgaaacctgcgaggaaggtgttgggtggttcaactaataacaaatcaggcttcaagtcatcgagaggatggtgacaatggcaagcctgatatcaggttggttggtgagcagcacgccagtggtcgacggggggttgttccatcataatcatattacagcggctgcaactgacaggcccaatgcatcttctcttccatgttggatcaacactcttgtaatgtattatttactgtgcggatctgagaggatgtgaatgatttcatttgcgtcctcaagttcaaaagattcaggaaggcatgcttgaaataaaaatagccagaaacatgcaaggtgctccacgacgcagcacggcatttccagtgttttctttttgctgtctagttctgaatatattttaccgccagaccagcacgtaagcttgcctggcaatggtttttatttgttgctatgccatctcaaaagtcaaaaccatggatttatatcaaaagtcaaaagactttgagaagtatttatttggtagcctagctacaatgttcctcctctctgatgcatagcataggggatggggatggggatgagatggaagaagagaaatctgatgagtcttgggcggctgtcgtgcgtgccgtctacgacaggcgcaagccgcactaggcgacctggttccatggacgctgacgctgcccgaagaaaa

SEQ ID NO: 56387 - DNA, 1755 bp, Zea Mays
ccaatacaagtctttgggtaattgggcacagaagaggagacagagagacggagaggggagacccggtcactgccaatgccaagaacaagaaaccagagaggacagtcgtcaatccaatccgagtctcctccaaaaacccatcaatctgcaggaacgagagcagcaggagagcatcctaggaaaaaagttaggaccaactgaccgagcaaaaaaggtagcatctctgtatcaccaaggcaccgccgatcacagaccaaatccctcccccctcctctggtccatcccacacgtagagcagccgtggtgtgagtgttgaagagctcctcaacatgatggatccggccttgcttgacgacgtcatacgccggctgctggaggtgaagaatctcaagcctgggaagaacgcgcagttgtcggagtcggagatcaagcagctctgcgctgccgccaaggagatcttcctgcaccagcccaacctgctggagctcgaggcgcccatcaaaatctgcggtgatgtccatggccagtactctgatctcctgaggctattcgattatggtggctatccgcctcaggccaactaccttttcttgggtgattatgtggatcgtggaaagcaaagcttggaaacaatatgtcttcttttggcctacaagtgtcagcattgatagacgaaaagatcctctgtatgcatggtggtctatctccagagttgaacaagctcgaacaaatacttaatctgagtcgccccacagacgtgcctgatactggattgctctgtgaccttctttggtctgatccttctaatgaagcaacaggatgggccataaatgatcgaggtgtttcatatacatttggtcctgataaagtttctgaattccttgagaagcatgatttggacctcatctgccgagcccatcaggttgtcgaagatggatatgagtttttcgctagccgccaactcgtaacaatgttttcagcccctaactactgtggagaatttgataacgctggtgccatgatgagtgtagatgagacattgatgtgctccttccaaatactgaaacctgcgaggaaggtgttgggtggttcaactaataacaaatcaggcttccagtcatcgagaggatggtgacaatggcaagcctgatatcaggttggttggtgagcagcacgccagtggtcgacggggggttgttccatcataatcatattacagcggctgcaactgacaggcccaatgcatcttctcttccatgttggatcaacactcttgtaatgtattatttactgtgcggatctgagaggatgtgaatgatttcatttgcgtcctcaagttcaaaagattcaggaaggcatgcttgaaataaaaatagccagaaacatgcaaggtgctccacgacgcagcacggcatttccagtgttttctttttgctgtctagttctgaatatattttaccgccagaccagcacgtaagcttgcctggcaatggtttttatttgttgctatgccatctcaaaagtcaaaaccatggatttatatcaaaagtcaaaagactttgagaagtatttatttggtagcctagctacaatgttcctcctctctgatgcatagcataggggatggggatggggatgagatggaagaagagaaatctgatgagtcttgggcggctgtcgtgcgtgccgtctacgacaggcgcaagccgcactaggcgacctggttccatggacgctgacgctgcccgaagaaaa

SEQ ID NO: 56388 - DNA, 1783 bp, Zea Mays
gtaaaaaaaagatgttcttgtaatctccaaccaaggatgcagacatgtcatggaagtaaacggagggcctagccataaaacggctttgcttttattccaaagtccaatacaagtctttgggtaattgggcacagaagaggagacagagagacggagaggggagacccggtcactgccaatgccaagaacaagaaaccagagaggacagtcgtcaatccaatccgagtctcctccaaaaacccatcaatctgcaggaacgagagcagcaggagagcatcctaggaaaaaagttaggaccaactgaccgagcaaaaaagtttcgacaagagtggtgtgagtgttgaagagctcctcaacatgatggatccggccttgcttgacgacgtcatacgccggctgctggaggtgaagaatctcaagcctgggaagaacgcgcagttgtcggagtcggagatcaagcagctctgcgctgccgccaaggagatcttcctgcaccagcccaacctgctggagctcgaggcgcccatcaaaatctgcggtgatgtccatggccagtactctgatctcctgaggctattcgattatggtggctatccgcctcaggccaactaccttttcttgggtgattatgtggatcgtggaaagcaaagcttggaaacaatatgtcttcttttggcctacaagtgtcagcattgatagacgaaaagatcctctgtatgcatggtggtctatctccagagttgaacaagctcgaacaaatacttaatctgagtcgccccacagacgtgcctgatactggattgctctgtgaccttctttggtctgatccttctaatgaagcaacaggatgggccataaatgatcgaggtgtttcatatacatttggtcctgataaagtttctgaattccttgagaagcatgatttggacctcatctgccgagcccatcaggttgtcgaagatggatatgagtttttcgctagccgccaactcgtaacaatgttttcagcccctaactactgtggagaatttgataacgctggtgccatgatgagtgtagatgagacattgatgtgctccttccaaatactgaaacctgcgaggaaggtgttgggtggttcaactaataacaaatcaggcttcaagtcatcgagaggatggtgacaatggcaagcctgatatcaggttggttggtgagcagcacgccagtggtcgacggggggttgttccatcataatcatattacagcggctgcaactgacaggcccaatgcatcttctcttccatgttggatcaacactcttgtaatgtattatttactgtgcggatctgagaggatgtgaatgatttcatttgcgtcctcaagttcaaaagattcaggaaggcatgcttgaaataaaaatagccagaaacatgcaaggtgctccacgacgcagcacggcatttccagtgttttctttttgctgtctagttctgaatatattttaccgccagaccagcacgtaagcttgcctggcaatggtttttatttgttgctatgccatctcaaaagtcaaaaccatggatttatatcaaaagtcaaaagactttgagaagtatttatttggtagcctagctacaatgttcctcctctctgatgcatagcataggggatggggatggggatgagatggaagaagagaaatctgatgagtcttgggcggctgtcgtgcgtgccgtctacgacaggcgcaagccgcactaggcgacctggttccatggacgctgacgctgcccgaagaaaa

SEQ ID NO: 56389 - DNA, 1415 bp, Zea Mays
cgtctgtcgcgcggcagctgcgatatttcctgagaaacgtcttcggttcagaacaaccgttgatgcttcagaaacacaagtgattgaggctatgcagaagatagcttcacacatagggaacgcttcaaaattcagcaaggcatcaaaactagctttgcaactcatcgaggctggaagcgtcaagcctggaacaatcggtcatttctttgctatactagaagctgcgatgtcttcaccgggagtgtgcaacgagccttctgtacgagcagactaccacaaattgttcgatgctgctcagggtgtaacagagttactcaaccaagagcagaaaaatcgattcaacatatgggtgctgcatgcagtggtggctaacgatcttttcactgatgacagctttgtgttctcaaaggctgtaggaaagatcaaagatgccatctcagccctgccagtggcaacggtggatgacgacaacgacgaagctgcggcccttgctgctgcgagcaaaactgatgtggcgacggataacgaagcaggtcatggcgtcccagccgcagcttctgactctgtggtggatgatggcgcgcatgccgtggccttggagccggaagaagaatcctccgaccctttcggtttagatgggcttcttgagcacaggcctaagaagacgtctgggagagctcgagagaaggcagtcgcggctctgaacagaaagacggtcgaggaggaagcaaagagggttctcaagtcgcagcgggaggcccttctgaaatgcctggaaatagccgctcggcgctacagaatcccgtggcgtacgacgacgcggcccggttcacacggcggcagcgggacgcgatcgctaagctgtggaactcgatcaaggagcagcagatccggcggaagcaaggcaagtcggtgagcgggaagctggacgtgaacgccttcgagtacctccaggagaagtactcccgcgagaagatgagcatccggcacagcgtgggcggcggcggcgatcgtcgcgcgacgcagtggctgggctaggccgtgcgtgtgtgtgatggtttgtgcctttggcttcatcagcgacacggcgtgggagttgtttgtgcttggtttttcgtagaggagaggagagagttgacatgatcttccccgtagcatgtgatgggtggctcttggtgtaacgttacgtactagctgcactgaactcgttgcatgtctttatcagtgctggaactggaagcagcagctgaaactgctgacaacgacatggcagtgcagcacagtgcggctgttgggggcaaaatgctttgtttatgccggcacccggcagcacatactactagagtagcagcagtctatcaccacccttatttgatttctctgttcggttcggattaaaactaactgttttaact

SEQ ID NO: 56390 - DNA, 2028 bp, Zea Mays
tggtcgctgtcgtccgtccgtttggagaggtgacgtggcgcgttccgatcggacggtcggcgtcgactcgacgcgagctcgtccctcgtcttctccttttctttttctttccgagaggcgggatttccttcgccgccgccgcccccagtgaccaccttgccgaccggagcgtgtgaaccgtacggagtcgcccgcgtgagatgacggccacctccgcgttcgagtcgtccccggagatggagcggttcctctgcgagcggctgctgaacacggagcagcccatcgcggagcgcttccgggcgctcttctccctccgcaacctccgcggggatgcgccgcgccgcgccctcctccaaggtttagactttggcgtttctgtgagatacattttggtcagcaccaaagaaagaggttagcattataggagctgccaaacatattaccaatatatttgctattagagggtttatctcaaattttggtattgtttcaatggttgagattattttatatttattgctatgtagtacatattaaattcctgaaagtttggatgactgccacttttttgttcctttcctgctatgtataactgtgagattatgttgttaactttggtctgctactctgctgtcaacaaaagccattacagacaaacctgatatctcttagatttcttttagtagtcattactgaaaaagaaaactgtactatactagttatgcaagaattgaaaagcacatcaagggcctgattcgcaaccaccacttttgcgctgctagctgtgcatattcagatttctgcaatttcatgtttgagagatcaaaagattgtgcttaagaaaacctgacatattttgtaaattgttcagctgcaagggatccttctaacttgcttgcccatgaggctgcatttgcacttggacaaatgcaggatgctgaggctattcctgcactggtggcagttctcaaagatctttcgctacatccaattgtccgccatgaggcagcggaagctcttggagctattggcctggaaaagagcatccctgtgttggaggaaagtctaacaactgatcctgctgtggaggtccaagaaacttgcgagctggcactaggacgaatagaggagaataagaaagttaatggggctgagagtacaaccacttcaccctttctctcagttgatccagcgctgccttcaaagcatgggctttcagtagatcaattaaggggccttcttctcaatgagcaagagagcatgtaccaacgttatgcagctctttttgcgcttaggaatgatggtggagatgctgctgtttctgctattgttgcagctctgagcgtcaaaagtgctcttctacgtcatgaggttgcttatgtgttaggtcagctgcaaaacaaagccgcttcagatgcgctttctacagtcctgaaggatgtctgtgagcatccaatggtcaggcatgaagctgctgaagcccttggctcaatcgcagaccaagaaagcattgcccttttggaggagtttgcaaaggatcctgagcccatagtctcgcagagctgtgaagtagctctcagtatgctcgagtatgagagatcggggaaatcctttgagtttctcttccttcagactcctcatgtgcagtcctaggttcctcttcgtcgatgatcactcaatgcgaagtgactgaaagcttcttgtattggttaatgtgactggaccagccatatatccactggctttgatgatactctttatcctgataggattttttttttggttaatcgtgatatggaggttgaaacacggagcagcatgaaaacaaatggaaaagaaaccatgaaaactatgaaaacttataaatttcgacaaaagaatacatgcgaactatgtcagtggttggtttcggcaattatacactcgcagcaaagaaaactgggttatcctcaccagcgcgaatccagatctatgcataaagggaaccacttatttatattcttgcaaaagcatttttgcaggatgttc

SEQ ID NO: 56391 - DNA, 1818 bp, Zea Mays
ctaggctcacagctcgcgactcgcaaggaggagcttgcggcagctcggtatgaaaaagggcatctgtcttctttatccatcgtccgtctccttccacccagacacaggccaggcgggcccattgttgcccaagaccctggaatccggagcaggagtcctctctctctctgactctctcctgagggggaggaggaggaggaggaggcagaggcggaagagcaaccaccaagcagcagagcgcgaggcgacacggggacggagccctggaggtctctcgcgagtccagaggcgatcgacggagtcgcgattcgtctcccagtaccgactaatctctcgctcccgcttccgcttccgcttcgatcccgtgctgcttgcccactgctgtaatctcgtgcttgcccagtgctctagttcgagcactctcttgcttctcgcttcgcttcgctgcctgccgcgctgcgtcgagagctttcgccttgcaccggcgattgccccgacacgattgcgtccggtttttcttctaggttctgcgtagatagatagataggtatatatttttcgagtccaattacggggtgcttctggcactggtgaggaaggctattagggttgcctgcctgtgtgtgctgaccgtgaacggaagcgaaggtttctcgcgctaatctgccaggacgctttgttctttcctggcccttggtagttagcagggtgtctccaaccattacactgtcaagtctggactctggaagggttaaaatctcatgaaagtaacgacgccaatcgtgccagcactgctacgctacgagccattgcaccgttctgtgtctctgcgtgaaccaacaatttccatgggttcggccaaaaattcctgccctccgattatcctggttcttcctactactgtaagcagtttactccgtgatatttagaaccgtctccattgcggtactacttagatattgctgcattgttaagctctttccgcaccattcgtatttatcacatgattccctgtccttcttgcatcagcacagggtttctctttgtagggatatgaacaacgggactttggtttttaacggcagctagagggtagcctggagtgagcatttcattctggagatacaatgggtggctgctgctgctgctgctgttctgcaagggcatctgattcagatagagcaccgatgtggagaagtcaggcattaaaatcaaaactgacgggcagcagtccccaaaagtggacgaatttgagtcgtgcgaaaaaggtgcccctgaggataaggctgatgaggaggaggatgtttgtccaatatgtcttgaagaatacgacaaagaaaatccacgttcggtcaccaagtgcgagcatcatttccatctctgttgcatactcgaatggatggagaggagcgagacatgcccagtctgtgaccagataactctgatagatgggatgtacgaatagcattcttggcggcggttcctgttgagttggcgttctttgtttttgtttttgttgtggtctggtctggacggctgtctggtggaggagatggttgatgagtcttggcaaaaaaataatttatagaagaaaaatgacatgaaattgtgctagagtcgcctgtgtcctgtttttacctgaaaaccctgtgagatttgctccctggtttcctcttgcttggtttgcgtgttcattcttccatttagatttcagtttctcagtgcctgtgtgacagggaaatcatctgtattgtacagttagtctgaaacggtgacagaaaagaagaaaagctgattctaccatatggttggtttgaa

SEQ ID NO: 56392 - DNA, 1099 bp, Zea Mays
ctaggctcacagctcgcgactcgcaaggaggagcttgcggcagctcggtatgaaaaagggcatctgtcttctttatccatcgtccgtctccttccacccagacacaggccaggcgggcccattgttgcccaagaccctggaatccggagcaggagtcctctctctctctgactctctcctgagggggaggaggaggaggaggaggcagaggcggaagagcaaccaccaagcagcagagcgcgaggcgacacggggacggagccctggaggtctctcgcgagtccagaggcgatcgacggagtcgcgattcgtctcccaggatatgaacaacgggactttggtttttaacggcagctagagggtagcctggagtgagcatttcattctggagatacaatgggtggctgctgctgctgctgctgttctgcaagggcatctgattcagatagagcaccggtgcgcatctatatgtggagaagtcaggcattaaaatcaaaactgacgggcagcagtccccaaaagtggacgaatttgagtcgtgcgaaaaaggtgcccctgaggataaggctgatgaggaggaggatgtttgtccaatatgtcttgaagaatacgacaaagaaaatccacgttcggtcaccaagtgcgagcatcatttccatctctgttgcatactcgaatggatggagaggagcgagacatgcccagtctgtgaccagataactctgatagatgggatgtacgaatagcattcttggcggcggttcctgttgagttggcgttctttgtttttgtttttgttgtggtctggtctggacggctgtctggtggaggagatggttgatgagtcttggcaaaaaaataatttatagaagaaaaatgacatgaaattgtgctagagtcgcctgtgtcctgtttttacctgaaaaccctgtgagatttgctccctggtttcctcttgcttggtttgcgtgttcattcttccatttagatttcagtttctcagtgcctgtgtgacagggaaatcatctgtattgtacagttagtctgaaacggtgacagaaaagaagaaaagctgattctaccatatggttggtttgaa

SEQ ID NO: 56393 - DNA, 1647 bp, Zea Mays
ctaggctcacagctcgcgactcgcaaggaggagcttgcggcagctcggtatgaaaaagggcatctgtcttctttatccatcgtccgtctccttccacccagacacaggccaggcgggcccattgttgcccaagaccctggaatccggagcaggagtcctctctctctctgactctctcctgagggggaggaggaggaggaggaggcagaggcggaagagcaaccaccaagcagcagagcgcgaggcgacacggggacggagccctggaggtctctcgcgagtccagaggcgatcgacggagtcgcgattcgtctcccaggatatgaacaacgggactttggtttttaacggcagctagagggtagcctggagtgagcatttcattctggagatacaatgggtggctgctgctgctgctgctgttctgcaagggcatctgattcagatagagcaccgatgtggagaagtcaggcattaaaatcaaaactgacgggcagcagtccccaaaagtggacgaatttgagtcgtgcgaaaaaggtgcccctgaggataaggctgatgaggaggaggatgtttgtccaatatgtcttgaaggtttgtttcttctgaccacgggatcgtcaactctttacattatcattccgttgttagaactttagaagtgaaataccctattgttgaatagtatctttacctggtcacttttgattcacatgtttttgctacttttactataggcctgcattcttcttgttactaggcttaagaattttggagctcatctgtggatatacattcagttgggtgaaacacgaaatggattgcatttctgaactaggtagtttgaacaagtgctgctgctgtgaagtgtctttgatagatgttatatgtgttccatatcctttcttagtgtaggagtatttgtattctctctccgcatgtacgatatgctctagcagttcagtagtgggtaggtgcatatatgatggagccaatgcaaatggcttggtacctgttgaacttccttgtgcttttctttttgcctgtggtgcatggtaatcttaactgatgcatcagccgatgatgccattctgaaattaatttccaaaccagaagatttcacatataaagctttgcctgcccttccacaccagaatacgacaaagaaaatccacgttcggtcaccaagtgcgagcatcatttccatctctgttgcatactcgaatggatggagaggagcgagacatgcccagtctgtgaccagataactctgatagatgggatgtacgaatagcattcttggcggcggttcctgttgagttggcgttctttgtttttgtttttgttgtggtctggtctggacggctgtctggtggaggagatggttgatgagtcttggcaaaaaaataatttatagaagaaaaatgacatgaaattgtgctagagtcgcctgtgtcctgtttttacctgaaaaccctgtgagatttgctccctggtttcctcttgcttggtttgcgtgttcattcttccatttagatttcagtttctcagtgcctgtgtgacagggaaatcatctgtattgtacagttagtctgaaacggtgacagaaaagaagaaaagctgattctaccatatggttggtttgaa

SEQ ID NO: 56394 - DNA, 977 bp, Zea Mays
ctaggctcacagctcgcgactcgcaaggaggagcttgcggcagctcggtatgaaaaagggcatctgtcttctttatccatcgtccgtctccttccacccagacacaggccaggcgggcccattgttgcccaagaccctggaatccggagcaggagtcctctctctctctgactctctcctgagggggaggaggaggaggaggaggcagaggcggaagagcaaccaccaagcagcagagcgcgaggcgacacggggacggagccctggaggtctctcgcgagtccagaggcgatcgacggagtcgcgattcgtctcccaggatatgaacaacgggactttggtttttaacggcagctagagggtagcctggagtgagcatttcattctggagatacaatgggtggctgctgctgctgctgctgttctgcaagggcatctgattcagatagagcaccgatgtggagaagtcaggcattaaaatcaaaactgacgggcagcagtccccaaaagtggacgaatttgagtcgtgcgaaaaaggtgcccctgaggataaggctgatgaggaggaggatgtttgtccaatatgtcttgaagataactctgatagatgggatgtacgaatagcattcttggcggcggttcctgttgagttggcgttctttgtttttgtttttgttgtggtctggtctggacggctgtctggtggaggagatggttgatgagtcttggcaaaaaaataatttatagaagaaaaatgacatgaaattgtgctagagtcgcctgtgtcctgtttttacctgaaaaccctgtgagatttgctccctggtttcctcttgcttggtttgcgtgttcattcttccatttagatttcagtttctcagtgcctgtgtgacagggaaatcatctgtattgtacagttagtctgaaacggtgacagaaaagaagaaaagctgattctaccatatggttggtttgaa

SEQ ID NO: 56395 - DNA, 1895 bp, Zea Mays
ctaggctcacagctcgcgactcgcaaggaggagcttgcggcagctcggtatgaaaaagggcatctgtcttctttatccatcgtccgtctccttccacccagacacaggccaggcgggcccattgttgcccaagaccctggaatccggagcaggagtcctctctctctctgactctctcctgagggggaggaggaggaggaggaggcagaggcggaagagcaaccaccaagcagcagagcgcgaggcgacacggggacggagccctggaggtctctcgcgagtccagaggcgatcgacggagtcgcgattcgtctcccagtaccgactaatctctcgctcccgcttccgcttccgcttcgatcccgtgctgcttgcccactgctgtaatctcgtgcttgcccagtgctctagttcgagcactctcttgcttctcgcttcgcttcgctgcctgccgcgctgcgtcgagagctttcgccttgcaccggcgattgccccgacacgattgcgtccggtttttcttctaggttctgcgtagatagatagataggtatatatttttcgagtccaattacggggtgcttctggcactggtgaggaaggctattagggttgcctgcctgtgtgtgctgaccgtgaacggaagcgaaggtttctcgcgctaatctgccaggacgctttgttctttcctggcccttggtagttagcagggtgtctccaaccattacactgtcaagtctggactctggaagggttaaaatctcatgaaagtaacgacgccaatcgtgccagcactgctacgctacgagccattgcaccgttctgtgtctctgcgtgaaccaacaatttccatgggttcggccaaaaattcctgccctccgattatcctggttcttcctactactgtaagcagtttactccgtgatatttagaaccgtctccattgcggtactacttagatattgctgcattgttaagctctttccgcaccattcgtatttatcacatgattccctgtccttcttgcatcagcacagggtttctctttgtagggatatgaacaacgggactttggtttttaacggcagctagagggtagcctggagtgagcatttcattctggagatacaatgggtggctgctgctgctgctgctgttctgcaagggcatctgattcagatagagcaccggtgcgcatctatcaccgacaaaatcccgaggaacatgcacccttgtcgtcagcctttgatggaccatcgccaacttctgctatagttgcagttgacacaaatcttgatacaccatctcttgacacttaccgagcaccacctgcacctttgccatatgatgtttgcttcacagtttcagaaaatcctgatgtggagaagtcaggcattaaaatcaaaactgacgggcagcagtccccaaaagtggacgaatttgagtcgtgcgaaaaaggtgcccctgaggataaggctgatgaggaggaggatgtttgtccaatatgtcttgaagataactctgatagatgggatgtacgaatagcattcttggcggcggttcctgttgagttggcgttctttgtttttgtttttgttgtggtctggtctggacggctgtctggtggaggagatggttgatgagtcttggcaaaaaaataatttatagaagaaaaatgacatgaaattgtgctagagtcgcctgtgtcctgtttttacctgaaaaccctgtgagatttgctccctggtttcctcttgcttggtttgcgtgttcattcttccatttagatttcagtttctcagtgcctgtgtgacagggaaatcatctgtattgtacagttagtctgaaacggtgacagaaaagaagaaaagctgattctaccatatggttggtttgaa

SEQ ID NO: 56396 - DNA, 1720 bp, Zea Mays
ctaggctcacagctcgcgactcgcaaggaggagcttgcggcagctcggtatgaaaaagggcatctgtcttctttatccatcgtccgtctccttccacccagacacaggccaggcgggcccattgttgcccaagaccctggaatccggagcaggagtcctctctctctctgactctctcctgagggggaggaggaggaggaggaggcagaggcggaagagcaaccaccaagcagcagagcgcgaggcgacacggggacggagccctggaggtctctcgcgagtccagaggcgatcgacggagtcgcgattcgtctcccagtaccgactaatctctcgctcccgcttccgcttccgcttcgatcccgtgctgcttgcccactgctgtaatctcgtgcttgcccagtgctctagttcgagcactctcttgcttctcgcttcgcttcgctgcctgccgcgctgcgtcgagagctttcgccttgcaccggcgattgccccgacacgattgcgtccggtttttcttctaggttctgcgtagatagatagataggtatatatttttcgagtccaattacggggtgcttctggcactggtgaggaaggctattagggttgcctgcctgtgtgtgctgaccgtgaacggaagcgaaggtttctcgcgctaatctgccaggacgctttgttctttcctggcccttggtagttagcagggtgtctccaaccattacactgtcaagtctggactctggaagggttaaaatctcatgaaagtaacgacgccaatcgtgccagcactgctacgctacgagccattgcaccgttctgtgtctctgcgtgaaccaacaatttccatgggttcggccaaaaattcctgccctccgattatcctggttcttcctactactgtaagcagtttactccgtgatatttagaaccgtctccattgcggtactacttagatattgctgcattgttaagctctttccgcaccattcgtatttatcacatgattccctgtccttcttgcatcagcacagggtttctctttgtagggatatgaacaacgggactttggtttttaacggcagctagagggtagcctggagtgagcatttcattctggagatacaatgggtggctgctgctgctgctgctgttctgcaagggcatctgattcagatagagcaccggtgcgcatctatatgtggagaagtcaggcattaaaatcaaaactgacgggcagcagtccccaaaagtggacgaatttgagtcgtgcgaaaaaggtgcccctgaggataaggctgatgaggaggaggatgtttgtccaatatgtcttgaagataactctgatagatgggatgtacgaatagcattcttggcggcggttcctgttgagttggcgttctttgtttttgtttttgttgtggtctggtctggacggctgtctggtggaggagatggttgatgagtcttggcaaaaaaataatttatagaagaaaaatgacatgaaattgtgctagagtcgcctgtgtcctgtttttacctgaaaaccctgtgagatttgctccctggtttcctcttgcttggtttgcgtgttcattcttccatttagatttcagtttctcagtgcctgtgtgacagggaaatcatctgtattgtacagttagtctgaaacggtgacagaaaagaagaaaagctgattctaccatatggttggtttgaa

SEQ ID NO: 56397 - DNA, 1262 bp, Zea Mays
ctaggctcacagctcgcgactcgcaaggaggagcttgcggcagctcggtatgaaaaagggcatctgtcttctttatccatcgtccgtctccttccacccagacacaggccaggcgggcccattgttgcccaagaccctggaatccggagcaggagtcctctctctctctgactctctcctgagggggaggaggaggaggaggaggcagaggcggaagagcaaccaccaagcagcagagcgcgaggcgacacggggacggagccctggaggtctctcgcgagtccagaggcgatcgacggagtcgcgattcgtctcccaggatatgaacaacgggactttggtttttaacggcagctagagggtagcctggagtgagcatttcattctggagatacaatgggtggctgctgctgctgctgctgttctgcaagggcatctgattcagatagagcaccgcaccgacaaaatcccgaggaacatgcacccttgtcgtcagcctttgatggaccatcgccaacttctgctatagttgcagttgacacaaatcttgatacaccatctcttgacacttaccgagcaccacctgcacctttgccatatgatgtttgcttcacagtttcagaaaatcctgatgtggagaagtcaggcattaaaatcaaaactgacgggcagcagtccccaaaagtggacgaatttgagtcgtgcgaaaaaggtgcccctgaggataaggctgatgaggaggaggatgtttgtccaatatgtcttgaagaatacgacaaagaaaatccacgttcggtcaccaagtgcgagcatcatttccatctctgttgcatactcgaatggatggagaggagcgagacatgcccagtctgtgaccagataactctgatagatgggatgtacgaatagcattcttggcggcggttcctgttgagttggcgttctttgtttttgtttttgttgtggtctggtctggacggctgtctggtggaggagatggttgatgagtcttggcaaaaaaataatttatagaagaaaaatgacatgaaattgtgctagagtcgcctgtgtcctgtttttacctgaaaaccctgtgagatttgctccctggtttcctcttgcttggtttgcgtgttcattcttccatttagatttcagtttctcagtgcctgtgtgacagggaaatcatctgtattgtacagttagtctgaaacggtgacagaaaagaagaaaagctgattctaccatatggttggtttgaa

SEQ ID NO: 56398 - DNA, 1238 bp, Zea Mays
ctaggctcacagctcgcgactcgcaaggaggagcttgcggcagctcggtatgaaaaagggcatctgtcttctttatccatcgtccgtctccttccacccagacacaggccaggcgggcccattgttgcccaagaccctggaatccggagcaggagtcctctctctctctgactctctcctgagggggaggaggaggaggaggaggcagaggcggaagagcaaccaccaagcagcagagcgcgaggcgacacggggacggagccctggaggtctctcgcgagtccagaggcgatcgacggagtcgcgattcgtctcccactagagggtagcctggagtgagcatttcattctggagatacaatgggtggctgctgctgctgctgctgttctgcaagggcatctgattcagatagagcaccggtgcgcatctatcaccgacaaaatcccgaggaacatgcacccttgtcgtcagcctttgatggaccatcgccaacttctgctatagttgcagttgacacaaatcttgatacaccatctcttgacacttaccgagcaccacctgcacctttgccatatgatgtttgcttcacagtttcagaaaatcctgatgtggagaagtcaggcattaaaatcaaaactgacgggcagcagtccccaaaagtggacgaatttgagtcgtgcgaaaaaggtgcccctgaggataaggctgatgaggaggaggatgtttgtccaatatgtcttgaagaatacgacaaagaaaatccacgttcggtcaccaagtgcgagcatcatttccatctctgttgcatactcgaatggatggagaggagcgagacatgcccagtctgtgaccagataactctgatagatgggatgtacgaatagcattcttggcggcggttcctgttgagttggcgttctttgtttttgtttttgttgtggtctggtctggacggctgtctggtggaggagatggttgatgagtcttggcaaaaaaataatttatagaagaaaaatgacatgaaattgtgctagagtcgcctgtgtcctgtttttacctgaaaaccctgtgagatttgctccctggtttcctcttgcttggtttgcgtgttcattcttccatttagatttcagtttctcagtgcctgtgtgacagggaaatcatctgtattgtacagttagtctgaaacggtgacagaaaagaagaaaagctgattctaccatatggttggtttgaa

SEQ ID NO: 56399 - DNA, 989 bp, Zea Mays
ctaggctcacagctcgcgactcgcaaggaggagcttgcggcagctcggtatgaaaaagggcatctgtcttctttatccatcgtccgtctccttccacccagacacaggccaggcgggcccattgttgcccaagaccctggaatccggagcaggagtcctctctctctctgactctctcctgagggggaggaggaggaggaggaggcagaggcggaagagcaaccaccaagcagcagagcgcgaggcgacacggggacggagccctggaggtctctcgcgagtccagaggcgatcgacggagtcgcgattcgtctcccaggatatgaacaacgggactttggtttttaacggcagctagagggtagcctggagtgagcatttcattctggagatacaatgggtggctgctgctgctgctgctgttctgcaagggcatctgattcagatagagcaccggtgcgcatctatatgtggagaagtcaggcattaaaatcaaaactgacgggcagcagtccccaaaagtggacgaatttgagtcgtgcgaaaaaggtgcccctgaggataaggctgatgaggaggaggatgtttgtccaatatgtcttgaagataactctgatagatgggatgtacgaatagcattcttggcggcggttcctgttgagttggcgttctttgtttttgtttttgttgtggtctggtctggacggctgtctggtggaggagatggttgatgagtcttggcaaaaaaataatttatagaagaaaaatgacatgaaattgtgctagagtcgcctgtgtcctgtttttacctgaaaaccctgtgagatttgctccctggtttcctcttgcttggtttgcgtgttcattcttccatttagatttcagtttctcagtgcctgtgtgacagggaaatcatctgtattgtacagttagtctgaaacggtgacagaaaagaagaaaagctgattctaccatatggttggtttgaa

SEQ ID NO: 56400 - DNA, 1993 bp, Zea Mays
ctaggctcacagctcgcgactcgcaaggaggagcttgcggcagctcggtatgaaaaagggcatctgtcttctttatccatcgtccgtctccttccacccagacacaggccaggcgggcccattgttgcccaagaccctggaatccggagcaggagtcctctctctctctgactctctcctgagggggaggaggaggaggaggaggcagaggcggaagagcaaccaccaagcagcagagcgcgaggcgacacggggacggagccctggaggtctctcgcgagtccagaggcgatcgacggagtcgcgattcgtctcccagtaccgactaatctctcgctcccgcttccgcttccgcttcgatcccgtgctgcttgcccactgctgtaatctcgtgcttgcccagtgctctagttcgagcactctcttgcttctcgcttcgcttcgctgcctgccgcgctgcgtcgagagctttcgccttgcaccggcgattgccccgacacgattgcgtccggtttttcttctaggttctgcgtagatagatagataggtatatatttttcgagtccaattacggggtgcttctggcactggtgaggaaggctattagggttgcctgcctgtgtgtgctgaccgtgaacggaagcgaaggtttctcgcgctaatctgccaggacgctttgttctttcctggcccttggtagttagcagggtgtctccaaccattacactgtcaagtctggactctggaagggttaaaatctcatgaaagtaacgacgccaatcgtgccagcactgctacgctacgagccattgcaccgttctgtgtctctgcgtgaaccaacaatttccatgggttcggccaaaaattcctgccctccgattatcctggttcttcctactactgtaagcagtttactccgtgatatttagaaccgtctccattgcggtactacttagatattgctgcattgttaagctctttccgcaccattcgtatttatcacatgattccctgtccttcttgcatcagcacagggtttctctttgtagggatatgaacaacgggactttggtttttaacggcagctagagggtagcctggagtgagcatttcattctggagatacaatgggtggctgctgctgctgctgctgttctgcaagggcatctgattcagatagagcaccgcaccgacaaaatcccgaggaacatgcacccttgtcgtcagcctttgatggaccatcgccaacttctgctatagttgcagttgacacaaatcttgatacaccatctcttgacacttaccgagcaccacctgcacctttgccatatgatgtttgcttcacagtttcagaaaatcctgatgtggagaagtcaggcattaaaatcaaaactgacgggcagcagtccccaaaagtggacgaatttgagtcgtgcgaaaaaggtgcccctgaggataaggctgatgaggaggaggatgtttgtccaatatgtcttgaagaatacgacaaagaaaatccacgttcggtcaccaagtgcgagcatcatttccatctctgttgcatactcgaatggatggagaggagcgagacatgcccagtctgtgaccagataactctgatagatgggatgtacgaatagcattcttggcggcggttcctgttgagttggcgttctttgtttttgtttttgttgtggtctggtctggacggctgtctggtggaggagatggttgatgagtcttggcaaaaaaataatttatagaagaaaaatgacatgaaattgtgctagagtcgcctgtgtcctgtttttacctgaaaaccctgtgagatttgctccctggtttcctcttgcttggtttgcgtgttcattcttccatttagatttcagtttctcagtgcctgtgtgacagggaaatcatctgtattgtacagttagtctgaaacggtgacagaaaagaagaaaagctgattctaccatatggttggtttgaa

SEQ ID NO: 56401 - DNA, 808 bp, Zea Mays
ctaggctcacagctcgcgactcgcaaggaggagcttgcggcagctcggtatgaaaaagggcatctgtcttctttatccatcgtccgtctccttccacccagacacaggccaggcgggcccattgttgcccaagaccctggaatccggagcaggagtcctctctctctctgactctctcctgagggggaggaggaggaggaggaggcagaggcggaagagcaaccaccaagcagcagagcgcgaggcgacacggggacggagccctggaggtctctcgcgagtccagaggcgatcgacggagtcgcgattcgtctcccaggatatgaacaacgggactttggtttttaacggcagctagagggtagcctggagtgagcatttcattctggagatacaatgggtggctgctgctgctgctgctgttctgcaagggcatctgattcagatagagcaccggtgcgcatctatcaccgacaaaatcccgaggaacatgcacccttgtcgtcagcctttgatggaccatcgccaacttctgctatagttgcagttgacacaaatcttgatacaccatctcttgacacttaccgagcaccacctgcacctttgccatatgatgtttgcttcacagtttcagaaaatcctgatgtggagaagtcaggcattaaaatcaaaactgacgggcagcagtccccaaaagtggacgaatttgagtcgtgcgaaaaaggtgcccctgaggataaggctgatgaggaggaggatgtttgtccaatatgtcttgaagaagatttcacatataaagctttgcctg

SEQ ID NO: 56402 - DNA, 678 bp, Zea Mays
ctgtaggtgtgtcaggctttctactaaggctgttggagttcaagattattatggcttgctaaaaagtatattactgtggtatgatggcctctgtctggtttagtaatctttatgtcaacttctgcaacataacaatcgggcccaagaagctgctgaacaggcaacacttgctccttcgattgggtcatccatcgaggcagctactggcgttgtgtataatattactctggtgggaaggacatcactttgcaagaagtgaacaaggtgtcccagattgtgacaagcctatctaacccatatgtgaacataatttttggtgtcgtcgttgatgaccgttacactggtgagatacatgtgacaatcattgcgacaggatttccacagtccttccagaaatcccttttggcggatccaaagggagcacgtatagtggaatccaaagagaaagcagcaaccctcgcccataaagcagcagctgctgcagttcaaccggttggtgctatgctccaagaattagaaaaggagattgatgatgtggatgcacaaattcgaaatctttgacaactgcttgataagaatattttgcattttccgctgaaatgtttcttacagtgtttatatctgcctgcgcaattgcacctagcagttgaggagtgcctctttggctcttttcgcatg

SEQ ID NO: 56403 - DNA, 2000 bp, Zea Mays
cctcgaacacatacagcatacatgctcgctcttcctcgtctagtcgtcttggtgagtctgatccctctctccttccgtcatccaccatctctagggttttagcgccccattttcgcatcgccattcccgatcggatcgccccttccccacccaaccctccggcgccgccacccttcgtgtcagagggtcggtctccaccgaaagcctcgcaacaaatctcctccgtttcttgctccggccatttgttgcaaagatcgtgttttccccccctcatccatgcctcgcgttccatcccttccgtccccggaaatccctccgctttcttgagatctcccgttcctcgatctgacctcgcctcgtcccgccaccacaagcaacagctgttttgcgccacgatcctcagggttgcgattctcgcgtccatttgctcgccccaatacctttcgggagcatctgatctcgaacagtgagacaaagtagccacctttgtgccgttccttgcgtatcggtgggtggcggcgctgcccattcctatgaatggacgggagggagtccacggtggcgtcggggcccaacttctcgtccttcttcgcgcagcaccggggcatcggggcgccgggtgtccccggccactcgcaggggcttcacgccccgccgcccggtgggtaccggcagcatcttgatgctgtctctgcggggtatgcattccagaccccgcatgttgggggtcccagcattgggcaggggtacgaggcctcacctcatgcggcacagcacagcgccggtggcggctctggctccggtggttgtggtggtatggacattggcatgggtgcggccgtgagtgccgatgttaagggggatcaggggagtgggcctggccaggatgagcaggccaagaaaatataagcctgatgggtctgtgactcttgggttatcacccacttcatcatcgacgcctcactcgtccagctcggggatgggaaccatggttaacactccaggctctggatttgggtctggaggatcagggggttcaggttctggtgcaccatcagagaaacgtggcagggggcggccacctggctctggaaagatgcaacagctggcttcgcttggaaagtggtttcttggctctgttggaacaggttttactccgcatgtgattattattcaaccaggagaggacgttgctgcgagaataatggccttctcacagcaaggcccaagggcagtgtgcatcatttcagcaactggagctatttctacagcaacccttcaccaggattcagactccggtggtgtggttacatatgagggccgatttgagatcctgtgcctttctgggtcatacttggtggtagaggatggtggcacacggacccgaagcggaggtctttgcatagctttgtgtggtcctgaccacagggttattggtgggagtgtaggcggagtcctgacagcagctggaacagttcaggtgatagtggggagcttcatgtacggaggttcgaagaagaacaaggtgaaagcggaggtggacatggagcccgaggaggtggcacccgcggagcacagtggcatggtccctcctgcgatgagtggcggcgggtgggaagcgggcatgatgaggcagatggactcgagaactcctgccattgatatcaactcgatccgcgggtagtagggtagcagttgttgcctggttgggtggataaaggctctgtgacaaagtcgaatcctcctcctaggacacacacagcacgcatgtactaactaactaactaacagctctgttgctgtggtttaggatactcagaactccgagtatatcgtatgtgatattgttgttgtatgaaataattaacggttggttggtcgtgttattatgttaaatatatatatgaaatgctgctgttgggtctccactccaattatatatgattccatacagatatgactgctgttgcgaaatgaatggattgagttggtactgattg

SEQ ID NO: 56404 - DNA, 1159 bp, Zea Mays
attttattgtattgaaacaaaaccgaggttcagcagtcatgtcttgtggtgccacatgagctgcattttcatacggttcatcacctgcttcgagagcatattgatcgtgaagttgattacaaggttattgttttctgcacgacagccatggtgactgagtttatgtatatcatgcttcgagatttgaagttaaatgtcagggaaattcactcgaggaaacctcagctctatagaactcgcatatctgaagagttccggggctctaaccgcatagttctcgtaacgtcagatgtttctactcgtggggtgaactatccagatgtcacccttgtgattcaggttggtgttcctcccgatagagagcattacatccatcggcttggaaggactgcaagggaaggtaaatctggcaagggaattcttttgcttgcgccatgggaacaatacttcttggacgagataggcgatctcccgattgacaagtatccagcaccagacattgaccaggagatgaagcaaaaggttgacgattcaatagagatggttgacatgagcatcaaagaagcagcataccatgcgtggctgggttactacaactccatcgctgacataggtagagataaaagaatggttgttgacctagcaaatcgatttggtgcctcgattggcctggagaagcctccagcgatataccggaagaccgctctgaagatggggctcaaggatgtccctgggattcgaataaggaaatgacatgttcctccacagcaataagggaccttttagcctcgacattggattggaggacatgtaattgaattgggttcaaaatatacaaaattactcacctctgttgcaatggcctaactccttaaatgcatcttcgatttctttaactgctgtttctgtagcataaagacataattagtaaacacacaggatgctatcatcaacatactaacaaataataacaatataaaagaagtaaaagttaatcctagcagatcaacatttcaactaaaatacaggaagccataaaaaatgttgagctggaaaataaaatttagttttctgaaagctttagctttcaccatttcaaatatgtacaccaactgccaaaggaaaacctaaacatgtcgattcatctataatcaaagct

SEQ ID NO: 56405 - DNA, 2897 bp, Zea Mays
acactcctgaagtgcggaaatccaaagtgtgttgtgttgcgttgcctgaatgcctgcccgccgccaaaacccataaaccctaccctctacagcgcctccgtcgctgctcccggcggcgatggggggtgggccgcgcacgttcccgggcgggctgtctaagtggcagtacaaacgcatgcacgagaagctggcgcggcagaagcagcgggggctcctccgccacgagaagcagctctacctcgcccgcctccgctccgagatccgcgcctcccgcctccctggcgccgccgcggaagctccaccggggggcgaggggcccacctcgtcgcgcgcccacatccgcgcccttgccgaccgcttccgcaggcccggcgccgaggacctctggaacgaggacgacgggcccctccgccgcgtcaagcggccgcccactgggatcgcgtcgggtgtccggcaccagcagcagcagttggactcggggaagccccgcggaggaccgagttgggaggacctgacctctctggatcaaccgaggcctttagacaggggaaaagggccgacctcggccgcgttcaatccgagaagagagtacctaacggtggtggcgccctggtgcccgcgttgggatccgcgacctctcggtttcgttgctcccaaaaagtcttatccggtgatgactcgttgctccgtgagttgccagccatgtgtcgacctgaggccattggttgctagtgggcttactgaggatgggaatggaaggaaggacacgccattggcacagtttaatcaggagaggttctactcggtggctgcgaggcgattcggcaggaaatggagaccagattcgtcggaccaggatgacaagggcacgtctgcgcccaagaagaatctgaggtgccatcaggaggaggtggagcagtgctgctctcaggaactgcgatgtgaagaaggaaaggcgggtgctcaagtcttacgaggaggaaagcaatgatctcgcgggtagaatccaagagctgcgagaggagattagaaatagggaggttttgggcactgagaggaggcgttacgagtccaggggtgaatctctgcttaccagtaaaagatttgatcagtgtggtgtctccgcgctgacagtcaaagcacttactgatgctggatatgtacagacaactgtggttcaagaggcagctcttcctatatgtcttgaaggtaaagatgttcttgtcaaggccaaaactggaaccggcaaaagtgcagcttttctgtcttgaatgctatgaagagcaatacaaatcagcgagtatctccaatatttgctcttgtcctatgccctacaagagagcttgctattcagcttacagctgaagcaaatgtcttgttaaagtaccatgaaggaattggtgttcaatctcttattggtggcactagattcaagcttgatcagagacgattagaatctgatccatgccagattttagttgcaacacctggtagactgctggatcacattgaaaacaaatcatcattctctgttcgtttgatgagattgaaattgcttgtgttggatgaagctgatcatttgctagatctgggtttccgtaaagacatagaaaagattgtcgataccttgccacgtcaaagacaaacattgctcttctcagctactattccaaaagaggttcgaagagtttcacagctagtattaaagagggatcacgtttttgttgacacagtgggccttggagctgttgaaaccccaactaaggttcagcagtcatgtcttgtggtgccacatgagctgcattttcatacggttcatcacctgcttcgagagcatattgatcgtgaagttgattacaaggttattgttttctgcacgacagccatggtgactgagtttatgtatatcatgcttcgagatttgaagttaaatgtcagggaaattcactcgaggaaacctcagctctatagaactcgcatatctgaagagttccggggctctaaccgcatagttctcgtaacgtcagatgtttctactcgtggggtgaactatccagatgtcacccttgtgattcaggttggtgttcctcccgatagagagcattacatccatcggcttggaaggactgcaagggaaggtaaatctggcaagggaattcttttgcttgcgccatgggaacaatacttcttggacgagataggcgatctcccgattgacaagtatccagcaccagacattgaccaggagatgaagcaaaaggttgacgattcaatagagatggttgacatgagcatcaaagaagcagcataccatgcgtggctgggttactacaactccatcgctgacataggtagagataaaagaatggttgttgacctagcaaatcgatttggtgcctcgattggcctggagaagcctccagcgatataccggaagaccgctctgaagatggggctcaaggatgtccctgggattcgaataaggaaatgacatgttcctccacagcaataagggaccttttagcctcgacattggattggaggacatgtaattgaattgggttcaaaatatacaaaattactcacctctgttgcaatggcctaactccttaaatgcatcttcgatttctttaactgctgtttctgtagcataaagacataattagtaaacacacaggatgctatcatcaacatactaacaaataataacaatataaaagaagtaaaagttaatcctagcagatcaacatttcaactaaaatacaggaagccataaaaaatgttgagctggaaaataaaatttagttttctgaaagctttagctttcaccatttcaaatatgtacaccaactgccaaaggaaaacctaaacatgtcgattcatctataatcaaagct

SEQ ID NO: 56406 - DNA, 2881 bp, Zea Mays
acactcctgaagtgcggaaatccaaagtgtgttgtgttgcgttgcctgaatgcctgcccgccgccaaaacccataaaccctaccctctacagcgcctccgtcgctgctcccggcggcgatggggggtgggccgcgcacgttcccgggcgggctgtctaagtggcagtacaaacgcatgcacgagaagctggcgcggcagaagcagcgggggctcctccgccacgagaagcagctctacctcgcccgcctccgctccgagatccgcgcctcccgcctccctggcgccgccgcggaagctccaccggggggcgaggggcccacctcgtcgcgcgcccacatccgcgcccttgccgaccgcttccgcaggcccggcgccgaggacctctggaacgaggacgacgggcccctccgccgcgtcaagcggccgcccactgggatcgcgtcgggtgtccggcaccagcagcagcagttggactcggggaagccccgcggaggaccgagttgggaggacctgacctctctggatcaaccgaggcctttagacaggggaaaagggccgacctcggccgcgttcaatccgagaagagagtacctaacggtggtggcgccctggtgcccgcgttgggatccgcgacctctcggtttcgttgctcccaaaaagtcttatccggtgatgactcgttgctccgtgagttgccagccatgtgtcgacctgaggccattggttgctagtgggcttactgaggatgggaatggaaggaaggacacgccattggcacagtttaatcaggagaggttctactcggtggctgcgaggcgattcggcaggaaatggagaccagattcgtcggaccaggatgacaagggcacgtctgcgcccaagaagaatctgaggaggaggtggagcagtgctgctctcaggaactgcgatgtgaagaaggaaaggcgggtgctcaagtcttacgaggaggaaagcaatgatctcgcgggtagaatccaagagctgcgagaggagattagaaatagggaggttttgggcactgagaggaggcgttacgagtccaggggtgaatctctgcttaccagtaaaagatttgatcagtgtggtgtctccgcgctgacagtcaaagcacttactgatgctggatatgtacagacaactgtggttcaagaggcagctcttcctatatgtcttgaaggtaaagatgttcttgtcaaggccaaaactggaaccggcaaaagtgcagcttttctgtcttgaatgctatgaagagcaatacaaatcagcgagtatctccaatatttgctcttgtcctatgccctacaagagagcttgctattcagcttacagctgaagcaaatgtcttgttaaagtaccatgaaggaattggtgttcaatctcttattggtggcactagattcaagcttgatcagagacgattagaatctgatccatgccagattttagttgcaacacctggtagactgctggatcacattgaaaacaaatcatcattctctgttcgtttgatgagattgaaattgcttgtgttggatgaagctgatcatttgctagatctgggtttccgtaaagacatagaaaagattgtcgataccttgccacgtcaaagacaaacattgctcttctcagctactattccaaaagaggttcgaagagtttcacagctagtattaaagagggatcacgtttttgttgacacagtgggccttggagctgttgaaaccccaactaagcagtcatgtcttgtggtgccacatgagctgcattttcatacggttcatcacctgcttcgagagcatattgatcgtgaagttgattacaaggttattgttttctgcacgacagccatggtgactgagtttatgtatatcatgcttcgagatttgaagttaaatgtcagggaaattcactcgaggaaacctcagctctatagaactcgcatatctgaagagttccggggctctaaccgcatagttctcgtaacgtcagatgtttctactcgtggggtgaactatccagatgtcacccttgtgattcaggttggtgttcctcccgatagagagcattacatccatcggcttggaaggactgcaagggaaggtaaatctggcaagggaattcttttgcttgcgccatgggaacaatacttcttggacgagataggcgatctcccgattgacaagtatccagcaccagacattgaccaggagatgaagcaaaaggttgacgattcaatagagatggttgacatgagcatcaaagaagcagcataccatgcgtggctgggttactacaactccatcgctgacataggtagagataaaagaatggttgttgacctagcaaatcgatttggtgcctcgattggcctggagaagcctccagcgatataccggaagaccgctctgaagatggggctcaaggatgtccctgggattcgaataaggaaatgacatgttcctccacagcaataagggaccttttagcctcgacattggattggaggacatgtaattgaattgggttcaaaatatacaaaattactcacctctgttgcaatggcctaactccttaaatgcatcttcgatttctttaactgctgtttctgtagcataaagacataattagtaaacacacaggatgctatcatcaacatactaacaaataataacaatataaaagaagtaaaagttaatcctagcagatcaacatttcaactaaaatacaggaagccataaaaaatgttgagctggaaaataaaatttagttttctgaaagctttagctttcaccatttcaaatatgtacaccaactgccaaaggaaaacctaaacatgtcgattcatctataatcaaagct

SEQ ID NO: 56407 - DNA, 2990 bp, Zea Mays
ctacactcctgaagtgcggaaatccaaagtgtgttgtgttgcgttgcctgaatgcctgcccgccgccaaaacccataaaccctaccctctacagcgcctccgtcgctgctcccggcggcgatggggggtgggccgcgcacgttcccgggcgggctgtctaagtggcagtacaaacgcatgcacgagaagctggcgcggcagaagcagcgggggctcctccgccacgagaagcagctctacctcgcccgcctccgctccgagatccgcgcctcccgcctccctggcgccgccgcggaagctccaccggggggcgaggggcccacctcgtcgcgcgcccacatccgcgcccttgccgaccgcttccgcaggcccggcgccgaggacctctggaacgaggacgacgggcccctccgccgcgtcaagcggccgcccactgggatcgcgtcgggtgtccggcaccagcagcagcagttggactcggggaagccccgcggaggaccgagttgggaggacctgacctctctggatcaaccgaggcctttagacaggggaaaagggccgacctcggccgcgttcaatccgagaagagagtacctaacggtggtggcgccctggtgcccgcgttgggatccgcgacctctcggtttcgttgctcccaaaaagtcttatccggtgatgactcgttgctccgtgagttgccagccatgtgtcgacctgaggccattggttgctagtgggcttactgaggatgggaatggaaggaaggacacgccattggcacagtttaatcaggagaggttctactcggtggctgcgaggcgattcggcaggaaatggagaccagattcgtcggaccaggatgacaagggcacgtctgcgcccaagaagaatctgaggttcggaaaaaagtttggggcttcgagcgaagaggattcagaaattgacgagtctggggacacaggtgccatcaggaggaggtggagcagtgctgctctcaggaactgcgatgtgaagaaggaaaggcgggtgctcaagtcttacgaggaggaaagcaatgatctcgcgggtagaatccaagagctgcgagaggagattagaaatagggaggttttgggcactgagaggaggcgttacgagtccaggggtgaatctctgcttaccagtaaaagatttgatcagtgtggtgtctccgcgctgacagtcaaagcacttactgatgctggatatgtacagacaactgtggttcaagaggcagctcttcctatatgtcttgaaggtaaagatgttcttgtcaaggccaaaactggaaccggcaaaagtgcagcttttctggtaaatgttcactcatgatatattagtcttgaatgctatgaagagcaatacaaatcagcgagtatctccaatatttgctcttgtcctatgccctacaagagagcttgctattcagcttacagctgaagcaaatgtcttgttaaagtaccatgaaggaattggtgttcaatctcttattggtggcactagattcaagcttgatcagagacgattagaatctgatccatgccagattttagttgcaacacctggtagactgctggatcacattgaaaacaaatcatcattctctgttcgtttgatgagattgaaattgcttgtgttggatgaagctgatcatttgctagatctgggtttccgtaaagacatagaaaagattgtcgataccttgccacgtcaaagacaaacattgctcttctcagctactattccaaaagaggttcgaagagtttcacagctagtattaaagagggatcacgtttttgttgacacagtgggccttggagctgttgaaaccccaactaaggttcagcagtcatgtcttgtggtgccacatgagctgcattttcatacggttcatcacctgcttcgagagcatattgatcgtgaagttgattacaaggttattgttttctgcacgacagccatggtgactgagtttatgtatatcatgcttcgagatttgaagttaaatgtcagggaaattcactcgaggaaacctcagctctatagaactcgcatatctgaagagttccggggctctaaccgcatagttctcgtaacgtcagatgtttctactcgtggggtgaactatccagatgtcacccttgtgattcaggttggtgttcctcccgatagagagcattacatccatcggcttggaaggactgcaagggaaggtaaatctggcaagggaattcttttgcttgcgccatgggaacaatacttcttggacgagataggcgatctcccgattgacaagtatccagcaccagacattgaccaggagatgaagcaaaaggttgacgattcaatagagatggttgacatgagcatcaaagaagcagcataccatgcgtggctgggttactacaactccatcgctgacataggtagagataaaagaatggttgttgacctagcaaatcgatttggtgcctcgattggcctggagaagcctccagcgatataccggaagaccgctctgaagatggggctcaaggatgtccctgggattcgaataaggaaatgacatgttcctccacagcaataagggaccttttagcctcgacattggattggaggacatgtaattgaattgggttcaaaatatacaaaattactcacctctgttgcaatggcctaactccttaaatgcatcttcgatttctttaactgctgtttctgtagcataaagacataattagtaaacacacaggatgctatcatcaacatactaacaaataataacaatataaaagaagtaaaagttaatcctagcagatcaacatttcaactaaaatacaggaagccataaaaaatgttgagctggaaaataaaatttagttttctgaaagctttagctttcaccatttcaaatatgtacaccaactgccaaaggaaaacctaaacatgtcgattcatctataatcaaagct

SEQ ID NO: 56408 - DNA, 2926 bp, Zea Mays
aaagcctactacactcctgaagtgcggaaatccaaagtgtgttgtgttgcgttgcctgaatgcctgcccgccgccaaaacccataaaccctaccctctacagcgcctccgtcgctgctcccggcggcgatggggggtgggccgcgcacgttcccgggcgggctgtctaagtggcagtacaaacgcatgcacgagaagctggcgcggcagaagcagcgggggctcctccgccacgagaagcagctctacctcgcccgcctccgctccgagatccgcgcctcccgcctccctggcgccgccgcggaagctccaccggggggcgaggggcccacctcgtcgcgcgcccacatccgcgcccttgccgaccgcttccgcaggcccggcgccgaggacctctggaacgaggacgacgggcccctccgccgcgtcaagcggccgcccactgggatcgcgtcgggtgtccggcaccagcagcagcagttggactcggggaagccccgcggaggaccgagttgggaggacctgacctctctggatcaaccgaggcctttagacaggggaaaagggccgacctcggccgcgttcaatccgagaagagagtacctaacggtggtggcgccctggtgcccgcgttgggatccgcgacctctcggtttcgttgctcccaaaaagtcttatccggtgatgactcgttgctccgtgagttgccagccatgtgtcgacctgaggccattggttgctagtgggcttactgaggatgggaatggaaggaaggacacgccattggcacagtttaatcaggagaggttctactcggtggctgcgaggcgattcggcaggaaatggagaccagattcgtcggaccaggatgacaagggcacgtctgcgcccaagaagaatctgaggtgccatcaggaggaggtggagcagtgctgctctcaggaactgcgatgtgaagaaggaaaggcgggtgctcaagtcttacgaggaggaaagcaatgatctcgcgggtagaatccaagagctgcgagaggagattagaaatagggaggttttgggcactgagaggaggcgttacgagtccaggggtgaatctctgcttaccagtaaaagatttgatcagtgtggtgtctccgcgctgacagtcaaagcacttactgatgctggatatgtacagacaactgtggttcaagaggcagctcttcctatatgtcttgaaggtaaagatgttcttgtcaaggccaaaactggaaccggcaaaagtgcagcttttctgcttcctgcaattgaatcagtcttgaatgctatgaagagcaatacaaatcagcgagtatctccaatatttgctcttgtcctatgccctacaagagagcttgctattcagcttacagctgaagcaaatgtcttgttaaagtaccatgaaggaattggtgttcaatctcttattggtggcactagattcaagcttgatcagagacgattagaatctgatccatgccagattttagttgcaacacctggtagactgctggatcacattgaaaacaaatcatcattctctgttcgtttgatgagattgaaattgcttgtgttggatgaagctgatcatttgctagatctgggtttccgtaaagacatagaaaagattgtcgataccttgccacgtcaaagacaaacattgctcttctcagctactattccaaaagaggttcgaagagtttcacagctagtattaaagagggatcacgtttttgttgacacagtgggccttggagctgttgaaaccccaactaaggttcagcagtcatgtcttgtggtgccacatgagctgcattttcatacggttcatcacctgcttcgagagcatattgatcgtgaagttgattacaaggttattgttttctgcacgacagccatggtgactgagtttatgtatatcatgcttcgagatttgaagttaaatgtcagggaaattcactcgaggaaacctcagctctatagaactcgcatatctgaagagttccggggctctaaccgcatagttctcgtaacgtcagatgtttctactcgtggggtgaactatccagatgtcacccttgtgattcaggttggtgttcctcccgatagagagcattacatccatcggcttggaaggactgcaagggaaggtaaatctggcaagggaattcttttgcttgcgccatgggaacaatacttcttggacgagataggcgatctcccgattgacaagtatccagcaccagacattgaccaggagatgaagcaaaaggttgacgattcaatagagatggttgacatgagcatcaaagaagcagcataccatgcgtggctgggttactacaactccatcgctgacataggtagagataaaagaatggttgttgacctagcaaatcgatttggtgcctcgattggcctggagaagcctccagcgatataccggaagaccgctctgaagatggggctcaaggatgtccctgggattcgaataaggaaatgacatgttcctccacagcaataagggaccttttagcctcgacattggattggaggacatgtaattgaattgggttcaaaatatacaaaattactcacctctgttgcaatggcctaactccttaaatgcatcttcgatttctttaactgctgtttctgtagcataaagacataattagtaaacacacaggatgctatcatcaacatactaacaaataataacaatataaaagaagtaaaagttaatcctagcagatcaacatttcaactaaaatacaggaagccataaaaaatgttgagctggaaaataaaatttagttttctgaaagctttagctttcaccatttcaaatatgtacaccaactgccaaaggaaaacctaaacatgtcgattcatctataatcaaagct

SEQ ID NO: 56409 - DNA, 2786 bp, Zea Mays
ggaaagcctactacactcctgaagtgcggaaatccaaagtgtgttgtgttgcgttgcctgaatgcctgcccgccgccaaaacccataaaccctaccctctacagcgcctccgtcgctgctcccggcggcgatggggggtgggccgcgcacgttcccgggcgggctgtctaagtggcagtacaaacgcatgcacgagaagctggcgcggcagaagcagcgggggctcctccgccacgagaagcagctctacctcgcccgcctccgctccgagatccgcgcctcccgcctccctggcgccgccgcggaagctccaccggggggcgaggggcccacctcgtcgcgcgcccacatccgcgcccttgccgaccgcttccgcaggcccggcgccgaggacctctggaacgaggacgacgggcccctccgccgcgtcaagcggccgcccactgggatcgcgtcgggtgtccggcaccagcagcagcagttggactcggggaagccccgcggaggaccgagttgggaggacctgacctctctggatcaaccgaggcctttagacaggggaaaagggccgacctcggccgcgttcaatccgagaagagagtacctaacggtggtggcgccctggtgcccgcgttgggatccgcgacctctcggtttcgttgctcccaaaaagtcttatccggtgatgactcgttgctccgtgagttgccagccatgtgtcgacctgaggccattggttgctagtgggcttactgaggatgggaatggaaggaaggacacgccattggcacagtttaatcaggagaggttctactcggtggctgcgaggcgattcggcaggaaatggagaccagattcgtcggaccaggatgacaagggcacgtctgcgcccaagaagaatctgaggttcggaaaaaagtttggggcttcgagcgaagaggattcagaaattgacgagtctggggacacaggtgccatcaggaggaggtggagcagtgctgctctcaggaactgcgatgtgaagaaggaaaggcgggtgctcaagtcttacgaggaggaaagcaatgatctcgcgggtagaatccaagagctgcgagaggagattagaaatagggaggttttgggcactgagaggaggcgttacgagtccaggggtgaatctctgcttaccagtaaaagatttgatcagtgtggtgtctccgcgctgacagtcaaagcacttactgatgctggatatgtacagacaactgtggttcaagaggcagctcttcctatatgtcttgaaggtaaagatgttcttgtcaaggccaaaactggaaccggcaaaagtgcagcttttctgcttcctgcaattgaatcagtcttgaatgctatgaagagcaatacaaatcagcgagtatctccaatatttgctcttgtcctatgccctacaagagagcttgctattcagcttacagctgaagcaaatgtcttgttaaagtaccatgaaggaattggtgttcaatctcttattggtggcactagattcaagcttgatcagagacgattagaatctgatccatgccaggttcgaagagtttcacagctagtattaaagagggatcacgtttttgttgacacagtgggccttggagctgttgaaaccccaactaaggttcagcagtcatgtcttgtggtgccacatgagctgcattttcatacggttcatcacctgcttcgagagcatattgatcgtgaagttgattacaaggttattgttttctgcacgacagccatggtgactgagtttatgtatatcatgcttcgagatttgaagttaaatgtcagggaaattcactcgaggaaacctcagctctatagaactcgcatatctgaagagttccggggctctaaccgcatagttctcgtaacgtcagatgtttctactcgtggggtgaactatccagatgtcacccttgtgattcaggttggtgttcctcccgatagagagcattacatccatcggcttggaaggactgcaagggaaggtaaatctggcaagggaattcttttgcttgcgccatgggaacaatacttcttggacgagataggcgatctcccgattgacaagtatccagcaccagacattgaccaggagatgaagcaaaaggttgacgattcaatagagatggttgacatgagcatcaaagaagcagcataccatgcgtggctgggttactacaactccatcgctgacataggtagagataaaagaatggttgttgacctagcaaatcgatttggtgcctcgattggcctggagaagcctccagcgatataccggaagaccgctctgaagatggggctcaaggatgtccctgggattcgaataaggaaatgacatgttcctccacagcaataagggaccttttagcctcgacattggattggaggacatgtaattgaattgggttcaaaatatacaaaattactcacctctgttgcaatggcctaactccttaaatgcatcttcgatttctttaactgctgtttctgtagcataaagacataattagtaaacacacaggatgctatcatcaacatactaacaaataataacaatataaaagaagtaaaagttaatcctagcagatcaacatttcaactaaaatacaggaagccataaaaaatgttgagctggaaaataaaatttagttttctgaaagctttagctttcaccatttcaaatatgtacaccaactgccaaaggaaaacctaaacatgtcgattcatctataatcaaagct

SEQ ID NO: 56410 - DNA, 1932 bp, Zea Mays
gatcaccacatcatgcaattcttggttcaatatcaaatgcatgttgcggagatggagacacttagggctggaatgcctcctgtttatgtaaaccacagtaatgatggtgggccagctgttagggatatacatatggagaacttcagtgtcactgttggtggtcgtgatctaattcaagaagccactataacacttgcttttgggaggcactatggacttgttggaagaaacgggactgggaagacatcttttctcagagcgatggcattgcatgcaattgatggtattcctaagaactgccagatattgcatgttgagcaagaggtcgtgggtgacgatacgacagctttgcagtgtgttctgaacgccgatgtcgaacgagttcaacttttgcaggaagaagctcgtcttgttcaacaacagaaagatttagagattgaggctgagtttgggcagagctctgacaagggcaaggatggttttgacaaagattctatcagcaagaggcttgaggagatatataaacggcttgagctcattgatgcggatgcagcagaggctcgcgcagcatcaattttggcgggtcttagttttactccagaaatgcaacgcaagcgtacaaaacaattttctggtggatggcgcatgagaatagctctagcacgtgctctgttcattgagcctgatttgctactacttgatgagccgacaaaccatcttgatcttcatgctgtgttatggctagaaacttatctcctgaagtggccaaagacattcattgttgtatcacacgcaagggagtttttgaatacggttgtcaccgatatccttcatctgcatggtagaaaactacatgcttacaaaggtgactatgacacatttgagaggacaagggaagagcaccttaagaatcagcagaaagcctttgaaacaaatgagaaggccagacagcacatgcagacattcattgacaagtttcggtacaatgcaaagagagcatcacttgttcaatcaagaatcaaggcattggagcgaatggaacatgttgatgcagttgtcagcgatccagactataaatttgaatttccaaccccagatgaccgccctgggccaccaatcatcagcttcagtgatgcctcatttggttaccctggagggcctaccttgtttaaaaatttgaattttggtatcgacctggacagccgcatagcaatggttggtcctaatggcattggcaagtccactatactgaaactaatttctggggatctgcagccaacttctggaacagtatttcgctctcccaaggttcgcatggctgtattcaatcagcatcatgttgatggccttgatttgacggtgaatccccttttgtacatgatgaagtgctatccgggtgtgccggagcagaagttgagggcacatctgggttcgtttggtgtttcgggaagccttgccctccaatctatgtacactttatcaggtggtcagaagagtagggttgcattcgcgaaaataaccttcaagaagccgcacatcattctccttgacgagccttctaaccatcttgatctggacgctgttgaggcgctcatccagggtttactcatttttcagggaggggtgctgatggtgagtcacgatgagcatcttatcactggaagcgtggacgagctttgggtggtgtcggaaggcagggtgaccccgttctcgggcactttcaaggactacaagaagatgctcaagtaacaaaaacatgtattatcgaccatagcctatatatctatatgcttgctattatgttgtattaccgtataaattttgggagtaaagcatcgaaattattataacacatacctaatgccgaaaggagaagatttctcacatttttagttcgacccatccgtccatcccataggatcctatttcgtt

SEQ ID NO: 56411 - DNA, 2169 bp, Zea Mays
tggactgctcggattctgtggttccttattttttttctttctgtctgcagtaagctttgtgaaaagtttggaaagcatggtctggtgaaaccgaaacaagctatgcgcagccttgtcacaccattacgaatgaatgcggggatggacgatgatgtcgctcccaaaaagccgcagcctgaagtattcgatggaccactgctgtcttcgcgcgataaagccaagattgaacggagaaaaagaaaagaggagaggcaaagagaggttcaatatcaaatgcatgttgcggagatggagacacttagggctggaatgcctcctgtttatgtaaaccacagtaatgatggtgggccagctgttagggatatacatatggagaacttcagtgtcactgttggtggtcgtgatctaattcaagaagccactataacacttgcttttgggaggcactatggacttgttggaagaaacgggactgggaagacatcttttctcagagcgatggcattgcatgcaattgatggtattcctaagaactgccagatattgcatgttgagcaagaggtcgtgggtgacgatacgacagctttgcagtgtgttctgaacgccgatgtcgaacgagttcaacttttgcaggaagaagctcgtcttgttcaacaacagaaagatttagagattgaggctgagtttgggcagagctctgacaagggcaaggatggttttgacaaagattctatcagcaagaggcttgaggagatatataaacggcttgagctcattgatgcggatgcagcagaggctcgcgcagcatcaattttggcgggtcttagttttactccagaaatgcaacgcaagcgtacaaaacaattttctggtggatggcgcatgagaatagctctagcacgtgctctgttcattgagcctgatttgctactacttgatgagccgacaaaccatcttgatcttcatgctgtgttatggctagaaacttatctcctgaagtggccaaagacattcattgttgtatcacacgcaagggagtttttgaatacggttgtcaccgatatccttcatctgcatggtagaaaactacatgcttacaaaggtgactatgacacatttgagaggacaagggaagagcaccttaagaatcagcagaaagcctttgaaacaaatgagaaggccagacagcacatgcagacattcattgacaagtttcggtacaatgcaaagagagcatcacttgttcaatcaagaatcaaggcattggagcgaatggaacatgttgatgcagttgtcagcgatccagactataaatttgaatttccaaccccagatgaccgccctgggccaccaatcatcagcttcagtgatgcctcatttggttaccctggagggcctaccttgtttaaaaatttgaattttggtatcgacctggacagccgcatagcaatggttggtcctaatggcattggcaagtccactatactgaaactaatttctggggatctgcagccaacttctggaacagtatttcgctctcccaaggttcgcatggctgtattcaatcagcatcatgttgatggccttgatttgacggtgaatccccttttgtacatgatgaagtgctatccgggtgtgccggagcagaagttgagggcacatctgggttcgtttggtgtttcgggaagccttgccctccaatctatgtacactttatcaggtggtcagaagagtagggttgcattcgcgaaaataaccttcaagaagccgcacatcattctccttgacgagccttctaaccatcttgatctggacgctgttgaggcgctcatccagggtttactcatttttcagggaggggtgctgatggtgagtcacgatgagcatcttatcactggaagcgtggacgagctttgggtggtgtcggaaggcagggtgaccccgttctcgggcactttcaaggactacaagaagatgctcaagtaacaaaaacatgtattatcgaccatagcctatatatctatatgcttgctattatgttgtattaccgtataaattttgggagtaaagcatcgaaattattataacacatacctaatgccgaaaggagaagatttctcacatttttagttcgacccatccgtccatcccataggatcctatttcgtt

SEQ ID NO: 56412 - DNA, 3655 bp, Zea Mays
ggaatatcaagcctcccagagctcgggtgggccctccggatgcgttggttgtggcttcaaaaaacagactccagtagaccttggacagggcttcctattcaggttccaagtaaagccagagctttcttcagtaaggtcctgatctctgaggttggaaatgggtatagtacccttttctggtctgataattggctgcagggtaaaagcatctcgaccattgcccctagtctgcattctataatcccaaagaggatagcaaaaagtagaacagtccatgaggcattgttaaacagaagatggatatctgacattagaggtagtctcactgttggagttttggcggattatttaaagctctgggattgtctctccgaaattgagctacaccccctcactgaagacaggcatatctttagtgtagccccagatggaaagtattcagctaaaacagcttacaagggcctcttcctgggttcctgctcatttggccactataagcgggtttggaaaacttgggctccagcaaaatgtcgtttcttcctctggctggtggctcataacaggtgctggactgctgacagattggaaaaaaggggctcattcatccaagcacctgtccattatgtgaccaagaacctgaatccattaaccacctactggtctcatgtgtgtttgcaaggagcttctggtataatctgctttgaaaatttgggttggataaccttgctccccaaccgggcctaacatcctttttggaatggtgggagacagcttctgaaacagttcatggaatgatcaagaatggattgagctcactgatctctttgggggcctggatgatctggaatcaccgtaatagatgtgtgtttgatggtcaaactcccactctcccatctatccttcggcaggcagacgacgagagaagactttgggaattagctggggccaagggtctctcctttttggcagcccctttgccggatggctgaccccctggttttccttcatctctagtagtgtttttgagtccggtttccatggattctttcgcttatgtgcgttactggcctccgtaaggagtcattgctgtaatctgtggtctattttagaccttattatctccttcttaatatatttaaggcgcagttcccctgcgctttcgagaaaaaaaaactttatctgcagatattactaaacaatttatatgcagaagttcgaattgttattccaaacatcgaaaatatatttatggtctctagacttgctcccgatttcccctcccccttgtccgccgcatcctggttcggattcgccgtcgcgctagggcaaacaggaaaggaagatggcggctgcggcggccgccagcatggtggtggtgcgggaggtcctgggcctcgatgtcgtcgacgaggtggaccagcccatcatcgactacatcgccaacgtcctcgccgacgaggacttcgacttcggggccccggaagggcacggcatcttcgaagcgctcggggagctcctcatcgactctgggtgcgtctctgaccaggagcactgccttcaggtctgcagtaagctttgtgaaaagtttggaaagcatggtctggtgaaaccgaaacaagctatgcgcagccttgtcacaccattacgaatgaatgcggggatggacgatgatgtcgctcccaaaaagccgcagcctgaagtattcgatggaccactgctgtcttcgcgcgataaagccaagattgaacggagaaaaagaaaagaggagaggcaaagagaggttcaatatcaaatgcatgttgcggagatggagacacttagggctggaatgcctcctgtttatgtaaaccacagtaatgatggtgggccagctgttagggatatacatatggagaacttcagtgtcactgttggtggtcgtgatctaattcaagaagccactataacacttgcttttgggaggcactatggacttgttggaagaaacgggactgggaagacatcttttctcagagcgatggcattgcatgcaattgatggtattcctaagaactgccagatattgcatgttgagcaagaggtcgtgggtgacgatacgacagctttgcagtgtgttctgaacgccgatgtcgaacgagttcaacttttgcaggaagaagctcgtcttgttcaacaacagaaagatttagagattgaggctgagtttgggcagagctctgacaagggcaaggatggttttgacaaagattctatcagcaagaggcttgaggagatatataaacggcttgagctcattgatgcggatgcagcagaggctcgcgcagcatcaattttggcgggtcttagttttactccagaaatgcaacgcaagcgtacaaaacaattttctggtggatggcgcatgagaatagctctagcacgtgctctgttcattgagcctgatttgctactacttgatgagccgacaaaccatcttgatcttcatgctgtgttatggctagaaacttatctcctgaagtggccaaagacattcattgttgtatcacacgcaagggagtttttgaatacggttgtcaccgatatccttcatctgcatggtagaaaactacatgcttacaaaggtgactatgacacatttgagaggacaagggaagagcaccttaagaatcagcagaaagcctttgaaacaaatgagaaggccagacagcacatgcagagagcatcacttgttcaatcaagaatcaaggcattggagcgaatggaacatgttgatgcagttgtcagcgatccagactataaatttgaatttccaaccccagatgaccgccctgggccaccaatcatcagcttcagtgatgcctcatttggttaccctggagggcctaccttgtttaaaaatttgaattttggtatcgacctggacagccgcatagcaatggttggtcctaatggcattggcaagtccactatactgaaactaatttctggggatctgcagccaacttctggaacagtatttcgctctcccaaggttcgcatggctgtattcaatcagcatcatgttgatggccttgatttgacggtgaatccccttttgtacatgatgaagtgctatccgggtgtgccggagcagaagttgagggcacatctgggttcgtttggtgtttcgggaagccttgccctccaatctatgtacactttatcaggtggtcagaagagtagggttgcattcgcgaaaataaccttcaagaagccgcacatcattctccttgacgagccttctaaccatcttgatctggacgctgttgaggcgctcatccagggtttactcatttttcagggaggggtgctgatggtgagtcacgatgagcatcttatcactggaagcgtggacgagctttgggtggtgtcggaaggcagggtgaccccgttctcgggcactttcaaggactacaagaagatgctcaagtaacaaaaacatgtattatcgaccatagcctatatatctatatgcttgctattatgttgtattaccgtataaattttgggagtaaagcatcgaaattattataacacatacctaatgccgaaaggagaagatttctcacatttttagttcgacccatccgtccatcccataggatcctatttcgtt

SEQ ID NO: 56413 - DNA, 1492 bp, Zea Mays
ttgacaccaggcattgacacaagcatcgagctaataaaaacactgagcagtgtctctgctggcaaattgttcatctacagatctatgttgagatagagagagcaagattgatcaaaaggcttgcaaaaattaaagaggagcagggacaaatttacgaggctgctgatttgatgcaagaagttgctgttgaaacatttggctctatggcaaagacggagaaaattgctttcattcttgagcaggtccggctatgcctggatcggcaagattttgtcagagcacaaattttatccaggaaaatcagtactagagtatttgacgcagatccatcaaaggaaaaaaagaaaccaaaggaaggtgacagtattgttcaggatgctcctgcagatattccttcccttctagaattgaagcgcgtctactacgaactgatgattcgttattactctcacaacaatgattacttggaaatctgccgttgttacaaggctatttatgatattccagcaataaaagaggatccaacaaagtggataccgattcttaggaagatctgttggtacttggtgctagcacctcatgatcctatgcaatcaagccttctcaatgctacactagaggataaaaacctttcagaaatcccaaatttcaggttattactgaagcagctggtcaccatggaggtgatacagtggacaagtctgtgggaattcttcaaggaggaatatgagaaggagaaggatcttcttgggggagctttgggtgccaaagcttcagaagatttgaggctgaggattatcgaacataatatcttggttgtatccaagtactatgcaagggttaccctcgagaggcttgctgatcttctttgcctgactttgcaggaggcagagaagcatctctcagacatggttaactcgaaatctctagtggcaaagatcgacaggccgatgggagttgtcagcttccggacgacccaagacagcaatggcacactgaactcatgggccacgagccttgagaagcttctggacctcgttgagaagagctgccacgagatacataaagagaccatgatccacaagacggcgttaaaagtttaactcttttggtttaggttttgaaacccgtgctgttcatgagttaccgtaacaggagggggggttttttgttgttgttgggcacggccagtgtccccgcaaatttgctttgactcgctgaatatttttcggattcctagatctgcaatcagatacctagtcctgaaaaaaaaaagtagatgcacctttttttttattaaaattcagttctccaggcttcagtctcggaaaagtagacaccttgtttgggcgagccactttgtaacgggcacaatcagaaatgcgttcccgttttcagcctggcccagaaacggttttccagacgttttttaaatttttttgtttaaaattttaaaaatctgaaaacgtttataaaaaactgaaaagaaaaa

SEQ ID NO: 56414 - DNA, 3145 bp, Zea Mays
gaaaagctcgcggggacaaactgctgtagcagtcgaatcgaatggaagcacgagtgcaggggctgggaattctacgtgccagcccaggaaggagggtgggtttccttaccgatcgagaggaggagaaggaggtgcgaatcaatccacgccccggctaacggggcgagcggcggcgcgggcagtgggggcggagaggcggcgcctgatctggagggagggagggagcgggcgggcttcgccgtgccgtgatcggcgcgggggggaccggggaaggtggtgggtggatgagtccgtgatagtggaagtggctgctagcgtggagaggaggtgtgaaccagcccagcccacacggcccaacccaaagcctgcaaaaaatggaaaagggtcccacatgtcggcgcgattttaccgtggacgactggagggggcgacggggacgaacgagacgaccgtatttgttatcggactgggaagcagcggcggtacaaagtgtgggagagaaaggagaagagacttgatgtcctcgcagtttgtccaatagatctcctcgccgcctcacccgtctcctcctccgcagcttccccgcgatcccgaccatggagggcgacggtaccaaccttgatgcggcgatagagtcgctcctgaatgtcgagaagcagatgaggctggccggagatgtcgccggcactcggaaggccgtcatcgacatcgtcgagctctgctacaaggccggcgcgtggaagacgctaaacgaccagatcgttctcctatctaagaggagaggccagcttaagcaggctattactgctatggttcagaaagcaatggagtacattgatttgacaccaggcattgacacaagcatcgagctaataaaaacactgagcagtgtctctgctggcaaaatctatgttgagatagagagagcaagattgatcaaaaggcttgcaaaaattaaagaggagcagggacaaatttacgaggctgctgatttgatgcaagaagttgctgtaagtttgccccgcactataattgaggacatgtaattccatattctgtgacaatgtttttgtcattctttagtaccgttcctcaattctcactatccatgactataatggactaacaagctgtttatcaggttgaaacatttggctctatggcaaagacggagaaaattgctttcattcttgagcaggtattccctccgttcttttttatttgtcgcggtttagttcaaaaatgaattagcgggcgacaaatatttgagaacggaggtagtactatggcaacctactatgttaatacttggtattcttactaaaatgtgtattcatgcaaaacttactattatcgttgtcacaggtccggctatgcctggatcggcaagattttgtcagagcacaaattttatccaggaaaatcagtactagagtatttgacgcagatccatcaaaggaaaaaaagaaaccaaaggaaggtgacagtattgttcaggatgctcctgcagatattccttcccttctagaattgaagcgcgtctactacgaactgatgattcggtatgtcatcgttagatcgtctacctgactgcttctggaaccgctaatctctttgttctatttaacgctatgcttcacaatgacattttatattggagccaatcataattattcgttgcattgttttcagatcatccgacttatcgcgattagtcagactgatcggtactctgcgctcgataagggtgtttgatttgattagggtggctgatcgtccatatcgtccgattaggcgacgatatggaacgatcgtttgggaaacgaatcagtctcgattaatcaggcacgggtagtccaactgtctgtttgactggactggcccattattaatagaggtagccgcccccagatcttcttgtctcttcatcttccatgccggctgggagaaaacacccttctcagttctctctttccagctcccttccctctcccttcttcacccttccctctccctccaaggctccaacacccttctctctacaccagctgggagaaaacacagggattggagatgagctcctcatctgaagttattactctcacaacaatgattacttggaaatctgccgttgttacaaggctatttatgatattccagcaataaaagaggatccaacaaagtggataccgattcttaggaagatctgttggtacttggtgctagcacctcatgatcctatgcaatcaagccttctcaatgctacactagaggataaaaacctttcagaaatcccaaatttcaggttattactgaagcagctggtcaccatggaggtgatacagtggacaagtctgtgggaattcttcaaggaggaatatgagaaggagaaggatcttcttgggggagctttgggtgccaaagcttcagaagatttgaggctgaggattatcgaacataatatcttggttgtatccaagtactatgcaagggttaccctcgagaggcttgctgatcttctttgcctgactttgcaggaggcagagaagcatctctcagacatggttaactcgaaatctctagtggcaaagatcgacaggccgatgggagttgtcagcttccggacgacccaagacagcaatggcacactgaactcatgggccacgagccttgagaagcttctggacctcgttgagaagagctgccacgagatacataaagagaccatgatccacaagacggcgttaaaagtttaactcttttggtttaggttttgaaacccgtgctgttcatgagttaccgtaacaggagggggggttttttgttgttgttgggcacggccagtgtccccgcaaatttgctttgactcgctgaatatttttcggattcctagatctgcaatcagatacctagtcctgaaaaaaaaaagtagatgcacctttttttttattaaaattcagttctccaggcttcagtctcggaaaagtagacaccttgtttgggcgagccactttgtaacgggcacaatcagaaatgcgttcccgttttcagcctggcccagaaacggttttccagacgttttttaaatttttttgtttaaaattttaaaaatctgaaaacgtttataaaaaactgaaaagaaaaa

SEQ ID NO: 56415 - DNA, 2277 bp, Zea Mays
gaaaagctcgcggggacaaactgctgtagcagtcgaatcgaatggaagcacgagtgcaggggctgggaattctacgtgccagcccaggaaggagggtgggtttccttaccgatcgagaggaggagaaggaggtgcgaatcaatccacgccccggctaacggggcgagcggcggcgcgggcagtgggggcggagaggcggcgcctgatctggagggagggagggagcgggcgggcttcgccgtgccgtgatcggcgcgggggggaccggggaaggtggtgggtggatgagtccgtgatagtggaagtggctgctagcgtggagaggaggtgtgaaccagcccagcccacacggcccaacccaaagcctgcaaaaaatggaaaagggtcccacatgtcggcgcgattttaccgtggacgactggagggggcgacggggacgaacgagacgaccgtatttgttatcggactgggaagcagcggcggtacaaagtgtgggagagaaaggagaagagacttgatgtcctcgcagtttgtccaatagatctcctcgccgcctcacccgtctcctcctccgcagcttccccgcgatcccgaccatggagggcgacggtaccaaccttgatgcggcgatagagtcgctcctgaatgtcgagaagcagatgaggctggccggagatgtcgccggcactcggaaggccgtcatcgacatcgtcgagctctgctacaaggccggcgcgtggaagacgctaaacgaccagatcgttctcctatctaagaggagaggccagcttaagcaggctattactgctatggttcagaaagcaatggagtacattgatttgacaccaggcattgacacaagcatcgagctaataaaaacactgagcagtgtctctgctggcaaaatctatgttgagatagagagagcaagattgatcaaaaggcttgcaaaaattaaagaggagcagggacaaatttacgaggctgctgatttgatgcaagaagttgctgttgaaacatttggctctatggcaaagacggagaaaattgctttcattcttgagcaggtccggctatgcctggatcggcaagattttgtcagagcacaaattttatccaggaaaatcagtactagagtatttgacgcagatccatcaaaggaaaaaaagaaaccaaaggaaggtgacagtattgttcaggatgctcctgcagatattccttcccttctagaattgaagcgcgtctactacgaactgatgattcgttattactctcacaacaatgattacttggaaatctgccgttgttacaaggctatttatgatattccagcaataaaagaggatccaacaaagtggataccgattcttaggaagatctgttggtacttggtgctagcacctcatgatcctatgcaatcaagccttctcaatgctacactagaggataaaaacctttcagaaatcccaaatttcagtggacaagtctgtgggaattcttcaaggaggaatatgagaaggagaaggatcttcttgggggagctttgggtgccaaagcttcagaagatttgaggctgaggattatcgaacataatatcttggttgtatccaagtactatgcaagggttaccctcgagaggcttgctgatcttctttgcctgactttgcaggaggcagagaagcatctctcagacatggttaactcgaaatctctagtggcaaagatcgacaggccgatgggagttgtcagcttccggacgacccaagacagcaatggcacactgaactcatgggccacgagccttgagaagcttctggacctcgttgagaagagctgccacgagatacataaagagaccatgatccacaagacggcgttaaaagtttaactcttttggtttaggttttgaaacccgtgctgttcatgagttaccgtaacaggagggggggttttttgttgttgttgggcacggccagtgtccccgcaaatttgctttgactcgctgaatatttttcggattcctagatctgcaatcagatacctagtcctgaaaaaaaaaagtagatgcacctttttttttattaaaattcagttctccaggcttcagtctcggaaaagtagacaccttgtttgggcgagccactttgtaacgggcacaatcagaaatgcgttcccgttttcagcctggcccagaaacggttttccagacgttttttaaatttttttgtttaaaattttaaaaatctgaaaacgtttataaaaaactgaaaagaaaaa

SEQ ID NO: 56416 - DNA, 2249 bp, Zea Mays
gaaaagctcgcggggacaaactgctgtagcagtcgaatcgaatggaagcacgagtgcaggggctgggaattctacgtgccagcccaggaaggagggtgggtttccttaccgatcgagaggaggagaaggaggtgcgaatcaatccacgccccggctaacggggcgagcggcggcgcgggcagtgggggcggagaggcggcgcctgatctggagggagggagggagcgggcgggcttcgccgtgccgtgatcggcgcgggggggaccggggaaggtggtgggtggatgagtccgtgatagtggaagtggctgctagcgtggagaggaggtgtgaaccagcccagcccacacggcccaacccaaagcctgcaaaaaatggaaaagggtcccacatgtcggcgcgattttaccgtggacgactggagggggcgacggggacgaacgagacgaccgtatttgttatcggactgggaagcagcggcggtacaaagtgtgggagagaaaggagaagagacttgatgtcctcgcagtttgtccaatagatctcctcgccgcctcacccgtctcctcctccgcagcttccccgcgatcccgaccatggagggcgacggtaccaaccttgatgcggcgatagagtcgctcctgaatgtcgagaagcagatgaggctggccggagatgtcgccggcactcggaaggccgtcatcgacatcgtcgagctctgctacaaggccggcgcgtggaagacgctaaacgaccagatcgttctcctatctaagaggagaggccagcttaagcaggctattactgctatggttcagaaagcaatggagtacattgatttgacaccaggcattgacacaagcatcgagctaataaaaacactgagcagtgtctctgctggcaaaatctatgttgagatagagagagcaagattgatcaaaaggcttgcaaaaattaaagaggagcagggacaaatttacgaggctgctgatttgatgcaagaagttgctgttgaaacatttggctctatggcaaagacggagaaaattgctttcattcttgagcaggtccggctatgcctggatcggcaagattttgtcagagcacaaattttatccaggaaaatcagtactagagtatttgacgcagatccatcaaaggaaaaaaagaaaccaaaggaaggtgacagtattgttcaggatgctcctgcagatattccttcccttctagaattgaagcgcgtctactacgaactgatgattcgcaataaaagaggatccaacaaagtggataccgattcttaggaagatctgttggtacttggtgctagcacctcatgatcctatgcaatcaagccttctcaatgctacactagaggataaaaacctttcagaaatcccaaatttcaggttattactgaagcagctggtcaccatggaggtgatacagtggacaagtctgtgggaattcttcaaggaggaatatgagaaggagaaggatcttcttgggggagctttgggtgccaaagcttcagaagatttgaggctgaggattatcgaacataatatcttggttgtatccaagtactatgcaagggttaccctcgagaggcttgctgatcttctttgcctgactttgcaggaggcagagaagcatctctcagacatggttaactcgaaatctctagtggcaaagatcgacaggccgatgggagttgtcagcttccggacgacccaagacagcaatggcacactgaactcatgggccacgagccttgagaagcttctggacctcgttgagaagagctgccacgagatacataaagagaccatgatccacaagacggcgttaaaagtttaactcttttggtttaggttttgaaacccgtgctgttcatgagttaccgtaacaggagggggggttttttgttgttgttgggcacggccagtgtccccgcaaatttgctttgactcgctgaatatttttcggattcctagatctgcaatcagatacctagtcctgaaaaaaaaaagtagatgcacctttttttttattaaaattcagttctccaggcttcagtctcggaaaagtagacaccttgtttgggcgagccactttgtaacgggcacaatcagaaatgcgttcccgttttcagcctggcccagaaacggttttccagacgttttttaaatttttttgtttaaaattttaaaaatctgaaaacgtttataaaaaactgaaaagaaaaa

SEQ ID NO: 56417 - DNA, 2028 bp, Zea Mays
ctctctaacaatactaatactactgcatcaatgtttgtatgtatagagagagcgcaccttatattataggtatagaataaaaagtggttacgccttatattatgggacagagggagtatctagctagctagttagttattgtgtgtgttgctcacctcagtacttctgcctgttcctttgccgccttgctctgcagggagatacccaaggaggtttacaacaacttggacactggcagccaggatgagaaatggtgggagggagtggacctccaaaagctcattctggctcacaataatcttgaggtgttaagagaagaccttaggaacttgtcttcgcttgttgttctaaatataagtcacaacaagatatcttcccttccagcagctatcggagaggttgacttctcaaacaattgccttactgagcttccacctaacctcgccacatgcccggacttgtccgaactcaaggcatcaaacaacaacatatccagagtaccagatgtacttgctggctgttccaagttaagtaaattggatctagagggtaacaagcttgtggcactttctgaaaacatgtttgtgtcatggacaatgctcacagaattgaatctcgcaaagaatctacttacagccatcccaggtagcattggagcacttccaaaactaatccgcttggacatgcatcagaataaaataacatcgattcccccttccataaaaggttgctcttcgctagccgagttgtatatgggctaaaggagtatccagttggagcctgcaacctcaaattatctttccttgatctatcaaataactcattatctggtctaccagctgaactaggtaaaatgactaccctaagaaagcttctgcttactggaaatcctatgaggacacttaggagttcattggtttctggaccaacaacaacattgctgaagtatctgcgcagccggctttcatccgatgaggaaggatccagaagcaccccaactaaagatgaccaaattgctgcagcaaggcgcttgtccttatcttcaaaggaactggacttgagtggccttggagtgaccagtgtaccagctgccgcgtgggagacaagtgatgtggtgaaactggatctttctaaaaattcaatagaagatctaccaaatgagttgtcattatgctcatcacttcaatccttagttttgtctaataacaagataaaaaggtggcctcacacagtggtttcctcccttccctgtctgtcttccttaaagctggacaataaccccttggtagagatatcatccactgatcttgtgcctctgtccaaacttgaagtacttgatctaagtggcaatgcttcagcacttcctgaaccttctgcagtttctgcattaccacagctgcaagagctttacctaagacgaatgaaactccatgaatttcctaatggtttgctgggcctaaaactgcttaggattcttgacctgagtcagaatcaccttacaactgtgccggagggcatcaagaatttcactgcactcattgagcttgatctgtctgacaacaatataacagcactcccagcggagctgggattgcttgaagctaacctgcaagtgctgaaactggatggaaatccgctaagaagcataagacgaactctgttggagcgaggaacgaaagcagttctcaagtacctcaaagaaaaattgccgtctgaataatatttatagaacaaactattgttggagtaatggaataaaatgtttttttgccactgtatctcagttttctggactgaattttgtgcaaaagtatctggaccttgtgtgagaagagagctttgtgagtgtgttgttggatatactggttatagtccacatgttttattggaacaaaaatattttctctgttcaatctttacatggacacaacctggaaagatgttatccaccgttgtatcgttcatagatcgtcaacgactacaccagccagcggaatttggaaaaaaggtttcacgtcggaatcatct

SEQ ID NO: 56418 - DNA, 2211 bp, Zea Mays
ctctctaacaatactaatactactgcatcaatgtttgtatgtatagagagagcgcaccttatattataggtatagaataaaaagtggttacgccttatattatgggacagagggagtatctagctagctagttagttattgtgtgtgttgctcacctcagtacttctgcctgttcctttgccgccttgctctgcagggagatacccaaggaggtttacaacaacttggacactggcagccaggatgagaaatggtgggagggagtggacctccaaaagctcattctggctcacaataatcttgaggtgttaagagaagaccttaggaacttgtcttcgcttgttgttctaaatataagtcacaacaagatatcttcccttccagcagctatcggagatctcccgttgctaaaatcactggacatgtctttcaatcaaataaacactctgcccgaagagattgggcctggctactgctttagtcaaggttgacttctcaaacaattgccttactgagcttccacctaacctcgccacatgcccggacttgtccgaactcaaggcatcaaacaacaacatatccagagtaccagatgtacttgctggctgttccaagttaagtaaattggatctagagggtaacaagcttgtggcactttctgaaaacatgtttgtgtcatggacaatgctcacagaattgaatctcgctcgttacagcaaagaatctacttacagccatcccaggtagcattggagcacttccaaaactaatccgcttggacatgcatcagaataaaataacatcgattcccccttccataaaaggttgctcttcgctagccgagttgtatatgggaaataacttattgtcttcaataccagctgatattggcacgttatcaaagttaggcatacttgatctccattctaatcagctaaaggagtatccagttggagcctgcaacctcaaattatctttccttgatctatcaaataactcattatctggtctaccagctgaactaggtaaaatgactaccctaagaaagcttctgcttactggaaatcctatgaggacacttaggagttcattggtttctggaccaacaacaacattgctgaagtatctgcgcagccggctttcatccgatgaggaagcatcaggatccagaagcaccccaactaaagatgaccaaattgctgcagcaaggcgcttgtccttatcttcaaaggaactggacttgagtggccttggagtgaccagtgtaccagctgccgcgtgggagacaagtgatgtggtgaaactggatctttctaaaaattcaatagaagatctaccaaatgagttgtcattatgctcatcacttcaatccttagttttgtctaataacaagataaaaaggtggcctcacacagtggtttcctcccttccctgtctgtcttccttaaagctggacaataaccccttggtagagatatcatccactgatcttgtgcctctgtccaaacttgaagtacttgatctaagtggcaatgcttcagcacttcctgaaccttctgcagtttctgcattaccacagctgcaagagctttacctaagacgaatgaaactccatgaatttcctaatggtttgctgggcctaaaactgcttaggattcttgacctgagtcagaatcaccttacaactgtgccggagggcatcaagaatttcactgcactcattgagcttgatctgtctgacaacaatataacagcactcccagcggagctgggattgcttgaagctaacctgcaagtgctgaaactggatggaaatccgctaagaagcataagacgaactctgttggagcgaggaacgaaagcagttctcaagtacctcaaagaaaaattgccgtctgaataatatttatagaacaaactattgttggagtaatggaataaaatgtttttttgccactgtatctcagttttctggactgaattttgtgcaaaagtatctggaccttgtgtgagaagagagctttgtgagtgtgttgttggatatactggttatagtccacatgttttattggaacaaaaatattttctctgttcaatctttacatggacacaacctggaaagatgttatccaccgttgtatcgttcatagatcgtcaacgactacaccagccagcggaatttggaaaaaaggtttcacgtcggaatcatct

SEQ ID NO: 56419 - DNA, 2123 bp, Zea Mays
ctctctaacaatactaatactactgcatcaatgtttgtatgtatagagagagcgcaccttatattataggtatagaataaaaagtggttacgccttatattatgggacagagggagtatctagctagctagttagttattgtgtgtgttgctcacctcagtacttctgcctgttcctttgccgccttgctctgcagggagatacccaaggaggtttacaacaacttggacactggcagccaggatgagaaatggtgggagggagtggacctccaaaagctcattctggctcacaataatcttgaggtgttaagagaagaccttaggaacttgtcttcgcttgttgttctaaatataagtcacaacaagatatcttcccttccagcagctatcggagaggttgacttctcaaacaattgccttactgagcttccacctaacctcgccacatgcccggacttgtccgaactcaaggcatcaaacaacaacatatccagagtaccagatgtacttgctggctgttccaagttaagtaaattggatctagagggtaacaagcttgtggcactttctgaaaacatgtttgtgtcatggacaatgctcacagaattgaatctcgctcgttacagcaaagaatctacttacagccatcccaggtagcattggagcacttccaaaactaatccgcttggacatgcatcagaataaaataacatcgattcccccttccataaaaggttgctcttcgctagccgagttgtatatgggaaataacttattgtcttcaataccagctgatattggcacgttatcaaagttaggcatacttgatctccattctaatcagctaaaggagtatccagttggagcctgcaacctcaaattatctttccttgatctatcaaataactcattatctggtctaccagctgaactaggtaaaatgactaccctaagaaagcttctgcttactggaaatcctatgaggacacttaggagttcattggtttctggaccaacaacaacattgctgaagtatctgcgcagccggctttcatccgatgaggaagcatcaggatccagaagcaccccaactaaagatgaccaaattgctgcagcaaggcgcttgtccttatcttcaaaggaactggacttgagtggccttggagtgaccagtgtaccagctgccgcgtgggagacaagtgatgtggtgaaactggatctttctaaaaattcaatagaagatctaccaaatgagttgtcattatgctcatcacttcaatccttagttttgtctaataacaagataaaaaggtggcctcacacagtggtttcctcccttccctgtctgtcttccttaaagctggacaataaccccttggtagagatatcatccactgatcttgtgcctctgtccaaacttgaagtacttgatctaagtggcaatgcttcagcacttcctgaaccttctgcagtttctgcattaccacagctgcaagagctttacctaagacgaatgaaactccatgaatttcctaatggtttgctgggcctaaaactgcttaggattcttgacctgagtcagaatcaccttacaactgtgccggagggcatcaagaatttcactgcactcattgagcttgatctgtctgacaacaatataacagcactcccagcggagctgggattgcttgaagctaacctgcaagtgctgaaactggatggaaatccgctaagaagcataagacgaactctgttggagcgaggaacgaaagcagttctcaagtacctcaaagaaaaattgccgtctgaataatatttatagaacaaactattgttggagtaatggaataaaatgtttttttgccactgtatctcagttttctggactgaattttgtgcaaaagtatctggaccttgtgtgagaagagagctttgtgagtgtgttgttggatatactggttatagtccacatgttttattggaacaaaaatattttctctgttcaatctttacatggacacaacctggaaagatgttatccaccgttgtatcgttcatagatcgtcaacgactacaccagccagcggaatttggaaaaaaggtttcacgtcggaatcatct

SEQ ID NO: 56420 - DNA, 2099 bp, Zea Mays
ctctctaacaatactaatactactgcatcaatgtttgtatgtatagagagagcgcaccttatattataggtatagaataaaaagtggttacgccttatattatgggacagagggagtatctagctagctagttagttattgtgtgtgttgctcacctcagtacttctgcctgttcctttgccgccttgctctgcagggagatacccaaggaggtttacaacaacttggacactggcagccaggatgagaaatggtgggagggagtggacctccaaaagctcattctggctcacaataatcttgaggtgttaagagaagaccttaggaacttgtcttcgcttgttgttctaaatataagtcacaacaagatatcttcccttccagcagctatcggagatctcccgttgctaaaatcactggacatgtctttcaatcaaataaacactctgcccgaagagattgggcctggctactgctttagtcaaggttgacttctcaaacaattgccttactgagcttccacctaacctcgccacatgcccggacttgtccgaactcaaggcatcaaacaacaacatatccagagtaccagatgtacttgctggctgttccaagttaagtaaattggatctagagggtaacaagcttgtggcactttctgaaaacatgtttgtgtcatggacaatgctcacagaattgaatctcgctcgttacagcaaagaatctacttacagccatcccagaaataacttattgtcttcaataccagctgatattggcacgttatcaaagttaggcatacttgatctccattctaatcagctaaaggagtatccagttggagcctgcaacctcaaattatctttccttgatctatcaaataactcattatctggtctaccagctgaactaggtaaaatgactaccctaagaaagcttctgcttactggaaatcctatgaggacacttaggagttcattggtttctggaccaacaacaacattgctgaagtatctgcgcagccggctttcatccgatgaggaagcatcaggatccagaagcaccccaactaaagatgaccaaattgctgcagcaaggcgcttgtccttatcttcaaaggaactggacttgagtggccttggagtgaccagtgtaccagctgccgcgtgggagacaagtgatgtggtgaaactggatctttctaaaaattcaatagaagatctaccaaatgagttgtcattatgctcatcacttcaatccttagttttgtctaataacaagataaaaaggtggcctcacacagtggtttcctcccttccctgtctgtcttccttaaagctggacaataaccccttggtagagatatcatccactgatcttgtgcctctgtccaaacttgaagtacttgatctaagtggcaatgcttcagcacttcctgaaccttctgcagtttctgcattaccacagctgcaagagctttacctaagacgaatgaaactccatgaatttcctaatggtttgctgggcctaaaactgcttaggattcttgacctgagtcagaatcaccttacaactgtgccggagggcatcaagaatttcactgcactcattgagcttgatctgtctgacaacaatataacagcactcccagcggagctgggattgcttgaagctaacctgcaagtgctgaaactggatggaaatccgctaagaagcataagacgaactctgttggagcgaggaacgaaagcagttctcaagtacctcaaagaaaaattgccgtctgaataatatttatagaacaaactattgttggagtaatggaataaaatgtttttttgccactgtatctcagttttctggactgaattttgtgcaaaagtatctggaccttgtgtgagaagagagctttgtgagtgtgttgttggatatactggttatagtccacatgttttattggaacaaaaatattttctctgttcaatctttacatggacacaacctggaaagatgttatccaccgttgtatcgttcatagatcgtcaacgactacaccagccagcggaatttggaaaaaaggtttcacgtcggaatcatct

SEQ ID NO: 56421 - DNA, 2195 bp, Zea Mays
ctctctaacaatactaatactactgcatcaatgtttgtatgtatagagagagcgcaccttatattataggtatagaataaaaagtggttacgccttatattatgggacagagggagtatctagctagctagttagttattgtgtgtgttgctcacctcagtacttctgcctgttcctttgccgccttgctctgcagggagatacccaaggaggtttacaacaacttggacactggcagccaggatgagaaatggtgggagggagtggacctccaaaagctcattctggctcacaataatcttgaggtgttaagagaagaccttaggaacttgtcttcgcttgttgttctaaatataagtcacaacaagatatcttcccttccagcagctatcggagatctcccgttgctaaaatcactggacatgtctttcaatcaaataaacactctgcccgaagagattgggcctggctactgctttagtcaaggttgacttctcaaacaattgccttactgagcttccacctaacctcgccacatgcccggacttgtccgaactcaaggcatcaaacaacaacatatccagagtaccagatgtacttgctggctgttccaagttaagtaaattggatctagagggtaacaagcttgtggcactttctgaaaacatgtttgtgtcatggacaatgctcacagaattgaatctcgcaaagaatctacttacagccatcccaggtagcattggagcacttccaaaactaatccgcttggacatgcatcagaataaaataacatcgattcccccttccataaaaggttgctcttcgctagccgagttgtatatgggaaataacttattgtcttcaataccagctgatattggcacgttatcaaagttaggcatacttgatctccattctaatcagctaaaggagtatccagttggagcctgcaacctcaaattatctttccttgatctatcaaataactcattatctggtctaccagctgaactaggtaaaatgactaccctaagaaagcttctgcttactggaaatcctatgaggacacttaggagttcattggtttctggaccaacaacaacattgctgaagtatctgcgcagccggctttcatccgatgaggaaggatccagaagcaccccaactaaagatgaccaaattgctgcagcaaggcgcttgtccttatcttcaaaggaactggacttgagtggccttggagtgaccagtgtaccagctgccgcgtgggagacaagtgatgtggtgaaactggatctttctaaaaattcaatagaagatctaccaaatgagttgtcattatgctcatcacttcaatccttagttttgtctaataacaagataaaaaggtggcctcacacagtggtttcctcccttccctgtctgtcttccttaaagctggacaataaccccttggtagagatatcatccactgatcttgtgcctctgtccaaacttgaagtacttgatctaagtggcaatgcttcagcacttcctgaaccttctgcagtttctgcattaccacagctgcaagagctttacctaagacgaatgaaactccatgaatttcctaatggtttgctgggcctaaaactgcttaggattcttgacctgagtcagaatcaccttacaactgtgccggagggcatcaagaatttcactgcactcattgagcttgatctgtctgacaacaatataacagcactcccagcggagctgggattgcttgaagctaacctgcaagtgctgaaactggatggaaatccgctaagaagcataagacgaactctgttggagcgaggaacgaaagcagttctcaagtacctcaaagaaaaattgccgtctgaataatatttatagaacaaactattgttggagtaatggaataaaatgtttttttgccactgtatctcagttttctggactgaattttgtgcaaaagtatctggaccttgtgtgagaagagagctttgtgagtgtgttgttggatatactggttatagtccacatgttttattggaacaaaaatattttctctgttcaatctttacatggacacaacctggaaagatgttatccaccgttgtatcgttcatagatcgtcaacgactacaccagccagcggaatttggaaaaaaggtttcacgtcggaatcatct

SEQ ID NO: 56422 - DNA, 2089 bp, Zea Mays
ctctctaacaatactaatactactgcatcaatgtttgtatgtatagagagagcgcaccttatattataggtatagaataaaaagtggttacgccttatattatgggacagagggagtatctagctagctagttagttattgtgtgtgttgctcacctcagtacttctgcctgttcctttgccgccttgctctgcagggagatacccaaggaggtttacaacaacttggacactggcagccaggatgagaaatggtgggagggagtggacctccaaaagctcattctggctcacaataatcttgaggtgttaagagaagaccttaggaacttgtcttcgcttgttgttctaaatataagtcacaacaagatatcttcccttccagcagctatcggagatctcccgttgctaaaatcactggacatgtctttcaatcaaataaacactctgcccgaagagattgggcctggctactgctttagtcaaggttgacttctcaaacaattgccttactgagcttccacctaacctcgccacatgcccggacttgtccgaactcaaggcatcaaacaacaacatatccagagtaccagatgtacttgctggctgttccaagttaagtaaattggatctagagggtaacaagcttgtggcactttctgaaaacatgtttgtgtcatggacaatgctcacagaattgaatctcgcaaagaatctacttacagccatcccagaaataacttattgtcttcaataccagctgatattggcacgttatcaaagttaggcatacttgatctccattctaatcagctaaaggagtatccagttggagcctgcaacctcaaattatctttccttgatctatcaaataactcattatctggtctaccagctgaactaggtaaaatgactaccctaagaaagcttctgcttactggaaatcctatgaggacacttaggagttcattggtttctggaccaacaacaacattgctgaagtatctgcgcagccggctttcatccgatgaggaagcatcaggatccagaagcaccccaactaaagatgaccaaattgctgcagcaaggcgcttgtccttatcttcaaaggaactggacttgagtggccttggagtgaccagtgtaccagctgccgcgtgggagacaagtgatgtggtgaaactggatctttctaaaaattcaatagaagatctaccaaatgagttgtcattatgctcatcacttcaatccttagttttgtctaataacaagataaaaaggtggcctcacacagtggtttcctcccttccctgtctgtcttccttaaagctggacaataaccccttggtagagatatcatccactgatcttgtgcctctgtccaaacttgaagtacttgatctaagtggcaatgcttcagcacttcctgaaccttctgcagtttctgcattaccacagctgcaagagctttacctaagacgaatgaaactccatgaatttcctaatggtttgctgggcctaaaactgcttaggattcttgacctgagtcagaatcaccttacaactgtgccggagggcatcaagaatttcactgcactcattgagcttgatctgtctgacaacaatataacagcactcccagcggagctgggattgcttgaagctaacctgcaagtgctgaaactggatggaaatccgctaagaagcataagacgaactctgttggagcgaggaacgaaagcagttctcaagtacctcaaagaaaaattgccgtctgaataatatttatagaacaaactattgttggagtaatggaataaaatgtttttttgccactgtatctcagttttctggactgaattttgtgcaaaagtatctggaccttgtgtgagaagagagctttgtgagtgtgttgttggatatactggttatagtccacatgttttattggaacaaaaatattttctctgttcaatctttacatggacacaacctggaaagatgttatccaccgttgtatcgttcatagatcgtcaacgactacaccagccagcggaatttggaaaaaaggtttcacgtcggaatcatct

SEQ ID NO: 56423 - DNA, 2034 bp, Zea Mays
ctctctaacaatactaatactactgcatcaatgtttgtatgtatagagagagcgcaccttatattataggtatagaataaaaagtggttacgccttatattatgggacagagggagtatctagctagctagttagttattgtgtgtgttgctcacctcagtacttctgcctgttcctttgccgccttgctctgcagggagatacccaaggaggtttacaacaacttggacactggcagccaggatgagaaatggtgggagggagtggacctccaaaagctcattctggctcacaataatcttgaggtgttaagagaagaccttaggaacttgtcttcgcttgttgttctaaatataagtcacaacaagatatcttcccttccagcagctatcggagaggttgacttctcaaacaattgccttactgagcttccacctaacctcgccacatgcccggacttgtccgaactcaaggcatcaaacaacaacatatccagagtaccagatgtacttgctggctgttccaagttaagtaaattggatctagagggtaacaagcttgtggcactttctgaaaacatgtttgtgtcatggacaatgctcacagaattgaatctcgcaaagaatctacttacagccatcccaggtagcattggagcacttccaaaactaatccgcttggacatgcatcagaataaaataacatcgattcccccttccataaaaggttgctcttcgctagccgagttgtatatgggctaaaggagtatccagttggagcctgcaacctcaaattatctttccttgatctatcaaataactcattatctggtctaccagctgaactaggtaaaatgactaccctaagaaagcttctgcttactggaaatcctatgaggacacttaggagttcattggtttctggaccaacaacaacattgctgaagtatctgcgcagccggctttcatccgatgaggaagcatcaggatccagaagcaccccaactaaagatgaccaaattgctgcagcaaggcgcttgtccttatcttcaaaggaactggacttgagtggccttggagtgaccagtgtaccagctgccgcgtgggagacaagtgatgtggtgaaactggatctttctaaaaattcaatagaagatctaccaaatgagttgtcattatgctcatcacttcaatccttagttttgtctaataacaagataaaaaggtggcctcacacagtggtttcctcccttccctgtctgtcttccttaaagctggacaataaccccttggtagagatatcatccactgatcttgtgcctctgtccaaacttgaagtacttgatctaagtggcaatgcttcagcacttcctgaaccttctgcagtttctgcattaccacagctgcaagagctttacctaagacgaatgaaactccatgaatttcctaatggtttgctgggcctaaaactgcttaggattcttgacctgagtcagaatcaccttacaactgtgccggagggcatcaagaatttcactgcactcattgagcttgatctgtctgacaacaatataacagcactcccagcggagctgggattgcttgaagctaacctgcaagtgctgaaactggatggaaatccgctaagaagcataagacgaactctgttggagcgaggaacgaaagcagttctcaagtacctcaaagaaaaattgccgtctgaataatatttatagaacaaactattgttggagtaatggaataaaatgtttttttgccactgtatctcagttttctggactgaattttgtgcaaaagtatctggaccttgtgtgagaagagagctttgtgagtgtgttgttggatatactggttatagtccacatgttttattggaacaaaaatattttctctgttcaatctttacatggacacaacctggaaagatgttatccaccgttgtatcgttcatagatcgtcaacgactacaccagccagcggaatttggaaaaaaggtttcacgtcggaatcatct

SEQ ID NO: 56424 - DNA, 2113 bp, Zea Mays
ctctctaacaatactaatactactgcatcaatgtttgtatgtatagagagagcgcaccttatattataggtatagaataaaaagtggttacgccttatattatgggacagagggagtatctagctagctagttagttattgtgtgtgttgctcacctcagtacttctgcctgttcctttgccgccttgctctgcagggagatacccaaggaggtttacaacaacttggacactggcagccaggatgagaaatggtgggagggagtggacctccaaaagctcattctggctcacaataatcttgaggtgttaagagaagaccttaggaacttgtcttcgcttgttgttctaaatataagtcacaacaagatatcttcccttccagcagctatcggagaggttgacttctcaaacaattgccttactgagcttccacctaacctcgccacatgcccggacttgtccgaactcaaggcatcaaacaacaacatatccagagtaccagatgtacttgctggctgttccaagttaagtaaattggatctagagggtaacaagcttgtggcactttctgaaaacatgtttgtgtcatggacaatgctcacagaattgaatctcgcaaagaatctacttacagccatcccaggtagcattggagcacttccaaaactaatccgcttggacatgcatcagaataaaataacatcgattcccccttccataaaaggttgctcttcgctagccgagttgtatatgggaaataacttattgtcttcaataccagctgatattggcacgttatcaaagttaggcatacttgatctccattctaatcagctaaaggagtatccagttggagcctgcaacctcaaattatctttccttgatctatcaaataactcattatctggtctaccagctgaactaggtaaaatgactaccctaagaaagcttctgcttactggaaatcctatgaggacacttaggagttcattggtttctggaccaacaacaacattgctgaagtatctgcgcagccggctttcatccgatgaggaagcatcaggatccagaagcaccccaactaaagatgaccaaattgctgcagcaaggcgcttgtccttatcttcaaaggaactggacttgagtggccttggagtgaccagtgtaccagctgccgcgtgggagacaagtgatgtggtgaaactggatctttctaaaaattcaatagaagatctaccaaatgagttgtcattatgctcatcacttcaatccttagttttgtctaataacaagataaaaaggtggcctcacacagtggtttcctcccttccctgtctgtcttccttaaagctggacaataaccccttggtagagatatcatccactgatcttgtgcctctgtccaaacttgaagtacttgatctaagtggcaatgcttcagcacttcctgaaccttctgcagtttctgcattaccacagctgcaagagctttacctaagacgaatgaaactccatgaatttcctaatggtttgctgggcctaaaactgcttaggattcttgacctgagtcagaatcaccttacaactgtgccggagggcatcaagaatttcactgcactcattgagcttgatctgtctgacaacaatataacagcactcccagcggagctgggattgcttgaagctaacctgcaagtgctgaaactggatggaaatccgctaagaagcataagacgaactctgttggagcgaggaacgaaagcagttctcaagtacctcaaagaaaaattgccgtctgaataatatttatagaacaaactattgttggagtaatggaataaaatgtttttttgccactgtatctcagttttctggactgaattttgtgcaaaagtatctggaccttgtgtgagaagagagctttgtgagtgtgttgttggatatactggttatagtccacatgttttattggaacaaaaatattttctctgttcaatctttacatggacacaacctggaaagatgttatccaccgttgtatcgttcatagatcgtcaacgactacaccagccagcggaatttggaaaaaaggtttcacgtcggaatcatct

SEQ ID NO: 56425 - DNA, 2052 bp, Zea Mays
ctctctaacaatactaatactactgcatcaatgtttgtatgtatagagagagcgcaccttatattataggtatagaataaaaagtggttacgccttatattatgggacagagggagtatctagctagctagttagttattgtgtgtgttgctcacctcagtacttctgcctgttcctttgccgccttgctctgcagggagatacccaaggaggtttacaacaacttggacactggcagccaggatgagaaatggtgggagggagtggacctccaaaagctcattctggctcacaataatcttgaggtgttaagagaagaccttaggaacttgtcttcgcttgttgttctaaatataagtcacaacaagatatcttcccttccagcagctatcggagaggttgacttctcaaacaattgccttactgagcttccacctaacctcgccacatgcccggacttgtccgaactcaaggcatcaaacaacaacatatccagagtaccagatgtacttgctggctgttccaagttaagtaaattggatctagagggtaacaagcttgtggcactttctgaaaacatgtttgtgtcatggacaatgctcacagaattgaatctcgcaaagaatctacttacagccatcccaggtagcattggagcacttccaaaactaatccgcttggacatgcatcagaataaaataacttattgtcttcaataccagctgatattggcacgttatcaaagttaggcatacttgatctccattctaatcagctaaaggagtatccagttggagcctgcaacctcaaattatctttccttgatctatcaaataactcattatctggtctaccagctgaactaggtaaaatgactaccctaagaaagcttctgcttactggaaatcctatgaggacacttaggagttcattggtttctggaccaacaacaacattgctgaagtatctgcgcagccggctttcatccgatgaggaagcatcaggatccagaagcaccccaactaaagatgaccaaattgctgcagcaaggcgcttgtccttatcttcaaaggaactggacttgagtggccttggagtgaccagtgtaccagctgccgcgtgggagacaagtgatgtggtgaaactggatctttctaaaaattcaatagaagatctaccaaatgagttgtcattatgctcatcacttcaatccttagttttgtctaataacaagataaaaaggtggcctcacacagtggtttcctcccttccctgtctgtcttccttaaagctggacaataaccccttggtagagatatcatccactgatcttgtgcctctgtccaaacttgaagtacttgatctaagtggcaatgcttcagcacttcctgaaccttctgcagtttctgcattaccacagctgcaagagctttacctaagacgaatgaaactccatgaatttcctaatggtttgctgggcctaaaactgcttaggattcttgacctgagtcagaatcaccttacaactgtgccggagggcatcaagaatttcactgcactcattgagcttgatctgtctgacaacaatataacagcactcccagcggagctgggattgcttgaagctaacctgcaagtgctgaaactggatggaaatccgctaagaagcataagacgaactctgttggagcgaggaacgaaagcagttctcaagtacctcaaagaaaaattgccgtctgaataatatttatagaacaaactattgttggagtaatggaataaaatgtttttttgccactgtatctcagttttctggactgaattttgtgcaaaagtatctggaccttgtgtgagaagagagctttgtgagtgtgttgttggatatactggttatagtccacatgttttattggaacaaaaatattttctctgttcaatctttacatggacacaacctggaaagatgttatccaccgttgtatcgttcatagatcgtcaacgactacaccagccagcggaatttggaaaaaaggtttcacgtcggaatcatct

SEQ ID NO: 56426 - DNA, 2087 bp, Zea Mays
ctctctaacaatactaatactactgcatcaatgtttgtatgtatagagagagcgcaccttatattataggtatagaataaaaagtggttacgccttatattatgggacagagggagtatctagctagctagttagttattgtgtgtgttgctcacctcagtacttctgcctgttcctttgccgccttgctctgcagggagatacccaaggaggtttacaacaacttggacactggcagccaggatgagaaatggtgggagggagtggacctccaaaagctcattctggctcacaataatcttgaggtgttaagagaagaccttaggaacttgtcttcgcttgttgttctaaatataagtcacaacaagatatcttcccttccagcagctatcggagaggttgacttctcaaacaattgccttactgagcttccacctaacctcgccacatgcccggacttgtccgaactcaaggcatcaaacaacaacatatccagagtaccagatgtacttgctggctgttccaagttaagtaaattggatctagagggtaacaagcttgtggcactttctgaaaacatgtttgtgtcatggacaatgctcacagaattgaatctcgcaaagaatctacttacagccatcccaggtagcattggagcacttccaaaactaatccgcttggacatgcatcagaataaaataacatcgattcccccttccataaaaggttgctcttcgctagccgagttgtatatgggctgatattggcacgttatcaaagttaggcatacttgatctccattctaatcagctaaaggagtatccagttggagcctgcaacctcaaattatctttccttgatctatcaaataactcattatctggtctaccagctgaactaggtaaaatgactaccctaagaaagcttctgcttactggaaatcctatgaggacacttaggagttcattggtttctggaccaacaacaacattgctgaagtatctgcgcagccggctttcatccgatgaggaagcatcaggatccagaagcaccccaactaaagatgaccaaattgctgcagcaaggcgcttgtccttatcttcaaaggaactggacttgagtggccttggagtgaccagtgtaccagctgccgcgtgggagacaagtgatgtggtgaaactggatctttctaaaaattcaatagaagatctaccaaatgagttgtcattatgctcatcacttcaatccttagttttgtctaataacaagataaaaaggtggcctcacacagtggtttcctcccttccctgtctgtcttccttaaagctggacaataaccccttggtagagatatcatccactgatcttgtgcctctgtccaaacttgaagtacttgatctaagtggcaatgcttcagcacttcctgaaccttctgcagtttctgcattaccacagctgcaagagctttacctaagacgaatgaaactccatgaatttcctaatggtttgctgggcctaaaactgcttaggattcttgacctgagtcagaatcaccttacaactgtgccggagggcatcaagaatttcactgcactcattgagcttgatctgtctgacaacaatataacagcactcccagcggagctgggattgcttgaagctaacctgcaagtgctgaaactggatggaaatccgctaagaagcataagacgaactctgttggagcgaggaacgaaagcagttctcaagtacctcaaagaaaaattgccgtctgaataatatttatagaacaaactattgttggagtaatggaataaaatgtttttttgccactgtatctcagttttctggactgaattttgtgcaaaagtatctggaccttgtgtgagaagagagctttgtgagtgtgttgttggatatactggttatagtccacatgttttattggaacaaaaatattttctctgttcaatctttacatggacacaacctggaaagatgttatccaccgttgtatcgttcatagatcgtcaacgactacaccagccagcggaatttggaaaaaaggtttcacgtcggaatcatct

SEQ ID NO: 56427 - DNA, 2170 bp, Zea Mays
ctctctaacaatactaatactactgcatcaatgtttgtatgtatagagagagcgcaccttatattataggtatagaataaaaagtggttacgccttatattatgggacagagggagtatctagctagctagttagttattgtgtgtgttgctcacctcagtacttctgcctgttcctttgccgccttgctctgcagggagatacccaaggaggtttacaacaacttggacactggcagccaggatgagaaatggtgggagggagtggacctccaaaagctcattctggctcacaataatcttgaggtgttaagagaagaccttaggaacttgtcttcgcttgttgttctaaatataagtcacaacaagatatcttcccttccagcagctatcggagatctcccgttgctaaaatcactggacatgtctttcaatcaaataaacactctgcccgaagagattgggcctggctactgctttagtcaaggttgacttctcaaacaattgccttactgagcttccacctaacctcgccacatgcccggacttgtccgaactcaaggcatcaaacaacaacatatccagagtaccagatgtacttgctggctgttccaagttaagtaaattggatctagagggtaacaagcttgtggcactttctgaaaacatgtttgtgtcatggacaatgctcacagaattgaatctcgcaaagaatctacttacagccatcccaggtagcattggagcacttccaaaactaatccgcttggacatgcatcagaataaaataacatcgattcccccttccataaaaggttgctcttcgctagccgagttgtatatgggaaataacttattgtcttcaataccagctgatattggcacgttatcaaactaaaggagtatccagttggagcctgcaacctcaaattatctttccttgatctatcaaataactcattatctggtctaccagctgaactaggtaaaatgactaccctaagaaagcttctgcttactggaaatcctatgaggacacttaggagttcattggtttctggaccaacaacaacattgctgaagtatctgcgcagccggctttcatccgatgaggaagcatcaggatccagaagcaccccaactaaagatgaccaaattgctgcagcaaggcgcttgtccttatcttcaaaggaactggacttgagtggccttggagtgaccagtgtaccagctgccgcgtgggagacaagtgatgtggtgaaactggatctttctaaaaattcaatagaagatctaccaaatgagttgtcattatgctcatcacttcaatccttagttttgtctaataacaagataaaaaggtggcctcacacagtggtttcctcccttccctgtctgtcttccttaaagctggacaataaccccttggtagagatatcatccactgatcttgtgcctctgtccaaacttgaagtacttgatctaagtggcaatgcttcagcacttcctgaaccttctgcagtttctgcattaccacagctgcaagagctttacctaagacgaatgaaactccatgaatttcctaatggtttgctgggcctaaaactgcttaggattcttgacctgagtcagaatcaccttacaactgtgccggagggcatcaagaatttcactgcactcattgagcttgatctgtctgacaacaatataacagcactcccagcggagctgggattgcttgaagctaacctgcaagtgctgaaactggatggaaatccgctaagaagcataagacgaactctgttggagcgaggaacgaaagcagttctcaagtacctcaaagaaaaattgccgtctgaataatatttatagaacaaactattgttggagtaatggaataaaatgtttttttgccactgtatctcagttttctggactgaattttgtgcaaaagtatctggaccttgtgtgagaagagagctttgtgagtgtgttgttggatatactggttatagtccacatgttttattggaacaaaaatattttctctgttcaatctttacatggacacaacctggaaagatgttatccaccgttgtatcgttcatagatcgtcaacgactacaccagccagcggaatttggaaaaaaggtttcacgtcggaatcatct

SEQ ID NO: 56428 - DNA, 2036 bp, Zea Mays
caaagatcaagaaatatatttaattctctctaacaatactaatactactgcatcaatgtttgtatgtatagagagagcgcaccttatattataggtatagaataaaaagtggttacgccttatattatgggacagagggagtatctagctagctagttagttattgtgtgtgttgctcacctcagtacttctgcctgttcctttgccgccttgctctgcagggagatacccaaggaggtttacaacaacttggacactggcagccaggatgagaaatggtgggagggagtggacctccaaaagctcattctggctcacaataatcttgaggtgttaagagaagaccttaggaacttgtcttcgcttgttgttctaaatataagtcacaacaagatatcttcccttccagcagctatcggagaggttgacttctcaaacaattgccttactgagcttccacctaacctcgccacatgcccggacttgtccgaactcaaggcatcaaacaacaacatatccagagtaccagatgtacttgctggctgttccaagttaagtaaattggatctagagggtaacaagcttgtggcactttctgaaaacatgtttgtgtcatggacaatgctcacagaattgaatctcgctcgttacagcaaagaatctacttacagccatcccagaaataacttattgtcttcaataccagctgatattggcacgttatcaaagttaggcatacttgatctccattctaatcagctaaaggagtatccagttggagcctgcaacctcaaattatctttccttgatctatcaaataactcattatctggtctaccagctgaactaggtaaaatgactaccctaagaaagcttctgcttactggaaatcctatgaggacacttaggagttcattggtttctggaccaacaacaacattgctgaagtatctgcgcagccggctttcatccgatgaggaagcatcaggatccagaagcaccccaactaaagatgaccaaattgctgcagcaaggcgcttgtccttatcttcaaaggaactggacttgagtggccttggagtgaccagtgtaccagctgccgcgtgggagacaagtgatgtggtgaaactggatctttctaaaaattcaatagaagatctaccaaatgagttgtcattatgctcatcacttcaatccttagttttgtctaataacaagataaaaaggtggcctcacacagtggtttcctcccttccctgtctgtcttccttaaagctggacaataaccccttggtagagatatcatccactgatcttgtgcctctgtccaaacttgaagtacttgatctaagtggcaatgcttcagcacttcctgaaccttctgcagtttctgcattaccacagctgcaagagctttacctaagacgaatgaaactccatgaatttcctaatggtttgctgggcctaaaactgcttaggattcttgacctgagtcagaatcaccttacaactgtgccggagggcatcaagaatttcactgcactcattgagcttgatctgtctgacaacaatataacagcactcccagcggagctgggattgcttgaagctaacctgcaagtgctgaaactggatggaaatccgctaagaagcataagacgaactctgttggagcgaggaacgaaagcagttctcaagtacctcaaagaaaaattgccgtctgaataatatttatagaacaaactattgttggagtaatggaataaaatgtttttttgccactgtatctcagttttctggactgaattttgtgcaaaagtatctggaccttgtgtgagaagagagctttgtgagtgtgttgttggatatactggttatagtccacatgttttattggaacaaaaatattttctctgttcaatctttacatggacacaacctggaaagatgttatccaccgttgtatcgttcatagatcgtcaacgactacaccagccagcggaatttggaaaaaaggtttcacgtcggaatcatct

SEQ ID NO: 56429 - DNA, 2378 bp, Zea Mays
atactccctccgtctcagtatattaaccacctatggttcaaagatcaagaaatatatttaattctctctaacaatactaatactactgcatcaatgtttgtatgtatagagagagcgcaccttatattataggtatagaataaaaagtggttacgccttatattatgggacagagggagtatctagctagctagttagttattgtgtgtgttgctcacctcagtacttctgcctgttcctttgccgccttgctctgcagggagatacccaaggaggtttacaacaacttggacactggcagccaggatgagaaatggtgggagggagtggacctccaaaagctcattctggctcacaataatcttgaggtgttaagagaagaccttaggaacttgtcttcgcttgttgttctaaatataagtcacaacaagatatcttcccttccagcagctatcggagatctcccgttgctaaaatcactggacatgtctttcaatcaaataaacactctgcccgaagagattgggcctggctactgctttagtcaaggttgacttctcaaacaattgccttactgagcttccacctaacctcgccacatgcccggacttgtccgaactcaaggcatcaaacaacaacatatccagagtaccagatgtacttgctggctgttccaagttaagtaaattggatctagagggtaacaagcttgtggcactttctgaaaacatgtttgtgtcatggacaatgctcacagaattgaatctcgcaaagaatctacttacagccatcccaggtagcattggagcacttccaaaactaatccgcttggacatgcatcagaataaaataacatcgattcccccttccataaaaggttgctcttcgctagccgagttgtatatgggaaataacttattgtcttcaataccagctgatattggcacgttatcaaagttaggcatacttgatctccattctaatcagctaaaggagtatccagttggagcctgcaacctcaaattatctttccttgatctatcaaataactcattatctggtctaccagctgaactagatcatagatctgattcttgcatgcgtgataagtgtatgctttggcctttaagaacctcatatagtttgtggtactgccttactgaaaattctgacaatccatgcgccactcaaggtaaaatgactaccctaagaaagcttctgcttactggaaatcctatgaggacacttaggagttcattggtttctggaccaacaacaacattgctgaagtatctgcgcagccggctttcatccgatgaggaagcatcaggatccagaagcaccccaactaaagatgaccaaattgctgcagcaaggcgcttgtccttatcttcaaaggaactggacttgagtggccttggagtgaccagtgtaccagctgccgcgtgggagacaagtgatgtggtgaaactggatctttctaaaaattcaatagaagatctaccaaatgagttgtcattatgctcatcacttcaatccttagttttgtctaataacaagataaaaaggtggcctcacacagtggtttcctcccttccctgtctgtcttccttaaagctggacaataaccccttggtagagatatcatccactgatcttgtgcctctgtccaaacttgaagtacttgatctaagtggcaatgcttcagcacttcctgaaccttctgcagtttctgcattaccacagctgcaagagctttacctaagacgaatgaaactccatgaatttcctaatggtttgctgggcctaaaactgcttaggattcttgacctgagtcagaatcaccttacaactgtgccggagggcatcaagaatttcactgcactcattgagcttgatctgtctgacaacaatataacagcactcccagcggagctgggattgcttgaagctaacctgcaagtgctgaaactggatggaaatccgctaagaagcataagacgaactctgttggagcgaggaacgaaagcagttctcaagtacctcaaagaaaaattgccgtctgaataatatttatagaacaaactattgttggagtaatggaataaaatgtttttttgccactgtatctcagttttctggactgaattttgtgcaaaagtatctggaccttgtgtgagaagagagctttgtgagtgtgttgttggatatactggttatagtccacatgttttattggaacaaaaatattttctctgttcaatctttacatggacacaacctggaaagatgttatccaccgttgtatcgttcatagatcgtcaacgactacaccagccagcggaatttggaaaaaaggtttcacgtcggaatcatct

SEQ ID NO: 56430 - DNA, 2613 bp, Zea Mays
gtagtagctggcctctgttcagtttcactcaactgtaacaataaaaaactggcagttagcgctgttccatacttgcatttgctgcaaacccagatgacagaacatggaaagcattgatgcatttggtgattccaacatcacctgccccacttatgacttcatctatccttcaataaatatcagcacttcctgttagggggcggcctcagagctagcacttatatctttccttttaccctcactcacatcgccacattctcaactctggagcttgttgctaaatacgagatcactctatttgtcgtacctaaaacatacacattctatccttcacttgatccattctgttatactccctccgtctcagtatattaaccacctatggttcaaagatcaagaaatatatttaattctctctaacaatactaatactactgcatcaatgtttgtatgtatagagagagcgcaccttatattataggtatagaataaaaagtggttacgccttatattatgggacagagggagtatctagctagctagttagttattgtgtgtgttgctcacctcagtacttctgcctgttcctttgccgccttgctctgcagggagatacccaaggaggtttacaacaacttggacactggcagccaggatgagaaatggtgggagggagtggacctccaaaagctcattctggctcacaataatcttgaggtgttaagagaagaccttaggaacttgtcttcgcttgttgttctaaatataagtcacaacaagatatcttcccttccagcagctatcggagatctcccgttgctaaaatcactggacatgtctttcaatcaaataaacactctgcccgaagagattgggcctggctactgctttagtcaaggttgacttctcaaacaattgccttactgagcttccacctaacctcgccacatgcccggacttgtccgaactcaaggcatcaaacaacaacatatccagagtaccagatgtacttgctggctgttccaagttaagtaaattggatctagagggtaacaagcttgtggcactttctgaaaacatgtttgtgtcatggacaatgctcacagaattgaatctcgcaaagaatctacttacagccatcccaggtagcattggagcacttccaaaactaatccgcttggacatgcatcagaataaaataacatcgattcccccttccataaaaggttgctcttcgctagccgagttgtatatgggaaataacttattgtcttcaataccagctgatattggcacgttatcaaagttaggcatacttgatctccattctaatcagctaaaggagtatccagttggagcctgcaacctcaaattatctttccttgatctatcaaataactcattatctggtctaccagctgaactaggtaaaatgactaccctaagaaagcttctgcttactggaaatcctatgaggacacttaggagttcattggtttctggaccaacaacaacattgctgaagtatctgcgcagccggctttcatccgatgaggaagcatcaggatccagaagcaccccaactaaagatgaccaaattgctgcagcaaggcgcttgtccttatcttcaaaggaactggacttgagtggccttggagtgaccagtgtaccagctgccgcgtgggagacaagtgatgtggtgaaactggatctttctaaaaattcaatagaagatctaccaaatgagttgtcattatgctcatcacttcaatccttagttttgtctaataacaagataaaaaggtggcctcacacagtggtttcctcccttccctgtctgtcttccttaaagctggacaataaccccttggtagagatatcatccactgatcttgtgcctctgtccaaacttgaagtacttgatctaagtggcaatgcttcagcacttcctgaaccttctgcagtttctgcattaccacagctgcaagagctttacctaagacgaatgaaactccatgaatttcctaatggtttgctgggcctaaaactgcttaggattcttgacctgagtcagaatcaccttacaactgtgccggagggcatcaagaatttcactgcactcattgagcttgatctgtctgacaacaatataacagcactcccagcggagctgggattgcttgaagctaacctgcaagtgctgaaactggatggaaatccgctaagaagcataagacgaactctgttggagcgaggaacgaaagcagttctcaagtacctcaaagaaaaattgccgtctgaataatatttatagaacaaactattgttggagtaatggaataaaatgtttttttgccactgtatctcagttttctggactgaattttgtgcaaaagtatctggaccttgtgtgagaagagagctttgtgagtgtgttgttggatatactggttatagtccacatgttttattggaacaaaaatattttctctgttcaatctttacatggacacaacctggaaagatgttatccaccgttgtatcgttcatagatcgtcaacgactacaccagccagcggaatttggaaaaaaggtttcacgtcggaatcatct

SEQ ID NO: 56431 - DNA, 2896 bp, Zea Mays
aatccatgtccagctagggctgccaatcgacagtcccgaggttagcagcatgcggagatggcaagtgctggcagctgcaggcaggcacatgtaagtatggcggcggatcgatagctggggtgagtgcgaagcacatcccaccatggcgccatcccttgccgacctctcccgagagctctgcgcagccgtcgtcaaatccaccttccgcccccacctctccctcctcgccgcctcgccatcccttctcaccgccgtcctccaccgcctctccccgctcccctccgctgcgctcgccttcttccgcgcgctgcctccgccgcacccgctggacgcctcgctcgccgtcctccgcctcctggcgccgcacccgcgccaccacaccgccgcgcgggccctcctccgggacctctcccttcgccacccgctctcctccccgctcctcctcccctccctcctcgccggcccccacgtccccagctggctcgtcctcgtcctcgcccagtcagcgcgcccccacgacgccgtacgggtgttcgaccacatgcgcgcgcgcggcctcgcccccgacgcccacgcctgcaccgcgctcctcacagcgctcgccagggcccggatgacggccaccgcgcgcagggtgttcgacgaaatggccagggcggggctcgccgccaccacgcacgtctacaacgccatgctgcacgtgtgcctcaaggccggggacgccgcgcaagccgaggcgatcgtcaccaggatggacgcggccggcgtgaccttggaccgattctcctataacaccgtcatcgccctctactgccggaaggggatggggtacgaggccatgtgtgcgcgggaccgcatggacaaggaggggatacggccggacactgtcacatggaactcctccatccatggcctgtgcaaggaaggcagggtgaaggaggcggctcagctcttcacggaaatggttgcggcacaggcgacaccagacaatgtcacctacaccacactgattgatgggtactgccgcgcgggcaatgttgaggaagctgtcaagctccgagggagaatggaggccgcagggatgctcccaggggtcgccacttacaatgccattctcaggaagctctgtgaggatggcaacatgaaggaagtccatcggttgcttcatgagatggacgggaggaaggtgcaggctgatcatgtgacctgcaacacgctcatcaacgcctactgcaagagaggcgacatgacctcagcatgcaaggtcaagaaaaagatgatggagtctgggctgcagctcaatcacttcacttacaaggctctcatccatggattctgcaaggccagggagcttgatggagccaaggaagccttctttcagatggtcgatgcaggtttttcacccaattatagcgtattttcatggcttgtcgacggtttctgcaagaagaacaatgcagatgcagtgctagccatccctgatgaacttatgaaaagaggccttccaccagataaagcggtatatagatctctgattcgaaggctttgcagaaaagggctggttgatcaggcacaaagagtatttgaccagatgcaaagcaaaggcttagtcggtgacagtcttgtatatgccacactcgcatacacatacctgacaaaaggaaacccaactgccgctttgaataccttggatggtatgacaaagaaccaattgtacataacaccccagatttacaactgcctgtgtacttcttatgctgatgagaaggaaaccctcaatatgctgtgggttcgtgctattgagagaggcctaatcaagaagagcgtgtacaaactgatgcacgaagcaaggctggaatcaacaaagcttacagttgagactgggtgatatgctcctgtttcaaggccagactatctaggggctacacttgatacttgaatacaattggattcaggacattcaggatgcaacctctgtttgtgttttcactgaataccttgatatttgggatatgttatctgggactgtactgcagccaggtgaagatactcattgctggcggctttcagcttcgagacagtactcggccaaatcagcttatgaaaacttctttcaaggctcagttcaatttcagcgatgggagcgaatatggaagccatgggtgccaggcaaatgccatttgcttctttggttggtggtacataaacggtgctggatatgtactagcttgctctacaaagtttgccgcatccagtgtgctgtcctcactgtgatcaggtcgatgggacaagtgatcatcagctcactaattgtgcgtttgtgagacattttgggttcaatctcctgcggggatttggccttcgaggtctgtcaccttctgttgaagatagatcctttgattacgggccagctaacggaccagtgcagaaatacctcaattttctgagcctggagccctggactctggaagcatcggaatctccatgtttttgatggtgctgccccagaaatggcaggtgtattgcttgctgcttgaggaggagcaaatattgagttcaaaaccctcccttgccgctgcaacctcctcctcatccgctgcacataccccggatgggccaaatagcgtcggcaacctggagctcatgaagcaaatccaagaaaggcagctgctgctggtggtcatatacagaaggtgatattgagctattaaaacacatccgtctaatgaaatggctccgtgtttgtgcaaaaatatatcatggcccaagataaatagatggcctcagtttacgtcttcaaccttggataaagacaaaggacatatgattgtcatgtagtagtagtacaatgtacaaacgagggcaggttacaccacttgtaaattttcttgtggac

SEQ ID NO: 56432 - DNA, 2908 bp, Zea Mays
aatccatgtccagctagggctgccaatcgacagtcccgaggttagcagcatgcggagatggcaagtgctggcagctgcaggcaggcacatgtaagtatggcggcggatcgatagctggggtgagtgcgaagcacatcccaccatggcgccatcccttgccgacctctcccgagagctctgcgcagccgtcgtcaaatccaccttccgcccccacctctccctcctcgccgcctcgccatcccttctcaccgccgtcctccaccgcctctccccgctcccctccgctgcgctcgccttcttccgcgcgctgcctccgccgcacccgctggacgcctcgctcgccgtcctccgcctcctggcgccgcacccgcgccaccacaccgccgcgcgggccctcctccgggacctctcccttcgccacccgctctcctccccgctcctcctcccctccctcctcgccggcccccacgtccccagctggctcgtcctcgtcctcgcccagtcagcgcgcccccacgacgccgtacgggtgttcgaccacatgcgcgcgcgcggcctcgcccccgacgcccacgcctgcaccgcgctcctcacagcgctcgccagggcccggatgacggccaccgcgcgcagggtgttcgacgaaatggccagggcggggctcgccgccaccacgcacgtctacaacgccatgctgcacgtgtgcctcaaggccggggacgccgcgcaagccgaggcgatcgtcaccaggatggacgcggccggcgtgaccttggaccgattctcctataacaccgtcatcgccctctactgccggaaggggatggggtacgaggccatgtgtgcgcgggaccgcatggacaaggaggggatacggccggacactgtcacatggaactcctccatccatggcctgtgcaaggaaggcagggtgaaggaggcggctcagctcttcacggaaatggttgcggcacaggcgacaccagacaatgtcacctacaccacactgattgatgggtactgccgcgcgggcaatgttgaggaagctgtcaagctccgagggagaatggaggccgcagggatgctcccaggggtcgccacttacaatgccattctcaggaagctctgtgaggatggcaacatgaaggaagtccatcggttgcttcatgagatggacgggaggaaggtgcaggctgatcatgtgacctgcaacacgctcatcaacgcctactgcaagagaggcgacatgacctcagcatgcaaggtcaagaaaaagatgatggagtctgggctgcagctcaatcacttcacttacaaggctctcatccatggattctgcaaggccagggagcttgatggagccaaggaagccttctttcagatggtcgatgcaggtttttcacccaattatagcgtattttcatggcttgtcgacggtttctgcaagaagaacaatgcagatgcagtgctagccatccctgatgaacttatgaaaagaggccttccaccagataaagcggtatatagatctctgattcgaaggctttgcagaaaagggctggttgatcaggcacaaagagtatttgaccagatgcaaagcaaaggcttagtcggtgacagtcttgtatatgccacactcgcatacacatacctgacaaaaggaaacccaactgccgctttgaataccttggatggtatgacaaagaaccaattgtacataacaccccagatttacaactgcctgtgtacttcttatgctgatgagaaggaaaccctcaatatgctgtgggttcgtgctattgagagaggcctaatcaagaagagcgtgtacaaactgatgcacgaagcaaggctggaatcaacaaagcttacagttgagactgggtgatatgctcctgtttcaaggccagactatctaggggctacacttgatacttgaatacaattggattcaggacattcaggatgcaacctctgtttgtgttttcactgaataccttgatatttgggatatgttatctgggactgtactgcagccaggtgaagatactcattgctggcggctttcagcttcgagacagtactcggccaaatcagcttatgaaaacttctttcaaggctcagttcaatttcagcgatgggagcgaatatggaagccatgggtgccaggcaaatgccatttgcttctttggttggtggtacataaacggtgctggatatgtactagcttgctctacaaagtttgccgcatccagtgtgctgtcctcactgtgatcaggtcgatgggacaagtgatcatcagctcactaattgtgcgtttgtgagacattttgggttcaatctcctgcggggatttggccttcgaggtctgtcaccttctgttgaagatagatcctttgattacgggccagctaacggaccagtgcagaaatacctcaattttctgagcctggagccctggactctggaagcatcggaatctccatgtttttgatggtgctgccccagaaatggcaggtgtattgcttgctgcttgaggaggtacaactttgggagcaaatattgagttcaaaaccctcccttgccgctgcaacctcctcctcatccgctgcacataccccggatgggccaaatagcgtcggcaacctggagctcatgaagcaaatccaagaaaggcagctgctgctggtggtcatatacagaaggtgatattgagctattaaaacacatccgtctaatgaaatggctccgtgtttgtgcaaaaatatatcatggcccaagataaatagatggcctcagtttacgtcttcaaccttggataaagacaaaggacatatgattgtcatgtagtagtagtacaatgtacaaacgagggcaggttacaccacttgtaaattttcttgtggac

SEQ ID NO: 56433 - DNA, 2818 bp, Zea Mays
aatccatgtccagctagggctgccaatcgacagtcccgaggttagcagcatgcggagatggcaagtgctggcagctgcaggcaggcacatgtaagtatggcggcggatcgatagctggggtgagtgcgaagcacatcccaccatggcgccatcccttgccgacctctcccgagagctctgcgcagccgtcgtcaaatccaccttccgcccccacctctccctcctcgccgcctcgccatcccttctcaccgccgtcctccaccgcctctccccgctcccctccgctgcgctcgccttcttccgcgcgctgcctccgccgcacccgctggacgcctcgctcgccgtcctccgcctcctggcgccgcacccgcgccaccacaccgccgcgcgggccctcctccgggacctctcccttcgccacccgctctcctccccgctcctcctcccctccctcctcgccggcccccacgtccccagctggctcgtcctcgtcctcgcccagtcagcgcgcccccacgacgccgtacgggtgttcgaccacatgcgcgcgcgcggcctcgcccccgacgcccacgcctgcaccgcgctcctcacagcgctcgccagggcccggatgacggccaccgcgcgcagggtgttcgacgaaatggccagggcggggctcgccgccaccacgcacgtctacaacgccatgctgcacgtgtgcctcaaggccggggacgccgcgcaagccgaggcgatcgtcaccaggatggacgcggccggcgtgaccttggaccgattctcctataacaccgtcatcgccctctactgccggaaggggatggggtacgaggccatgtgtgcgcgggaccgcatggacaaggaggggatacggccggacactgtcacatggaactcctccatccatggcctgtgcaaggaaggcagggtgaaggaggcggctcagctcttcacggaaatggttgcggcacaggcgacaccagacaatgtcacctacaccacactgattgatgggtactgccgcgcgggcaatgttgaggaagctgtcaagctccgagggagaatggaggccgcagggatgctcccaggggtcgccacttacaatgccattctcaggaagctctgtgaggatggcaacatgaaggaagtccatcggttgcttcatgagatggacgggaggaaggtgcaggctgatcatgtgacctgcaacacgctcatcaacgcctactgcaagagaggcgacatgacctcagcatgcaaggtcaagaaaaagatgatggagtctgggctgcagctcaatcacttcacttacaaggctctcatccatggattctgcaaggccagggagcttgatggagccaaggaagccttctttcagatggtcgatgcaggtttttcacccaattatagcgtattttcatggcttgtcgacggtttctgcaagaagaacaatgcagatgcagtgctagccatccctgatgaacttatgaaaagaggccttccaccagataaagcggtatatagatctctgattcgaaggctttgcagaaaagggctggttgatcaggcacaaagagtatttgaccagatgcaaagcaaaggcttagtcggtgacagtcttgtatatgccacactcgcatacacatacctgacaaaaggaaacccaactgccgctttgaataccttggatggtatgacaaagaaccaattgtacataacaccccagatttacaactgcctgtgtacttcttatgctgatgagaaggaaaccctcaatatgctgtgggttcgtgctattgagagaggcctaatcaagaagagcgtgtacaaactgatgcacgaagcaaggctggaatcaacaaagcttacagttgagactgggtgatatgctcctgtttcaaggccagactatctaggggctacacttgatacttgaatacaattggattcaggacattcaggatgcaacctctgtttgtgttttcactgaataccttgatatttgggatatgttatctgggactgtactgcagccaggtgaagatactcattgctggcggctttcagcttcgagacagtactcggccaaatcagcttatgaaaacttctttcaaggctcagttcaatttcagcgatgggagcgaatatggaagccatgggtgccaggcaaatgccatttgcttctttggttggtggtacataaacggtgctggatatgtactagcttgctctacaaagtttgccgcatccagtgtgctgtcctcactgtgatcaggtcgatgggacaagtgatcatcagctcactaattgtgcgtttgtgagacattttgggttcaatctcctgcggggatttggccttcgaggtctgtcaccttctgttgaagatagatcctttgattacgggccagctaacggaccagtgcagaaatacctcaattttctgagcctggagccctggactctggaagcatcggaatctccatgtttttgatggtgctgccccagaaatggcaggtgtattgcttgctgcttgaggaggtacaactttgggtaatggctggagcccatagggttttccctcttgagttaccttacacctattgattatgcttcgattatgatcattagtatttcagtcacagactcacatgcatggatgtaaagctaagaattcactttccaaattcaaaagccactcaatcacaatcagcttgttgatgagacacaaatcaaacattcaaactttttttttttgcaatattcagttctgtaagaagtaggtagtaggtgttgttcattatttgttctgattgtg

SEQ ID NO: 56434 - DNA, 846 bp, Zea Mays
gagcccaattacggaaggcagagcacccgcctgctcgccgcagggcatcatggttcggctcgagtacacggcgacctgttcgcagcgcgccactaccggcgccgccctcatcatcgccgccgccaggctctcctacgccaacatcgagccccagcgtgccaaggccttcatccatcgcaagctcggagggtccgcctccccacagcatcaggagcaggatccagcccggagcacctagggtccttgtcctgatttgttgcttccgtccaccatctctcatccacacatttcttcgttataaactggagtagtccttcagtatagtaccagtgccatgctttagatactcctctactaggccgacgggcttgtgtttcgatttttgtttggttagtttatttatttaccaagtcattgtgcttgcatcatatgctaatgtaactgctactccattagttcttacctgtagaaacttgaataaacttggtgccttcctaatttctagatagatatacagatacagttcgttctggttttgtaaattatatagtttctatttctcccgctaccgctaccatgtttcagaaattttggtcccattagttttgtcagtattatttgttgtagtggtattatccttgttgttagcctaactaatagctgttgcaggtcggccgagatgatgggaatcaagtcattgacaaattaggggcagggcaatctgcctggaaacatcccgcaacgtcaccaacgcatagccacagagagagaagagaagacaagtgccgcgcccaagcccattcgttttcagcggagcaatcagaagaagaaaaatctgcaaacttg

SEQ ID NO: 56435 - DNA, 839 bp, Zea Mays
gagcccaattacggaaggcagagcacccgcctgctcgccgcagggcatcatggttcggctcgagtacacggcgacctgttcgcagcgcgccactaccggcgccgccctcatcatcgccgccgccaggctctcctacgccaacatcgagccccagcgtgccaaggccttcatccatcgcaagctcggagggtccgcctccccacagcatcaggagcaggatccagcccggagcacctagggtccttgtcctgatttgttgcttccgtccaccatctctcatccacacatttcttcgttataaactggagtagtccttcagtatagtaccagtgccatgctttagatactcctctactaggccgacgggcttgtgtttcgatttttgtttggttagtttatttatttaccaagtcattgtgcttgcatcatatgctaatgtaactgctactccattagttcttacctgtagaaacttgaataaacttggtgccttcctaatttctagatagatatacagatacagttcgttctggttttgtaaattatatagtttctatttctcccgctaccgctaccatgtttcagaaattttggtcccattagttttgtcagtattatttgttgtagtggtattatccttgttgttagcctaactaatagctgttgcaggtcggccgagatgatgggaatcaagtcattgacaaattaggggcagggcaatctgcctggaaacatcccgcaacgtcaccaacgcatagccacagagagagaagagaagacaagtgccgcgcccaagcccattcgggggtggcaccggactttctgatagttcaatttga

SEQ ID NO: 56436 - DNA, 1303 bp, Zea Mays
gagcccaattacggaaggcagagcacccgcctgctcgccgcagggcatcatggttcggctcgagtacacggcgacctgttcgcagcgcgccactaccggcgccgccctcatcatcgccgccgccaggctctcctacgccaacatcgagccccagcgtgccaaggccttcatccatcgcaagctcggagggtccgcctccccacagcatcaggagcaggatccagcccggagcacctagggtccttgtcctgatttgttgcttccgtccaccatctctcatccacacatttcttcgttataaactggagtagtccttcagtatagtaccagtgccatgctttagatactcctctactaggccgacgggcttgtgtttcgatttttgtttggttagtttatttatttaccaagtcattgtgcttgcatcatatgctaatgtaactgctactccattagttcttacctgtagaaacttgaataaacttggtgccttcctaatttctagatagatatacagatacagttcgttctggttttgtaaattatatagtttctatttctcccgctaccgctaccatgtttcagaaattttggtcccattagttttgtcagtattatttgttgtagtggtattatccttgttgttagcctaactaatagctgttgcaggtcggccgagatgatgggaatcaagtcattgacaaattaggggcagggcaatctgcctggaaacatcccgcaacgtcaccaacgcatagccacagagagagaagagaagacaagtgccgcgcccaagcccattcggttatgcgcagcatacaatgagctacgaaattcactcctggtcagcatacagtacttgaaggatatagtcattcgaactgtatatatgatgtagatgagctttataccacccgtggttatgtctttattattggtagaagcgtcgtatcctgaaggtcatgcaagcagaccatcttgacaaggtcaatcatggaagccaaacttgctgcacttgacacagcaaccactgaggcaaaatggttgcatgaactcttgatggacttgtcagtggttgagaaaccaatacaggctatttttatgaactgtgacaatcagactgtgattggtaaagtgacaagttctaaggataatgagaagtcatcaagacatgttaaaagatgattcaagtcagaaagttgagaaactctagagttataagtgtgaattatatttcacaagataaaaatctggcagatccatgtaatgtgataaaaattgcatcgagagagatgagtatgag

SEQ ID NO: 56437 - DNA, 1435 bp, Zea Mays
gagcccaattacggaaggcagagcacccgcctgctcgccgcagggcatcatggttcggctcgagtacacggcgacctgttcgcagcgcgccactaccggcgccgccctcatcatcgccgccgccaggctctcctacgccaacatcgagccccagcgtgccaaggccttcatccatcgcaagctcggagggtccgcctccccacagcatcaggagcaggatccagcccggagcacctagggtccttgtcctgatttgttgcttccgtccaccatctctcatccacacatttcttcgttataaactggagtagtccttcagtatagtaccagtgccatgctttagatactcctctactaggccgacgggcttgtgtttcgatttttgtttggttagtttatttatttaccaagtcattgtgcttgcatcatatgctaatgtaactgctactccattagttcttacctgtagaaacttgaataaacttggtgccttcctaatttctagatagatatacagatacagttcgttctggttttgtaaattatatagtttctatttctcccgctaccgctaccatgtttcagaaattttggtcccattagttttgtcagtattatttgttgtagtggtattatccttgttgttagcctaactaatagctgttgcaggtcggccgagatgatgggaatcaagtcattgacaaattaggggcagggcaatctgcctggaaacatcccgcaacgtcaccaacgcatagccacagagagagaagagaagacaagtgccgcgcccaagcccattcgcaccttcaccgccgacggtccggtctaccccgccgtgtcattcacagagatcatttcgctggagaaaacctcatccaacatcactacttcgccgctaacccagtgtatccaccgcatgtgtttcgtagaaggttccgcatgagtaggcctttgtttctccgcattctgcaaggtcttcaacaacacgatatttactttacacaaagagttgacgcaactggtatgcccggactaggaccattacaaaaagtttgtgcagccatgcggatacttgcttatggcttaccttcagatgcggtagacgagtatattcaaattggggaatcaacggctagggaatgccttcatcatttttgtcgcgcaatcattgattgttttagtgcttggtatttacgcactccaactcaagatgacattaatcgcatcatgcataatagtgagtcgcggggttttcctggcatgttgggatccatcgattgcatgcactgggagtggaggaactgtccaacggcatggcgaggtcaattttgtggtcgaaatggtagggcatccatgatacttgaagctgttgcaacgtatgatctatggatttggcatgcattttttggcatgcctgggacaaacaatgacg

SEQ ID NO: 56438 - DNA, 2629 bp, Zea Mays
aaatcaaatcgaagctttcattcttaaaggcttagcagcacattcagaagtatcctactcaaatagatagaagcaaagcataataagcacattcagggaaccaatttggtcttgatatttttgaaccagtagttgggatgcagagaaccaatttggtccaccggaaccactaacaggggaagatgctccagccaactttctagacaaataaagatcagccatgtcgtcgtcatcatctaataattacggaagcacatctctcacctggcaaatagagaacagttcccagccaactttctagacaaataaagatcagccatgtcgtcgttatcatctaataattgttcaagctcatatctcacctggcaaatagagaacagtttgtgattcctatcacaagaaaaacggaagaactgatccacaaattctacatgtctctctatgtttcatgcatgattcagtcaacctcaccaatcctgtctcgccctctcggcgtcttttgcttccccgggccacatatctgtccatcatggccgacaccgccgtcgccacaaccacggtctgctccatgtgcagtgacgtcggcttcaccaagaagctcttccgacgagggtgggacgcaagtccgatcgcgcttgcagaagggcgtctagttacacgagggcgacaggggaggccgtggcaaggaggaggcacacgaggccacgacgaggaggaggagcggggcggctagccaccgcaacggggatccatggtgcacgcaacagggcgtagcagacgggtggatttgggactgaaggcgagcccatggcgttggcggctaggggtttagggtttgggtgttcgtcgtggcacagccgcacaggtggtttacgtggaatgcttggagccttggactgcggactcagtcagtcactcacgctccgttggcgggaagcagggtttcatttcccgcgcttttgcccgttctcccgccaggttgctccgcctataggactccgctcctttgagctcccctcccctcgcatcgcatcgcatcgatcctcccatctgcgcacccgcaagcctattcgccgcacctcctcaggtgaccgggaagatgatgccgttgagccaaaccgacttctcgccgtcgcagttcacctcctcccagaatgccgccgccgactccaccacgccttccaagatgcgcggcgcgtccagcaccatgccgctcaccgtgaagcaggtcgtcgacgcgcagcagtctggcacgggcgagaagggcgctccgttcatcgtcaatggcgtcgagatggctaacattcgacttgtggggatggtcaatgccaaggtggagcggacgaccgatgtgaccttcacgctcgacgatggcaccggccgcctcgatttcatcagatgggtgaatgatgcttcagattcttttgaaactgctgctattcagtaagtataaactataatgtatacattgtccctaaagcattccagtagtaccttttctgtaggaaagtcaccatgcttttgtgcggatgtacattggttatcaaggaatggtatgtacattgcggtcattggaagcctcaagggactgcaagagaggaagcgtgctactgctttctcaatcaggcctataaccgatttcaatgaggttacgctgcatttcattcagtgtgttcggatgcatatagagaacactgaattaaaggctggcagtcctgcacgaatcaattcttctatgggagtgtcattctcaaatggattcagtgaatcaagcacaccgacatctttgaaatccagtcccgcaccggtgaccagcgggtcatccgatactgatctgcacacgcaggtcctgaatttttttaatgaaccagcgaacctgtaagttacatattcacaacctgcaacttattatgttttgaccagcctttccaataaaagtgtttcctgaataaagtttaagctaaacataaccatcactttttttcttattcaaatatgatgccacatttacctaccctttttcagttaacaaataaaaagttgcatttgctgtgatgccctggttagcaagttctctcatcttggtttgccattctattgttgacagcgagagtgagcatggggtgcacgttgatgaagtactcaagcggttcaaacttttgccgaagaagcagatcacgtatagctcctcacttcactttgactagcacacacagcaaaaaaaaaaaaaagagttctcagtggctccttttgtatgcagggatgctattgattacaatatggactcggggcgtctttactcaacaattgatgaattccactacaaggcaacttaaccgatttgaaggctgatcgcaatggcaggaccgagatgtcaaatttacaaggaccctgagagagggaggtgtattaacgtgaaccaaaagcatcaaactttttgatctagaaaacaaatactatatctaggtttgaaacaacataaatctacttgtatttttttcaaagaagataggaggagtaggaggtgctatgcactgctcctcgtcgttgttggactgtagcttgttggcccataaagatagatagcgtgcagcagtgaaatggcagaagctaccactcctccctttct

SEQ ID NO: 56439 - DNA, 2945 bp, Zea Mays
aaatcaaatcgaagctttcattcttaaaggcttagcagcacattcagaagtatcctactcaaatagatagaagcaaagcataataagcacattcagggaaccaatttggtcttgatatttttgaaccagtagttgggatgcagagaaccaatttggtccaccggaaccactaacaggggaagatgctccagccaactttctagacaaataaagatcagccatgtcgtcgtcatcatctaataattacggaagcacatctctcacctggcaaatagagaacagttcccagccaactttctagacaaataaagatcagccatgtcgtcgttatcatctaataattgttcaagctcatatctcacctggcaaatagagaacagtttgtgattcctatcacaagaaaaacggaagaactgatccacaaattctacatgtctctctatgtttcatgcatgattcagtcaacctcaccaatcctgtctcgccctctcggcgtcttttgcttccccgggccacatatctgtccatcatggccgacaccgccgtcgccacaaccacggtctgctccatgtgcagtgacgtcggcttcaccaagaagctcttccgacgagggtgggacgcaagtccgatcgcgcttgcagaagggcgtctagttacacgagggcgacaggggaggccgtggcaaggaggaggcacacgaggccacgacgaggaggaggagcggggcggctagccaccgcaacggggatccatggtgcacgcaacagggcgtagcagacgggtggatttgggactgaaggcgagcccatggcgttggcggctaggggtttagggtttgggtgttcgtcgtggcacagccgcacaggtggtttacgtggaatgcttggagccttggactgcggactcagtcagtcactcacgctccgttggcgggaagcagggtttcatttcccgcgcttttgcccgttctcccgccaggttgctccgcctataggactccgctcctttgagctcccctcccctcgcatcgcatcgcatcgatcctcccatctgcgcacccgcaagcctattcgccgcacctcctcaggtgaccgggaagatgatgccgttgagccaaaccgacttctcgccgtcgcagttcacctcctcccagaatgccgccgccgactccaccacgccttccaagatgcgcggcgcgtccagcaccatgccgctcaccgtgaagcaggtcgtcgacgcgcagcagtctggcacgggcgagaagggcgctccgttcatcgtcaatggcgtcgagatggctaacattcgacttgtggggatggtcaatgccaaggtggagcggacgaccgatgtgaccttcacgctcgacgatggcaccggccgcctcgatttcatcagatgtaccttttctgtaggaaagtcaccatgcttttgtgcggatgtacattggttatcaaggaatggtatgtacattgcggtcattggaagcctcaagggactgcaagagaggaagcgtgctactgctttctcaatcaggcctataaccgatttcaatgaggttacgctgcatttcattcagtgtgttcggatgcatatagagaacactgaattaaaggctggcagtcctgcacgaatcaattcttctatgggagtgtcattctcaaatggattcagtgaatcaagcacaccgacatctttgaaatccagtcccgcaccggtgaccagcgggtcatccgatactgatctgcacacgcaggtcctgaatttttttaatgaaccagcgaacctgtaagttacatattcacaacctgcaacttattatgttttgaccagcctttccaataaaagtgtttcctgaataaagtttaagctaaacataaccatcactttttttcttattcaaatatgatgccacatttacctaccctttttcagttaacaaataaaaagttgcatttgctgtgatgccctggttagcaagttctctcatcttggtttgccattctattgttgacagcgagagtgagcatggggtgcacgttgatgaagtactcaagcggttcaaacttttgccgaagaagcagatcacggatgctattgattacaatatggactcggggcgtctttactcaacaattgatgaattccactacaaggcaacttaaccgatttgaaggtcagcctgctggaaatggcagaggactaagtatcacttgtactaaaccaaagtctggaaatgtcatgttgtgtcatgaaatgcatggttggtttatggaaacatttatatcttgtatcaactagttgatttgtatctcttgtgtcaacttaatgactgagccaacaaaaggaagatgtagaggcagacagacatttgtagattggctgatagctgattcgggtagctggtccaattgcaatctggggcccaataattcagatgcaaaagcagaaagatatttcactgtcgtttcttttgatgcaaaagaaattaaattataaggaaatgaagactgttccattatttcccattagtttatgcagtcatgatgtatttcatagttttaaatttaataaaagcgtgtacatttatccatttaaaatagagagtataaagtgattagatctagaagagagagactgatataatgtcaatgtggctgtaggctgatcgcaatggcaggaccgagatgtcaaatttacaaggaccctgagagagggaggtgtattaacgtgaaccaaaagcatcaaactttttgatctagaaaacaaatactatatctaggtttgaaacaacataaatctacttgtatttttttcaaagaagataggaggagtaggaggtgctatgcactgctcctcgtcgttgttggactgtagcttgttggcccataaagatagatagcgtgcagcagtgaaatggcagaagctaccactcctccctttct

SEQ ID NO: 56440 - DNA, 2760 bp, Zea Mays
tttattataatacgactagtgaagtatatttatgttacacgagtggtcattatctatgtgtattgattttgatcaccggctattcatattcatatattggagaatgttcgaatccatatgtgtattcactacaaaatatgaatattgatgtgaaatagactatctaatttgtattcgatcagttcattttcactggaaaggcagaaagcagagaaattccatacgttcgtactcgttggctagcatattatcctctaccacttgaaaacaacaattcgccaaaaaaaaaaacattcatagcacggcccatttttgcaaaaatggtggttgggccttatcagcatcacagctcagcccagtccagcgacagtgatgttagtttgtgttggcctcctgctgctcctcctcctgctgctccacggcgtcggcgtcggtggcgccgttccggcgagccctccgaatcctactcatcctagctagcgctgcctgccctgcttcactccctcccaccctcactggcgcctcaccatgatccatgtcgactttccctcctccaccccccagcgccgctaggagccccgtcgccagggtgcgcctcgaccacctggtcccgttcgacggcgccttcaccccggcctacgcgcgcgcagtcgaagccgtcgctgcttccctcacgcgccacggcgccgccgccgtcgacctccctgcagcggacgccgctgtcgtccggtgcgccctcgagtccgcgcgcgccttcttctgcgaccgctccggcctctacgtctaccgcgccgggagggctctggatgatggagagttgtcacctgcttgcatgtctgatgctttcagatgtttgggtaagacagcccgtgctgctctctgtgcaatagcacggaaccttcgcttacgttcagatgctttcagccatttgcttgatgacaacccattgcctcttgatgaggtttcagcttcagaattgatggtgtcattttctcatgggcacccccaaagcagccaggcacctatggtgggcctcaggccatcaatggctgaagttgatagaggttttgttacactggttgcttctgaccatccaggaattgaggtttgcaacccaaatggtcattggtacccagcggatgtgggctcaagccctgatgtcctgttgcttttgactggaagagccttgagtcatgttactgctggcctacgtctaaattctcagtacaggatcattaataatgaaaacagggcatcactcatgtttaggctcatgcctcgtgccaatgcaatattggactgctctccaatttcagctgctgggcattgcacaccacagatccaccggcccatatctgcaagtcagtttatggatgatttgcgtgctgaagagaatgtttaccatcacttagaagcaccgcctgaatcacagggaaactttgttaatgaaccatcgctcagaagtgtactgtcagaccctttgtctggggcttttcttgaagatgctatggttctcccatgtgggcactcgtttggtggcctcatgctgaagaaagttcttgaattggtatattcagagactttgtattcagtttttttaacatttctcaaaaaaattggtttgtttgtaaatcagtgacatcaagaataaagctatatgctttactttagatactatattgttcttttagatatgatcaatatcctgaatctttgatttatctggttatggttgtgtatagcccagtccgctgtttctgcaacttagttgttagtaggtcaatcccttatatgcaaaatttctctgttctggaaccagaatacagtacaactctgagaaagtaattaccgatcagaagccacatgtcataagaaactgataatgatttagtaatccacaaagtatttttgttaggacctaacatgcaacggagacagcataccattttttttttaaaaaaatcttctcaggcaaggtgcagcatttgcaacggagatgttgatgaggcctccttatttcctaacctcgtatcgaatgttacacagctctaagagcggtagctaccgtggtgaagatggaagacgataggaggctctttcacaatgcggcccttcgaaagcgcaggaaagaagtgactgagcatatggatgcccaaaggcgaaatggaagtagcaaggacagtattgagctggggctagaagctgaaagccctagagcgttcaagggggtgcagtacccgtttgtggtgggtgagagagtcctgatcatgggaaacaaaaggacgcctgataaattcgttgggaaggaggcagtggtgacatcacagtgcctgaatggctggtaccttgtgaaggcagttgatagcggagaaagcatacggctgcagtacaggtcgctgaggaaagcaggggagctacaagtgcaagcactcctgcagagtagacgatgattttttgcactagtgttgcttgtctcgtgttttgtttctgtcctatgcgatgaaaaggaaaaggaaaggatgcagcgtccttttgtacaaatttccattcagttttgccagccaagtcacgtagctgtaaaatgacagatgttgtgtggtgttctgtggcctttgtgcttgtgcactaagtcttgttaattgtcatacatgctcccttcgtaaaaaaaaaggagtcttaagtacaagattttttttctaaatattttgattaaattagtataaaatatttacaacatttatatctttaaataaagttgat

SEQ ID NO: 56441 - DNA, 2639 bp, Zea Mays
tttattataatacgactagtgaagtatatttatgttacacgagtggtcattatctatgtgtattgattttgatcaccggctattcatattcatatattggagaatgttcgaatccatatgtgtattcactacaaaatatgaatattgatgtgaaatagactatctaatttgtattcgatcagttcattttcactggaaaggcagaaagcagagaaattccatacgttcgtactcgttggctagcatattatcctctaccacttgaaaacaacaattcgccaaaaaaaaaaacattcatagcacggcccatttttgcaaaaatggtggttgggccttatcagcatcacagctcagcccagtccagcgacagtgatgttagtttgtgttggcctcctgctgctcctcctcctgctgctccacggcgtcggcgtcggtggcgccgttccggcgagccctccgaatcctactcatcctagctagcgctgcctgccctgcttcactccctcccaccctcactggcgcctcaccatgatccatgtcgactttccctcctccaccccccagcgccgctaggagccccgtcgccagggtgcgcctcgaccacctggtcccgttcgacggcgccttcaccccggcctacgcgcgcgcagtcgaagccgtcgctgcttccctcacgcgccacggcgccgccgccgtcgacctccctgcagcggacgccgctgtcgtccggtgcgccctcgagtccgcgcgcgccttcttctgcgaccgctccggcctctacgtctaccgcgccgggagggctctggatgatggagagttgtcacctgcttgcatgtctgatgctttcagatgtttgggtaagacagcccgtgctgctctctgtgcaatagcacggaaccttcgcttacgttcagatgctttcagccatttgcttgatgacaacccattgcctcttgatgaggtttcagcttcagaattgatggtgtcattttctcatgggcacccccaaagcagccaggcacctatggtgggcctcaggccatcaatggctgaagttgatagaggttttgttacactggttgcttctgaccatccaggaattgaggtttgcaacccaaatggtcattggtacccagcggatgtgggctcaagccctgatgtcctgttgcttttgactggaagagccttgagtcatgttactgctggcctacgtctaaattctcagtacaggatcattaataatgaaaacagggcatcactcatgtttaggctcatgcctcgtgccaatgcaatattggactgctctccaatttcagctgctgggcattgcacaccacagatccaccggcccatatctgcaagtcagtttatggatgatttgcgtgctgaagagaatgtttaccatcacttagaagcaccgcctgaatcacagggaaactttgttaatgaaccatcgctcagaagtgtactgtcagaccctttgtcgtaagctcttccttgttgaatgcaacacttcatcatctcaatatcaatggcgtgtatatagtgtctgtgtacatggatccttctatgtatgttgttctatgtttcttatcttaacatgacaagtaaagaagagagacagttttagacatgctggatcagaagaaacttgctgaaagcatacagctgcaaaatccagatcatgacacataattttttcacttagcttacaaaacgatgaatatagacatatagtgatggagtgattttatttatttattttcagtggggcttttcttgaagatgctatggttctcccatgtgggcactcgtttggtggcctcatgctgaagaaagttcttgaattggcaaggtgcagcatttgcaacggagatgttgatgaggcctccttatttcctaacctcgtatcgaatgttacacagctctaagagcggtagctaccgtggtgaagatggaagacgataggaggctctttcacaatgcggcccttcgaaagcgcaggaaagaagtgactgagcatatggatgcccaaaggcgaaatggaagtagcaaggacagtattgagctggggctagaagctgaaagccctagagcgttcaagggggtgcagtacccgtttgtggtgggtgagagagtcctgatcatgggaaacaaaaggacgcctgataaattcgttgggaaggaggcagtggtgacatcacagtgcctgaatggctggtaccttgtgaaggcagttgatagcggagaaagcatacggctgcagtacaggtcgctgaggaaagcaggggagctacaagtgcaagcactcctgcagagtagacgatgattttttgcactagtgttgcttgtctcgtgttttgtttctgtcctatgcgatgaaaaggaaaaggaaaggatgcagcgtccttttgtacaaatttccattcagttttgccagccaagtcacgtagctgtaaaatgacagatgttgtgtggtgttctgtggcctttgtgcttgtgcactaagtcttgttaattgtcatacatgctcccttcgtaaaaaaaaaggagtcttaagtacaagattttttttctaaatattttgattaaattagtataaaatatttacaacatttatatctttaaataaagttgat

SEQ ID NO: 56442 - DNA, 2702 bp, Zea Mays
tttattataatacgactagtgaagtatatttatgttacacgagtggtcattatctatgtgtattgattttgatcaccggctattcatattcatatattggagaatgttcgaatccatatgtgtattcactacaaaatatgaatattgatgtgaaatagactatctaatttgtattcgatcagttcattttcactggaaaggcagaaagcagagaaattccatacgttcgtactcgttggctagcatattatcctctaccacttgaaaacaacaattcgccaaaaaaaaaaacattcatagcacggcccatttttgcaaaaatggtggttgggccttatcagcatcacagctcagcccagtccagcgacagtgatgttagtttgtgttggcctcctgctgctcctcctcctgctgctccacggcgtcggcgtcggtggcgccgttccggcgagccctccgaatcctactcatcctagctagcgctgcctgccctgcttcactccctcccaccctcactggcgcctcaccatgatccatgtcgactttccctcctccaccccccagcgccgctaggagccccgtcgccagggtgcgcctcgaccacctggtcccgttcgacggcgccttcaccccggcctacgcgcgcgcagtcgaagccgtcgctgcttccctcacgcgccacggcgccgccgccgtcgacctccctgcagcggacgccgctgtcgtccggtgcgccctcgagtccgcgcgcgccttcttctgcgaccgctccggcctctacgtctaccgcgccgggagggctctggatgatggagagttgtcacctgcttgcatgtctgatgctttcagatgtttggtgctttcagccatttgcttgatgacaacccattgcctcttgatgaggtttcagcttcagaattgatggtgtcattttctcatgggcacccccaaagcagccaggcacctatggtgggcctcaggccatcaatggctgaagttgatagaggttttgttacactggttgcttctgaccatccaggaattgaggtttgcaacccaaatggtcattggtacccagcggatgtgggctcaagccctgatgtcctgttgcttttgactggaagagccttgagtcatgttactgctggcctacgtctaaattctcagtacaggatcattaataatgaaaacagggcatcactcatgtttaggctcatgcctcgtgccaatgcaatattggactgctctccaatttcagctgctgggcattgcacaccacagatccaccggcccatatctgcaagtcagtttatggatgatttgcgtgctgaagagaatgtttaccatcacttagaagcaccgcctgaatcacagggaaactttgttaatgaaccatcgctcagaagtgtactgtcagaccctttgtctggggcttttcttgaagatgctatggttctcccatgtgggcactcgtttggtggcctcatgctgaagaaagttcttgaattggtatattcagagactttgtattcagtttttttaacatttctcaaaaaaattggtttgtttgtaaatcagtgacatcaagaataaagctatatgctttactttagatactatattgttcttttagatatgatcaatatcctgaatctttgatttatctggttatggttgtgtatagcccagtccgctgtttctgcaacttagttgttagtaggtcaatcccttatatgcaaaatttctctgttctggaaccagaatacagtacaactctgagaaagtaattaccgatcagaagccacatgtcataagaaactgataatgatttagtaatccacaaagtatttttgttaggacctaacatgcaacggagacagcataccattttttttttaaaaaaatcttctcaggcaaggtgcagcatttgcaacggagatgttgatgaggcctccttatttcctaacctcgtatcgaatgttacacagctctaagagcggtagctaccgtggtgaagatggaagacgataggaggctctttcacaatgcggcccttcgaaagcgcaggaaagaagtgactgagcatatggatgcccaaaggcgaaatggaagtagcaaggacagtattgagctggggctagaagctgaaagccctagagcgttcaagggggtgcagtacccgtttgtggtgggtgagagagtcctgatcatgggaaacaaaaggacgcctgataaattcgttgggaaggaggcagtggtgacatcacagtgcctgaatggctggtaccttgtgaaggcagttgatagcggagaaagcatacggctgcagtacaggtcgctgaggaaagcaggggagctacaagtgcaagcactcctgcagagtagacgatgattttttgcactagtgttgcttgtctcgtgttttgtttctgtcctatgcgatgaaaaggaaaaggaaaggatgcagcgtccttttgtacaaatttccattcagttttgccagccaagtcacgtagctgtaaaatgacagatgttgtgtggtgttctgtggcctttgtgcttgtgcactaagtcttgttaattgtcatacatgctcccttcgtaaaaaaaaaggagtcttaagtacaagattttttttctaaatattttgattaaattagtataaaatatttacaacatttatatctttaaataaagttgat

SEQ ID NO: 56443 - DNA, 2332 bp, Zea Mays
tttattataatacgactagtgaagtatatttatgttacacgagtggtcattatctatgtgtattgattttgatcaccggctattcatattcatatattggagaatgttcgaatccatatgtgtattcactacaaaatatgaatattgatgtgaaatagactatctaatttgtattcgatcagttcattttcactggaaaggcagaaagcagagaaattccatacgttcgtactcgttggctagcatattatcctctaccacttgaaaacaacaattcgccaaaaaaaaaaacattcatagcacggcccatttttgcaaaaatggtggttgggccttatcagcatcacagctcagcccagtccagcgacagtgatgttagtttgtgttggcctcctgctgctcctcctcctgctgctccacggcgtcggcgtcggtggcgccgttccggcgagccctccgaatcctactcatcctagctagcgctgcctgccctgcttcactccctcccaccctcactggcgcctcaccatgatccatgtcgactttccctcctccaccccccagcgccgctaggagccccgtcgccagggtgcgcctcgaccacctggtcccgttcgacggcgccttcaccccggcctacgcgcgcgcagtcgaagccgtcgctgcttccctcacgcgccacggcgccgccgccgtcgacctccctgcagcggacgccgctgtcgtccggtgcgccctcgagtccgcgcgcgccttcttctgcgaccgctccggcctctacgtctaccgcgccgggagggctctggatgatggagagttgtcacctgcttgcatgtctgatgctttcagatgtttgggtaagacagcccgtgctgctctctgtgcaatagcacggaaccttcgcttacgttcagatgctttcagccatttgcttgatgacaacccattgcctcttgatgaggtttcagcttcagaattgatggtgtcattttctcatgggcacccccaaagcagccaggcacctatggtgggcctcaggccatcaatggctgaagttgatagaggttttgttacactggttgcttctgaccatccaggaattgaggtttgcaacccaaatggtcattggtacccagcggatgtgggctcaagccctgatgtcctgttgcttttgactggaagagccttgagtcatgttactgctggcctacgtctaaattctcagtacaggatcattaataatgaaaacagggcatcactcatgtttaggctcatgcctcgtgccaatgcaatattggactgctctccaatttcagctgctgggcattgcacaccacagatccaccggcccatatctgcaagtcagtttatggatgatttgcgtgctgaagagaatgtttaccatcacttagaagcaccgcctgaatcacagggaaactttgttaatgaaccatcgctcagaagtgtactgtcagaccctttgtctggggcttttcttgaagatgctatggttctcccatgtgggcactcgtttggtggcctcatgctgaagaaagttcttgaattggcaaggtgcagcatttgcaacggagatgttgatgaggcctccttatttcctaacctcgtatcgaatgttacacagctctaagagcggtagctaccgtggtgaagatggaagacgataggaggctctttcacaatgcggcccttcgaaagcgcaggaaagaagtgactgagcatatggatgcccaaaggcgaaatggaagtagcaaggacagtattgagctggggctagaagctgaaagccctagagcgttcaagggggtgcagtacccgtttgtgggaaacaaaaggacgcctgataaattcgttgggaaggaggcagtggtgacatcacagtgcctgaatggctggtaccttgtgaaggcagttgatagcggagaaagcatacggctgcagtacaggtcgctgaggaaagcaggggagctacaagtgcaagcactcctgcagagtagacgatgattttttgcactagtgttgcttgtctcgtgttttgtttctgtcctatgcgatgaaaaggaaaaggaaaggatgcagcgtccttttgtacaaatttccattcagttttgccagccaagtcacgtagctgtaaaatgacagatgttgtgtggtgttctgtggcctttgtgcttgtgcactaagtcttgttaattgtcatacatgctcccttcgtaaaaaaaaaggagtcttaagtacaagattttttttctaaatattttgattaaattagtataaaatatttacaacatttatatctttaaataaagttgat

SEQ ID NO: 56444 - DNA, 2743 bp, Zea Mays
tttattataatacgactagtgaagtatatttatgttacacgagtggtcattatctatgtgtattgattttgatcaccggctattcatattcatatattggagaatgttcgaatccatatgtgtattcactacaaaatatgaatattgatgtgaaatagactatctaatttgtattcgatcagttcattttcactggaaaggcagaaagcagagaaattccatacgttcgtactcgttggctagcatattatcctctaccacttgaaaacaacaattcgccaaaaaaaaaaacattcatagcacggcccatttttgcaaaaatggtggttgggccttatcagcatcacagctcagcccagtccagcgacagtgatgttagtttgtgttggcctcctgctgctcctcctcctgctgctccacggcgtcggcgtcggtggcgccgttccggcgagccctccgaatcctactcatcctagctagcgctgcctgccctgcttcactccctcccaccctcactggcgcctcaccatgatccatgtcgactttccctcctccaccccccagcgccgctaggagccccgtcgccagggtgcgcctcgaccacctggtcccgttcgacggcgccttcaccccggcctacgcgcgcgcagtcgaagccgtcgctgcttccctcacgcgccacggcgccgccgccgtcgacctccctgcagcggacgccgctgtcgtccggtgcgccctcgagtccgcgcgcgccttcttctgcgaccgctccggcctctacgtctaccgcgccgggagggctctggatgatggagagttgtcacctgcttgcatgtctgatgctttcagatgtttgggtaagacagcccgtgctgctctctgtgcaatagcacggaaccttcgcttacgttcagatgctttcagccatttgcttgatgacaacccattgcctcttgatgaggtttcagcttcagaattgatggtgtcattttctcatgggcacccccaaagcagccaggcacctatggtgggcctcaggccatcaatggctgaagttgatagaggttttgttacactggttgcttctgaccatccaggaattgaggtttgcaacccaaatggtcattggtacccagcggatgtgggctcaagccctgatgtcctgttgcttttgactggaagagccttgagtcatgttactgctggcctacgtctaaattctcagtacaggatcattaataatgaaaacagggcatcactcatgtttaggctcatgcctcgtgccaatgcaatattggactgctctccaatttcagctgctgggcattgcacaccacagatccaccggcccatatctgcaagtcagtttatggatgatttgcgtgctgaagagaatgtttaccatcacttagaagcaccgcctgaatcacagggaaactttgttaatgaaccatcgctcagaagtgtactgtcagaccctttgtctggggcttttcttgaagatgctatggttctcccatgtgggcactcgtttggtggcctcatgctgaagaaagttcttgaattggtatattcagagactttgtattcagtttttttaacatttctcaaaaaaattggtttgtttgtaaatcagtgacatcaagaataaagctatatgctttactttagatactatattgttcttttagatatgatcaatatcctgaatctttgatttatctggttatggttgtgtatagcccagtccgctgtttctgcaacttagttgttagtaggtcaatcccttatatgcaaaatttctctgttctggaaccagaatacagtacaactctgagaaagtaattaccgatcagaagccacatgtcataagaaactgataatgatttagtaatccacaaagtatttttgttaggacctaacatgcaacggagacagcataccattttttttttaaaaaaatcttctcaggcaaggtgcagcatttgcaacggagatgttgatgaggcctccttatttcctaacctcgctctaagagcggtagctaccgtggtgaagatggaagacgataggaggctctttcacaatgcggcccttcgaaagcgcaggaaagaagtgactgagcatatggatgcccaaaggcgaaatggaagtagcaaggacagtattgagctggggctagaagctgaaagccctagagcgttcaagggggtgcagtacccgtttgtggtgggtgagagagtcctgatcatgggaaacaaaaggacgcctgataaattcgttgggaaggaggcagtggtgacatcacagtgcctgaatggctggtaccttgtgaaggcagttgatagcggagaaagcatacggctgcagtacaggtcgctgaggaaagcaggggagctacaagtgcaagcactcctgcagagtagacgatgattttttgcactagtgttgcttgtctcgtgttttgtttctgtcctatgcgatgaaaaggaaaaggaaaggatgcagcgtccttttgtacaaatttccattcagttttgccagccaagtcacgtagctgtaaaatgacagatgttgtgtggtgttctgtggcctttgtgcttgtgcactaagtcttgttaattgtcatacatgctcccttcgtaaaaaaaaaggagtcttaagtacaagattttttttctaaatattttgattaaattagtataaaatatttacaacatttatatctttaaataaagttgat

SEQ ID NO: 56445 - DNA, 2578 bp, Zea Mays
tttattataatacgactagtgaagtatatttatgttacacgagtggtcattatctatgtgtattgattttgatcaccggctattcatattcatatattggagaatgttcgaatccatatgtgtattcactacaaaatatgaatattgatgtgaaatagactatctaatttgtattcgatcagttcattttcactggaaaggcagaaagcagagaaattccatacgttcgtactcgttggctagcatattatcctctaccacttgaaaacaacaattcgccaaaaaaaaaaacattcatagcacggcccatttttgcaaaaatggtggttgggccttatcagcatcacagctcagcccagtccagcgacagtgatgttagtttgtgttggcctcctgctgctcctcctcctgctgctccacggcgtcggcgtcggtggcgccgttccggcgagccctccgaatcctactcatcctagctagcgctgcctgccctgcttcactccctcccaccctcactggcgcctcaccatgatccatgtcgactttccctcctccaccccccagcgccgctaggagccccgtcgccagggtgcgcctcgaccacctggtcccgttcgacggcgccttcaccccggcctacgcgcgcgcagtcgaagccgtcgctgcttccctcacgcgccacggcgccgccgccgtcgacctccctgcagcggacgccgctgtcgtccggtgcgccctcgagtccgcgcgcgccttcttctgcgaccgctccggcctctacgtctaccgcgccgggagggctctggatgatggagagttgtcacctgcttgcatgtctgatgctttcagatgtttgggtaagacagcccgtgctgctctctgtgcaatagcacggaaccttcgcttacgttcagatgctttcagccatttgcttgatgacaacccattgcctcttgatgaggtttcagcttcagaattgatggtgtcattttctcatgggcacccccaaagcagccaggcacctatggtgggcctcaggccatcaatggctgaagttgatagaggttttgttacactggttgcttctgaccatccaggaattgaggtgtgaagttgctcatcctgtaactcttttgtaatctttgttcagaatggcacaaataacaaagtttgtgcctggttctagtattacttatggtgaaacgcactgctgtcttgtatcctcctcctgtttagtcagttagtgttttctttccaggtttgcatttgactgacttctttacattgccttgtcactagtgctttttcatatttcgattcctgactgtttatcttcttttgcaggtttgcaacccaaatggtcattggtacccagcggatgtgggctcaagccctgatgtcctgttgcttttgactggaagagccttgagtcatgttactgctggcctacgtctaaattctcagtacaggatcattaataatgaaaacagggcatcactcatgtttaggctcatgcctcgtgccaatgcaatattggactgctctccaatttcagctgctgggcattgcacaccacagatccaccggcccatatctgcaagtcagtttatggatgatttgcgtgctgaagagaatgtttaccatcacttagaagcaccgcctgaatcacagggaaactttgttaatgaaccatcgctcagaagtgtactgtcagaccctttgtctggggcttttcttgaagatgctatggttctcccatgtgggcactcgtttggtggcctcatgctgaagaaagttcttgaattggcaaggtgcagcatttgcaacggagatgttgatgaggcctccttatttcctaacctcgctctaagagcggtagctaccgtggtgaagatggaagacgataggaggctctttcacaatgcggcccttcgaaagcgcaggaaagaagtgactgagcatatggatgcccaaaggcgaaatggaagtagcaaggacagtattgagctggggctagaagctgaaagccctagagcgttcaagggggtgcagtacccgtttgtggtgggtgagagagtcctgatcatgggaaacaaaaggacgcctgataaattcgttgggaaggaggcagtggtgacatcacagtgcctgaatggctggtaccttgtgaaggcagttgatagcggagaaagcatacggctgcagtacaggtcgctgaggaaagcaggggagctacaagtgcaagcactcctgcagagtagacgatgattttttgcactagtgttgcttgtctcgtgttttgtttctgtcctatgcgatgaaaaggaaaaggaaaggatgcagcgtccttttgtacaaatttccattcagttttgccagccaagtcacgtagctgtaaaatgacagatgttgtgtggtgttctgtggcctttgtgcttgtgcactaagtcttgttaattgtcatacatgctcccttcgtaaaaaaaaaggagtcttaagtacaagattttttttctaaatattttgattaaattagtataaaatatttacaacatttatatctttaaataaagttgat

SEQ ID NO: 56446 - DNA, 2679 bp, Zea Mays
tttattataatacgactagtgaagtatatttatgttacacgagtggtcattatctatgtgtattgattttgatcaccggctattcatattcatatattggagaatgttcgaatccatatgtgtattcactacaaaatatgaatattgatgtgaaatagactatctaatttgtattcgatcagttcattttcactggaaaggcagaaagcagagaaattccatacgttcgtactcgttggctagcatattatcctctaccacttgaaaacaacaattcgccaaaaaaaaaaacattcatagcacggcccatttttgcaaaaatggtggttgggccttatcagcatcacagctcagcccagtccagcgacagtgatgttagtttgtgttggcctcctgctgctcctcctcctgctgctccacggcgtcggcgtcggtggcgccgttccggcgagccctccgaatcctactcatcctagctagcgctgcctgccctgcttcactccctcccaccctcactggcgcctcaccatgatccatgtcgactttccctcctccaccccccagcgccgctaggagccccgtcgccagggtgcgcctcgaccacctggtcccgttcgacggcgccttcaccccggcctacgcgcgcgcagtcgaagccgtcgctgcttccctcacgcgccacggcgccgccgccgtcgacctccctgcagcggacgccgctgtcgtccggtgcgccctcgagtccgcgcgcgccttcttctgcgaccgctccggcctctacgtctaccgcgccgggagggctctggatgatggagagttgtcacctgcttgcatgtctgatgctttcagatgtttgggtaagacagcccgtgctgctctctgtgcaatagcacggaaccttcgcttacgttcagatgctttcagccatttgcttgatgacaacccattgcctcttgatgaggtttcagcttcagaattgatggtgtcattttctcatgggcacccccaaagcagccaggcacctatggtgggcctcaggccatcaatggctgaagttgatagaggttttgttacactggttgcttctgaccatccaggaattgaggtgtgaagttgctcatcctgtaactcttttgtaatctttgttcagaatggcacaaataacaaagtttgtgcctggttctagtattacttatggtgaaacgcactgctgtcttgtatcctcctcctgtttagtcagttagtgttttctttccaggtttgcatttgactgacttctttacattgccttgtcactagtgctttttcatatttcgattcctgactgtttatcttcttttgcaggtttgcaacccaaatggtcattggtacccagcggatgtgggctcaagccctgatgtcctgttgcttttgactggaagagccttgagtcatgttactgctggcctacgtctaaattctcagtacaggatcattaataatgaaaacagggcatcactcatgtttaggctcatgcctcgtgccaatgcaatattggactgctctccaatttcagctgctgggcattgcacaccacagatccaccggcccatatctgcaagtcagtttatggatgatttgcgtgctgaagagaatgtttaccatcacttagaagcaccgcctgaatcacagggaaactttgttaatgaaccatcgctcagaagtgtactgtcagaccctttgtctggggcttttcttgaagatgctatggttctcccatgtgggcactcgtttggtggcctcatgctgaagaaagttcttgaattggcaaggtgcagcatttgcaacggagatgttgatgaggcctccttatttcctaacctcgtatcgaatgttacacagctctaagagcggtagctaccgtggtgaagatggaagacgataggaggctctttcacaatgcggcccttcgaaagcgcaggaaagaagtgactgagcatatggatgcccaaaggcgaaatggaagtagcaaggacagtattgagctggggctagaagctgaaagccctagagcgttcaagggggtgcagtacccgtttgtggtgggtgagagagtcctgatcatgggaaacaaaaggacgcctgataaattcgttgggaaggaggcagtggtgacatcacagtgcctgaatggctggtaagctgttgggattattattattatttttcccccttgggttagaagtttggcttagtggcagaagccgtccgggggctgcaggtaccttgtgaaggcagttgatagcggagaaagcatacggctgcagtacaggtcgctgaggaaagcaggggagctacaagtgcaagcactcctgcagagtagacgatgattttttgcactagtgttgcttgtctcgtgttttgtttctgtcctatgcgatgaaaaggaaaaggaaaggatgcagcgtccttttgtacaaatttccattcagttttgccagccaagtcacgtagctgtaaaatgacagatgttgtgtggtgttctgtggcctttgtgcttgtgcactaagtcttgttaattgtcatacatgctcccttcgtaaaaaaaaaggagtcttaagtacaagattttttttctaaatattttgattaaattagtataaaatatttacaacatttatatctttaaataaagttgat

SEQ ID NO: 56447 - DNA, 2261 bp, Zea Mays
tttattataatacgactagtgaagtatatttatgttacacgagtggtcattatctatgtgtattgattttgatcaccggctattcatattcatatattggagaatgttcgaatccatatgtgtattcactacaaaatatgaatattgatgtgaaatagactatctaatttgtattcgatcagttcattttcactggaaaggcagaaagcagagaaattccatacgttcgtactcgttggctagcatattatcctctaccacttgaaaacaacaattcgccaaaaaaaaaaacattcatagcacggcccatttttgcaaaaatggtggttgggccttatcagcatcacagctcagcccagtccagcgacagtgatgttagtttgtgttggcctcctgctgctcctcctcctgctgctccacggcgtcggcgtcggtggcgccgttccggcgagccctccgaatcctactcatcctagctagcgctgcctgccctgcttcactccctcccaccctcactggcgcctcaccatgatccatgtcgactttccctcctccaccccccagcgccgctaggagccccgtcgccagggtgcgcctcgaccacctggtcccgttcgacggcgccttcaccccggcctacgcgcgcgcagtcgaagccgtcgctgcttccctcacgcgccacggcgccgccgccgtcgacctccctgcagcggacgccgctgtcgtccggtgcgccctcgagtccgcgcgcgccttcttctgcgaccgctccggcctctacgtctaccgcgccgggagggctctggatgatggagagttgtcacctgcttgcatgtctgatgctttcagatgtttggtgctttcagccatttgcttgatgacaacccattgcctcttgatgaggtttcagcttcagaattgatggtgtcattttctcatgggcacccccaaagcagccaggcacctatggtgggcctcaggccatcaatggctgaagttgatagaggttttgttacactggttgcttctgaccatccaggaattgaggtttgcaacccaaatggtcattggtacccagcggatgtgggctcaagccctgatgtcctgttgcttttgactggaagagccttgagtcatgttactgctggcctacgtctaaattctcagtacaggatcattaataatgaaaacagggcatcactcatgtttaggctcatgcctcgtgccaatgcaatattggactgctctccaatttcagctgctgggcattgcacaccacagatccaccggcccatatctgcaagtcagtttatggatgatttgcgtgctgaagagaatgtttaccatcacttagaagcaccgcctgaatcacagggaaactttgttaatgaaccatcgctcagaagttggggcttttcttgaagatgctatggttctcccatgtgggcactcgtttggtggcctcatgctgaagaaagttcttgaattggcaaggtgcagcatttgcaacggagatgttgatgaggcctccttatttcctaacctcgctctaagagcggtagctaccgtggtgaagatggaagacgataggaggctctttcacaatgcggcccttcgaaagcgcaggaaagaagtgactgagcatatggatgcccaaaggcgaaatggaagtagcaaggacagtattgagctggggctagaagctgaaagccctagagcgttcaagggggtgcagtacccgtttgtggtgggtgagagagtcctgatcatgggaaacaaaaggacgcctgataaattcgttgggaaggaggcagtggtgacatcacagtgcctgaatggctggtaccttgtgaaggcagttgatagcggagaaagcatacggctgcagtacaggtcgctgaggaaagcaggggagctacaagtgcaagcactcctgcagagtagacgatgattttttgcactagtgttgcttgtctcgtgttttgtttctgtcctatgcgatgaaaaggaaaaggaaaggatgcagcgtccttttgtacaaatttccattcagttttgccagccaagtcacgtagctgtaaaatgacagatgttgtgtggtgttctgtggcctttgtgcttgtgcactaagtcttgttaattgtcatacatgctcccttcgtaaaaaaaaaggagtcttaagtacaagattttttttctaaatattttgattaaattagtataaaatatttacaacatttatatctttaaataaagttgat

SEQ ID NO: 56448 - DNA, 4103 bp, Zea Mays
aaacccttcctctcccgttcttccttttttctttctttccacctcgcgccccgcctcgcctctcccaccatggcctccgccgccgccgccctctaccggagcccctccttgctgagccgccgccacctcctcatccgcctcctctccacgcagacccagctcgtcaccccaccgacgcccaccaccccggccgacctgtcccgcctcaagtcctccatccgcgacgccgccaccaccccggacgcgcttgccaccctgttcctctcgggcctcccgcacccggccttcctcgccgaccgtccgctcttcgcgctctccgtgcaccgcctcgcctccgccggccgccgcgacctcgtcgcctccgtcctctcctcctccctcaccgccctccccagcccacacccgtccgagggattcctcctacgcctcatctccctctactcggccgcaggtatgcccgaccactccctcgccgtcttccgcctcgtcaagcccgcctccgaccgcgccctctccgcgctcctatccgcctaccacgacaaccgcctttacgaccgcaccgtccgggccttcaacaccctccccgccgagctcggtatcaagccgggactcgtctcccacaacgtcctcctcaaggccctcgtcgccagcggggacgtcgccgcagcccacaccttattcgacgaaatgcctgacaccgctggcgtccaaccggacatcgtctcctgcaacgagatcctcaagggctacctcaacgccggcgacgccgacgcctttgatcggctagtcaaggagatcgctggtccgaaaaggcgcctgaagcctaatgtcgggacctacaacctccggatggccctgctgtgctccaaaatgaggagctttgaagctgaagaactgttggatgtcatgggggcaaacggcgtcccgcccaaccgcacgagcttcaacacggtcatcaaggggctctgcaacgagggggaggtgggcgctgccatggctctcttcaagaggatgccggaggtgcccaggcagcacggcaaaggggtctcccccaactttgagacctacattatgctgctcgaggctcttgtcaagaagaatttgtttgatcctgcgctggagatctgcaaggagtgcctgcgcaacaagtgggcgccgccattccaagctgttaaaggtttggttcagggtttgctcaagagcaggaaggccaagcacgcaagggaggttttcatggccatgagaaaggctgtcaagggtgacgccaagcaggagtggatcaaggttgaggctcagttcccgatgttgcttgctgacaagaaagcctaaccaccaggatcattttgcagcctacatctgttattgctcaaaatgcaggttacgctgtcctcagtgtggagtttgaaataggagatatgatggataagttgatggagatagttaactggttagtggttgtgtcaaacatttgtgctgcaagcaaaataatagtttcgaggactattttggtgatatattcagtaaatttcttttgctgaatcaatcaatcatcatgcaccgggtgcctgattacataaagggctgtgctaaaggatcagcagagctttgcctttcccaactcggagaagtgtcgaagcctttgctagcatttggccgttatctggcaaacaatttctgtagtaaatttaaagctaagttggttgttatctggtgctgattgattgtattggaaatctttatttatttatttattataatacgactagtgaagtatatttatgttacacgagtggtcattatctatgtgtattgattttgatcaccggctattcatattcatatattggagaatgttcgaatccatatgtgtattcactacaaaatatgaatattgatgtgaaatagactatctaatttgtattcgatcagttcattttcactggaaaggcagaaagcagagaaattccatacgttcgtactcgttggctagcatattatcctctaccacttgaaaacaacaattcgccaaaaaaaaaaacattcatagcacggcccatttttgcaaaaatggtggttgggccttatcagcatcacagctcagcccagtccagcgacagtgatgttagtttgtgttggcctcctgctgctcctcctcctgctgctccacggcgtcggcgtcggtggcgccgttccggcgagccctccgaatcctactcatcctagctagcgctgcctgccctgcttcactccctcccaccctcactggcgcctcaccatgatccatgtcgactttccctcctccaccccccagcgccgctaggagccccgtcgccagggtgcgcctcgaccacctggtcccgttcgacggcgccttcaccccggcctacgcgcgcgcagtcgaagccgtcgctgcttccctcacgcgccacggcgccgccgccgtcgacctccctgcagcggacgccgctgtcgtccggtgcgccctcgagtccgcgcgcgccttcttctgcgaccgctccggcctctacgtctaccgcgccgggagggctctggatgatggagagttgtcacctgcttgcatgtctgatgctttcagatgtttgggtaagacagcccgtgctgctctctgtgcaatagcacggaaccttcgcttacgttcagatgctttcagccatttgcttgatgacaacccattgcctcttgatgaggtttcagcttcagaattgatggtgtcattttctcatgggcacccccaaagcagccaggcacctatggtgggcctcaggccatcaatggctgaagttgatagaggttttgttacactggttgcttctgaccatccaggaattgaggtttgcaacccaaatggtcattggtacccagcggatgtgggctcaagccctgatgtcctgttgcttttgactggaagagccttgagtcatgttactgctggcctacgtctaaattctcagtacaggatcattaataatgaaaacagggcatcactcatgtttaggctcatgcctcgtgccaatgcaatattggactgctctccaatttcagctgctgggcattgcacaccacagatccaccggcccatatctgcaagtcagtttatggatgatttgcgtgctgaagagaatgtttaccatcacttagaagcaccgcctgaatcacagggaaactttgttaatgaaccatcgctcagaagtgtactgtcagaccctttgtctggggcttttcttgaagatgctatggttctcccatgtgggcactcgtttggtggcctcatgctgaagaaagttcttgaattggcaaggtgcagcatttgcaacggagatgttgatgaggcctccttatttcctaacctcgtatcgaatgttacacagctctaagagcggtagctaccgtggtgaagatggaagacgataggaggctctttcacaatgcggcccttcgaaagcgcaggaaagaagtgactgagcatatggatgcccaaaggcgaaatggaagtagcaaggacagtattgagctggggctagaagctgaaagccctagagcgttcaagggggtgcagtacccgtttgtggtgggtgagagagtcctgatcatgggaaacaaaaggacgcctgataaattcgttgggaaggaggcagtggtgacatcacagtgcctgaatggctggtaccttgtgaaggcagttgatagcggagaaagcatacggctgcagtacaggtcgctgaggaaagcaggggagctacaagtgcaagcactcctgcagagtagacgatgattttttgcactagtgttgcttgtctcgtgttttgtttctgtcctatgcgatgaaaaggaaaaggaaaggatgcagcgtccttttgtacaaatttccattcagttttgccagccaagtcacgtagctgtaaaatgacagatgttgtgtggtgttctgtggcctttgtgcttgtgcactaagtcttgttaattgtcatacatgctcccttcgtaaaaaaaaaggagtcttaagtacaagattttttttctaaatattttgattaaattagtataaaatatttacaacatttatatctttaaataaagttgat

SEQ ID NO: 56449 - DNA, 1132 bp, Zea Mays
ggttggtttctttctctcctctctcctctcctctcctctccccgtggccacaccacagccgccggaagctcctcctcctcctcctccttctccatgagagagatctagcaaagcatagcctccttcctgctggcgggatctccttttgattcgtaacttataacgaaagaggaggaggcacagcaccttgtcaaatgatgaactctcagaagctgcagctgcccgttcaggatctgatgagtctgagagggagatcattcatcatcagcaaggttgctgcccatcccagttccagcaggaggcggcgtcctcgtggcctcgttgccgcggccggcagtgacgacgacgaatgcgcttcagctggtggtgagtccgagtcgtcgtcgtcgggcgggaaagacgatggcggcggcggcttgtcccgagaggatctggaacgcctggtcgggagtgacgaagatgccaagttcaatgggttggatcttgcaaacctcatcaggaagaagtacggtagatcgtacgatgtgacgctgataaagaaagagttcatggggaggaatctgctggccatgaatgtgatgtggaagtacagggagcaaagatcgttcccgctgagcgaggaggagtacctgctgcggctggacgatgtcgccaacacgctcaagtgctggggagccgtggcgcacgtgcgcaacacgctggagaagctcaaggagaggccgcgcatcggcaaggccgtcagcatcttcatcgacatggaccagaccggaggccgctccaacgaatggatttacaagtagcttcccactccatcgatcatgtatatgcatccatcgcccccatgaacaaacacattcatcaggtgtatggagaatgaatgtgggtaccaatttcatctccaacaatcaagcacatcgcaaagatcataccatcacatgatcttattgattcttagatcgcacctaagcatgtctcttgatattctcacatatgacaccatgcatgtatacaacgagctccttcatcaatactagttaagtattgcaatacgtccaagccgcatcaccaccatggctcatattgctcacactagtgtattatggactaatcatctctttatctgaacatagac

SEQ ID NO: 56450 - DNA, 1125 bp, Zea Mays
ggttggtttctttctctcctctctcctctcctctcctctccccgtggccacaccacagccgccggaagctcctcctcctcctcctccttctccatgagagagatctagcaaagcatagcctccttcctgctggcgggatctccttttgattcataacgaaagaggaggaggcacagcaccttgtcaaatgatgaactctcagaagctgcagctgcccgttcaggatctgatgagtctgagagggagatcattcatcatcagcaaggttgctgcccatcccagttccagcaggaggcggcgtcctcgtggcctcgttgccgcggccggcagtgacgacgacgaatgcgcttcagctggtggtgagtccgagtcgtcgtcgtcgggcgggaaagacgatggcggcggcggcttgtcccgagaggatctggaacgcctggtcgggagtgacgaagatgccaagttcaatgggttggatcttgcaaacctcatcaggaagaagtacggtagatcgtacgatgtgacgctgataaagaaagagttcatggggaggaatctgctggccatgaatgtgatgtggaagtacagggagcaaagatcgttcccgctgagcgaggaggagtacctgctgcggctggacgatgtcgccaacacgctcaagtgctggggagccgtggcgcacgtgcgcaacacgctggagaagctcaaggagaggccgcgcatcggcaaggccgtcagcatcttcatcgacatggaccagaccggaggccgctccaacgaatggatttacaagtagcttcccactccatcgatcatgtatatgcatccatcgcccccatgaacaaacacattcatcaggtgtatggagaatgaatgtgggtaccaatttcatctccaacaatcaagcacatcgcaaagatcataccatcacatgatcttattgattcttagatcgcacctaagcatgtctcttgatattctcacatatgacaccatgcatgtatacaacgagctccttcatcaatactagttaagtattgcaatacgtccaagccgcatcaccaccatggctcatattgctcacactagtgtattatggactaatcatctctttatctgaacatagac

SEQ ID NO: 56451 - DNA, 3501 bp, Zea Mays
cttcctcttacggcccatccgctgggattggtaaagcccaagcaaagatggcccacgcgcggccacacccacgtcagcccatccgattcctcgccgccgccgccatgcttctcctttcctccgccatcttcaccaccgcacgcctcccactcgccgtctccgctcgcctcccaaaccctaccaacaccacccgcctcatcttcgccggcctacctgcctcctccccggtccgcgccttctgccccagggcgcgcccctccccctccacttgcgccgccttctcctccaccatggccgcctccgacaaccccctcctcgtcgccgacttcgacttcccgcccttcgaccgcgtcgagcccagccacgtccgccccggcatccacgaactgctaacacgactcgagggcgagcttgaagagctcgagaagggcatcgagcccacgtgggcgaagctggtcgagccgctagaacgcatcaccgacaggctcgaggtgatctggggcatggtcgatcacctcaagtccgtcaaggactccgctgatctccgcgccgccgtagaggaagtgcagcccgtaaaagtcagtttccaactaaggctaggacagagcaagcctatctatgaagctttcaaggccatcaggaactcttctaattgggacagtctcagcgatgctcgcaagcgtatagttgaagctcaaataaaggaagctgttctcagtggagttgcacttgaggatgaacaaaggaagaaatttaaccaaatcgaacaagagcttgaaaaactgacacaaaagtttagtgaaaatgtgctggatgccacaaagaaattcgagaagttaattactgataagaaagaaattgagggtttacctgctacagcccttggtttagcagcgcagactgctgtgtcaaagggccatgaaaatgctacagctgaaaatggaccttgggttatcacgttggatgcaccaagctatattcctgttatgcaacatgctcgaaacagagagctccgggaagaagtttatcgtgcttatctgacccgcgcctcaagcagtgaacttgataacaccaatatcatctgccaaattctaaagttaaggctagagaaggctaaacttcttggctacaagaactatgctgaggtaagcatggctcagaaaatggcaactgttgagcgagtagaagagcttctcgagaagctgcgtgctgcttcctgggatcatgctgtcaaagatatggaagatctgaaagtctttgcgaaagattctggttctcctgaagctaatgatttgactcactgggaccttaccttctggagtgaacgactgagagagtctaaatatgatatcaatgaggaagagctgcgcccttattttgcactacccaaggttatggatggcctcttcactctggcacataagctttttggagttactgttgaacctgcagatgggctggctccgatctggcacagtgatgtcaaattttattgtgtcaaagactcttccagtagccctgttgcttacttttacttcgatccttattcaagaccatctgaaaagcgtggaggggcttggatgaatgtagtcttttctcgaagtcgcgtgctagctcgcaatggtttggctgctaggctgcctgttgcccatatagtgtgcaatcagactccaccagttggcgagaagcccagtctcatgaccttccgtgaggttgaaactgtgttccatgaatttgggcacgcccttcagcacatgcttactaaacaagatgaaggctttgttgctggcattcgtggagttgaatgggatgctgtagagttaccctcccagttcatggagaactggtgctatcacaagaatactcttttgagcattgcaaaacattatgaaaccggtgaaactcttccagaggaaatttatgcgaagcttgtagctgcaaagaatttccgtgctggcaccttgagcctgcgtcagatacgatttgccagtgtagatatggagcttcatacaagttatgaccccaatggctcagtgtccatatatgatgtggaccaaagagttgcagaacggacacaagttcttgctcctctgccggaggacagattcctgtgcagctttagccatatttttgcaggtggctatgctgctggatactacagttacaagtgggctgaagtactgtcagctgatgcattctcagcttttgaagacgctggtttggatgatgagaaggcaatcgaggaaactggcagacgattcagagacactgttcttgcgcttggaggtggaaagtctccgcttgaggtgttcgtttcattccgaggacgggagccttcgcctgaaccacttcttagacaaaacggcttgcttcctgttgctgcctagtgccccaaagatttctctgttatttatgcttaaacagggaccattttcatccggtcaattatttgatgaagatagacatttcacccttgtttgtttaccctcctctagattattaaataagttagaagacaaacaaacaacatatattattaatgtatgtgttttttatatgtgtctagattcatcgtctgctatttgaatatagacataaaaatgaaatgaataccagttttttagaacggaatgataggtggtgcttatataatctataagcttgattgtaaacaaagagggcctaagctgaggtagtcatggtccaactgccggagctgcccgtggaggtctctactggctgacatgatctctggcatcaggggatgcgagcggtcgccggcaacaaactcgcagaccacgccgcccacctctagcatgctgcacccgggcaccttggccaccctcctctcctccatgtcccgccgcaccttgagcacctcctcccacttgccccacccggcgtacatgttggacagctgcacgtgcaccccgctgtggtccagccccagctccgccagccagcgtaccacctgctcgccggcctccacgtcgccgtgcgccgcgcaggcgttcagcaacgcgcccagcacgtacgagtcgggcctcatgggcatcgaacgcacggcctccaaggcgtccgccagctgtccggcgcggcccaggacgtccaccaggcacccgtagtgctccacgccgggctccatgccgtgcaccgcccccatgctgcggaacacctccttggcgcggccgacgaggcccgcgcggccgcaggcggtgagcacgcagatgaagctacgacgaagagcaagctggcaagtttgaacgagaagctggacatcctagagcggaagctggaggtgcttgaagtccaagtgggcagcgcgacgaccaacccttccgtcttcaactaggaatcgcgggtttatatgtataaataaatagataaatgtaggtatgaatgttgcttgtaccaacgaattctggtcgctatcaatcatgtaatgtaatggattttgttattattattgtggtatgtgtaaagatgtgcagaattgaaaag

SEQ ID NO: 56452 - DNA, 4435 bp, Zea Mays
caagcaaagatggcccacgcgcggccacacccacgtcagcccatccgattcctcgccgccgccgccatgcttctcctttcctccgccatcttcaccaccgcacgcctcccactcgccgtctccgctcgcctcccaaaccctaccaacaccacccgcctcatcttcgccggcctacctgcctcctccccggtccgcgccttctgccccagggcgcgcccctccccctccacttgcgccgccttctcctccaccatggccgcctccgacaaccccctcctcgtcgccgacttcgacttcccgcccttcgaccgcgtcgagcccagccacgtccgccccggcatccacgaactgctaacacgactcgagggcgagcttgaagagctcgagaagggcatcgagcccacgtgggcgaagctggtcgagccgctagaacgcatcaccgacaggctcgaggtgatctggggcatggtcgatcacctcaagtccgtcaaggactccgctgatctccgcgccgccgtagaggaagtgcaggttcacgatttatcttttttgctgttcgttctcggtcctaacctctctttttgagcaaagcagctcacatgatcaccgcctgttcgaatttgttgagcaaaggctgcaaagcagctcacatggatcaccgcctgttcgaatttgttgagcaaagcagctcacatggatctccgcctgatcgaattcgttgagcaaagcagctcacatggatcaccgcctgatcgaatttctgctttgtttcacagcccgtaaaagtcagtttccaactaaggctaggacagagcaagcctatctatgaagctttcaaggccatcaggaactcttctaattgggacagtctcagcgatgctcgcaagcgtatagttgaagctcaaataaaggaagctgttctcagtggagttgcacttgaggatgaacaaaggaagaaatttaaccaaatcgaacaagagcttgaaaaactgacacaaaagtttagtgaaaatgtgctggatgccacaaagaaattcgagaagttaattactgataagaaagaaattgagggtttacctgctacagcccttggtttagcagcgcagactgctgtgtcaaagggccatgaaaatgctacagctgaaaatggaccttgggttatcacgttggatgcaccaagctatattcctgttatgcaacatgctcgaaacagagagctccgggaagaagtttatcgtgcttatctgacccgcgcctcaagcagtgaacttgataacaccaatatcatctgccaaattctaaagttaaggctagagaaggctaaacttcttggctacaagaactatgctgaggtaagcatggctcagaaaatggcaactgttgagcgagtagaagagcttctcgagaagctgcgtgctgcttcctgggatcatgctgtcaaagatatggaagatctgaaagtctttgcgaaagattctggttctcctgaagctaatgatttgactcactgggaccttaccttctggagtgaacgactgagagagtctaaatatgatatcaatgaggaagagctgcgcccttattttgcactacccaaggttatggatggcctcttcactctggcacataagctttttggagttactgttgaacctgcagatgggctggctccgatctggcacagtgatgtcaaattttattgtgtcaaagactcttccagtagccctgttgcttacttttacttcgatccttattcaagaccatctgaaaagcgtggaggggcttggatgaatgtagtcttttctcgaagtcgcgtgctagctcgcaatggtttggctgctaggctgcctgttgcccatatagtgtgcaatcagactccaccagttggcgagaagcccagtctcatgaccttccgtgaggttgaaactgtgttccatgaatttgggcacgcccttcagcacatgcttactaaacaagatgaaggctttgttgctggcattcgtggagttgaatgggatgctgtagagttaccctcccagttcatggagaactggtgctatcacaagaatactcttttgagcattgcaaaacattatgaaaccggtgaaactcttccagaggaaatttatgcgaagcttgtagctgcaaagaatttccgtgctggcaccttgagcctgcgtcagatacgatttgccagtgtagatatggagcttcatacaagttatgaccccaatggctcagtgtccatatatgatgtggaccaaagagttgcagaacggacacaagttcttgctcctctgccggaggacagattcctgtgcagctttagccatatttttgcaggtggctatgctgctggatactacagttacaagtgggctgaagtactgtcagctgatgcattctcagcttttgaagacgctggtttggatgatgagaaggcaatcgaggaaactggcagacgattcagagacactgttcttgcgcttggaggtggaaagtctccgcttgaggtgttcgtttcattccgaggacgggagccttcgcctgaaccacttcttagacaaaacggcttgcttcctgttgctgcctagtgccccaaagatttctctgttatttatgcttaaacagggaccattttcatccggtcaattatttgatgaagatagacatttcacccttgtttgtttaccctcctctagattattaaataagttagaagacaaacaaacaacatatattattaatgtatgtgttttttatatgtgtctagattcatcgtctgctatttgaatatagacataaaaatgaaatgaataccagttttttagaacggaatgataggtggtgcttatataatctataagcttgattgtaaacaaagagggcctaagctgaggtagtcatggtccaactgccggagctgcccgtggaggtctctactggctgacatgatctctggcatcaggggatgcgagcggtcgccggcaacaaactcgcagaccacgccgcccacctctagcatgctgcacccgggcaccttggccaccctcctctcctccatgtcccgccgcaccttgagcacctcctcccacttgccccacccggcgtacatgttggacagctgcacgtgcaccccgctgtggtccagccccagctccgccagccagcgtaccacctgctcgccggcctccacgtcgccgtgcgccgcgcaggcgttcagcaacgcgcccagcacgtacgagtcgggcctcatgggcatcgaacgcacggcctccaaggcgtccgccagctgtccggcgcggcccaggacgtccaccaggcacccgtagtgctccacgccgggctccatgccgtgcaccgcccccatgctgcggaacacctccttggcgcggccgacgaggcccgcgcggccgcaggcggtgagcacgcagatgaaggtcacctcgttggggcgcaccccttccaccagcatctgcccgaacaggtcgatcgcctccccgcagcggccgtggtccgagagccccgagatcatggccgtgtaggcgaacacgtcccgctgcccccgcggtgccgccgcgaacacctgcctcgccgtttccaggctcccgcacttggcgtacatgtccaccagcgccgtcgccactacgccgtccatcgccacgccgtggccgccgccgccgacgagcaaggcgtgcacccacctgccctggtccagcgccccgagcgccccgcaggcggtcagcaccccgaccaccgccgccctgttggggcggacgcacgacctgagcatgtcctcgaacagccgcacggcgtcgccgaagctgcccgcggccacgtaggcgctcagcatggcgctccaggcgacatcgttcctgcggggcattccgtcgaacagggcgcgcgcctcatccacgtgcccggccttggcgcaggccgtgaggagcgacgtccaagagcacacgtcggccgcgcgggaggcgacggcgcctccgaagaggcggcgggcggctggcaggacgccgtgggtggcgtaggcgtggatgaggccgttggcgacgtaggcgtgggcgtcccaggccaggacgacggcgagggcgtggagacagggcacgatggcgtgggagccgaatggggactccggttccagatacggtggcgctgacgagtctgcggcggctttaaggaggaaggagaaggtgtagttgttcggccggaagtcggggatgatgcggcggaggcgcgggaacaggcggagggcgccgagcgggtgcgctgggagcagcgagcggagtagctggttggggaggaagcggtcggcgaggaggagcgtggaggagcggagcaggtgcccgtccacctgccggagctgagcggcgctcagcgacggccggcacagcagctgcagcgccgccgccgtggctattgattgcat

SEQ ID NO: 56453 - DNA, 596 bp, Zea Mays
gaatcccacgccaatgcggagatttcctctccatctccgttcccctggcaaccatctccaccacaccgtcggcacgcccgcggctaggatgtcggacgcgaagctaggcaccaccacaccaggctgccggagtcgacctgattttgattgatgacgatggaagaacctatttttggatgtcctgcgatgcaagtgaaattgtctgctgctctgctgcttaacaactccctaaacatatctgggtagcttgggactgcattggttggtgctatttcaattggtttatttgtgcctgagttattgtacccattaataaattgatgattattttgacattggtgataagttacagtaaactaaccaaaacagaaacaactgatttccccctaatgtacacagcttttcaaatatgtgatggatgtttcctattaaaagtattgaattccttgatgattcttttgacatcggtgataagtcacaggaaacaaaccaaaacagaaacaatagattttccccctaattttatgtttcagccatatgtgcgcaattttttaaatatgtggtgaatgtttcctgttaaaagtattgagttcctt

SEQ ID NO: 56454 - DNA, 714 bp, Zea Mays
gaatcccacgccaatgcggagatttcctctccatctccgttcccctggcaaccatctccaccacaccgtcggcacgcccgcggctaggatgtcggacgcgaagctaggcaccaccacaccaggctgccggagtcgacctgattttggtgaggaccactcgcatcgattggtttccttacgcaaagcagcaaccagccggcggcgtcggatgtcgtgggcgccacagagcaccgacgaacaactacactagcctttcgccccaagattgatgacgatggaagaacctatttttggatgtcctgcgatgcaagtgaaattgtctgctgctctgctgcttaacaactccctaaacatatctgggtagcttgggactgcattggttggtgctatttcaattggtttatttgtgcctgagttattgtacccattaataaattgatgattattttgacattggtgataagttacagtaaactaaccaaaacagaaacaactgatttccccctaatgtacacagcttttcaaatatgtgatggatgtttcctattaaaagtattgaattccttgatgattcttttgacatcggtgataagtcacaggaaacaaaccaaaacagaaacaatagattttccccctaattttatgtttcagccatatgtgcgcaattttttaaatatgtggtgaatgtttcctgttaaaagtattgagttcctt

SEQ ID NO: 56455 - DNA, 1438 bp, Zea Mays
atctcgggcgctactgatggaatatggatgggcaggcgaaagagcaggaggagcagaagaagcgcggtttgctgacgtctccatcccatcatgtattatcctcagcctaccgtctccttggcggcggcggttgccctcctccgcccctcactccgccgccactctcaaagggcgtcatcccttctccgctcctccacgccgcctccatgggttagtgcgaggaggaggacggccgtctccgacgacttcttcaccgtcgagttggacgctactggagtggaaccggaaccggattccatcgacgacgggctcccctctccatgggagggagctgtcgtctaccgccgcgacgctgccgtccagcacctcgagtacgccagcacgctggagcgcctcggcctaggggacctctcctcccccgactcccgcgcgcgcgccgctgacctgggcctggctggagggaccctggacagcactggcgcgcagcctcggacccccgtgctcgtctccgtcgacgtgaccaggcgccgcggccgcctgcgcctggacggcatcgtgcgcaccgtcatcaccctcggctgcttcaggtgtgctgagccagctcctcaaggtatatttgccaatttctccctgctgttgacagaagacccagtagaggaggaaccagacctcggcacgatttttcaagaggacgacgacaaaggtggtgcttcgctagcctgcgccatggatggagatcaagatatcgactgggatgaccggctgcatttcccagcagctgacaaggaaatcgatatatccaagcacatccgggacatgattcatctggagatcaccttggatgcagtgtgcaaccccaactgcaagggtctatgccttacctgcggcgcaaacctcaacaccaccagcagctgcacatgcaagcccaggaacgtccaaggactttctcctctcaaaggggttttcaagtgatgatgcggataccaaaattgatgacgatggaagaacctatttttggatgtcctgcgatgcaagtgaaattgtctgctgctctgctgcttaacaactccctaaacatatctgggtagcttgggactgcattggttggtgctatttcaattggtttatttgtgcctgagttattgtacccattaataaattgatgattattttgacattggtgataagttacagtaaactaaccaaaacagaaacaactgatttccccctaatgtacacagcttttcaaatatgtgatggatgtttcctattaaaagtattgaattccttgatgattcttttgacatcggtgataagtcacaggaaacaaaccaaaacagaaacaatagattttccccctaattttatgtttcagccatatgtgcgcaattttttaaatatgtggtgaatgtttcctgttaaaagtattgagttcctt

SEQ ID NO: 56456 - DNA, 1182 bp, Zea Mays
atctcgggcgctactgatggaatatggatgggcaggcgaaagagcaggaggagcagaagaagcgcggtttgctgacgtctccatcccatcatgtattatcctcagcctaccgtctccttggcggcggcggttgccctcctccgcccctcactccgccgccactctcaaagggcgtcatcccttctccgctcctccacgccgcctccatgggttagtgcgaggaggaggacggccgtctccgacgacttcttcaccgtcgagttggacgctactggagtggaaccggaaccggattccatcgacgacgggctcccctctccatgggagggagctgtcgtctaccgccgcgacgctgccgtccagcacctcgagtacgccagcacgctggagcgcctcggcctaggggacctctcctcccccgactcccgcgcgcgcgccgctgacctgggcctggctggagggaccctggacagcactggcgcgcagcctcggacccccgtgctcgtctccgtcgacgtgaccaggcgccgcggccgcctgcgcctggacggcatcgtgcgcaccgtcatcaccctcggctgcttcaggtgtgctgagccagctcctcaaggtatatttgccaatttctccctgctgttgacagaagacccagtagaggaggaaccagacctcggcacgatttttcaagaggacgacgacaaaggtggtgcttcgctagcctgcgccatggatggagatcaagatatcgactgggatgaccggctgcatttcccagcagctgacaaggaaatcgatatatccaagcacatccgggacatgattcatctggagatcaccttggatgcagtgtgcaaccccaactgcaagggtctatgccttacctgcggcgcaaacctcaacaccaccagcagctgcacatgcaagcccaggaacgtccaaggactttctcctctcaaaggggttttcaagtgatgatgcggataccaaaatactcactgaggtcaggatggtccttggcaagccttgaggacaacttatactggaactgttggtaggaatccggaaggttgccaacaacagaagcccggtaatgcccaacaccatcggtaccgcccattcattgtaagaaaaaaaactgttaagtgtaaacttgtagatgataaagcagtcaataagatcaac

SEQ ID NO: 56457 - DNA, 1227 bp, Zea Mays
atctcgggcgctactgatggaatatggatgggcaggcgaaagagcaggaggagcagaagaagcgcggtttgctgacgtctccatcccatcatgtattatcctcagcctaccgtctccttggcggcggcggttgccctcctccgcccctcactccgccgccactctcaaagggcgtcatcccttctccgctcctccacgccgcctccatgggttagtgcgaggaggaggacggccgtctccgacgacttcttcaccgtcgagttggacgctactggagtggaaccggaaccggattccatcgacgacgggctcccctctccatgggagggagctgtcgtctaccgccgcgacgctgccgtccagcacctcgagtacgccagcacgctggagcgcctcggcctaggggacctctcctcccccgactcccgcgcgcgcgccgctgacctgggcctggctggagggaccctggacagcactggcgcgcagcctcggacccccgtgctcgtctccgtcgacgtgaccaggcgccgcggccgcctgcgcctggacggcatcgtgcgcaccgtcatcaccctcggctgcttcaggctgtctttcaggtgtgctgagccagctcctcaaggtatatttgccaatttctccctgctgttgacagaagacccagtagaggaggaaccagacctcggcacgatttttcaagaggacgacgacaaaggtggtgcttcgctagcctgcgccatggatggagatcaagatatcgactgggatgaccggctgcatttcccagcagctgacaaggaaatcgatatatccaagcacatccgggacatgattcatctggagatcaccttggatgcagtgtgcaaccccaactgcaagggtctatgccttacctgcggcgcaaacctcaacaccaccagcagctgcacatgcaagcccaggaacgtccaaggactttctcctctcaaaggggttttcaagtgatgatgcggataccaaagtttgtacaaccagcccaacttcatgtcatgctatactcactgaggtcaggatggtccttggcaagccttgaggacaacttatactggaactgttggtaggaatccggaaggttgccaacaacagaagcccggtaatgcccaacaccatcggtaccgcccattcattgtaagaaaaaaaactgttaagtgtaaacttgtagatgataaagcagtcaataagatcaac

SEQ ID NO: 56458 - DNA, 1079 bp, Zea Mays
atctcgggcgctactgatggaatatggatgggcaggcgaaagagcaggaggagcagaagaagcgcggtttgctgacgtctccatcccatcatgtattatcctcagcctaccgtctccttggcggcggcggttgccctcctccgcccctcactccgccgccactctcaaagggcgtcatcccttctccgctcctccacgccgcctccatgggttagtgcgaggaggaggacggccgtctccgacgacttcttcaccgtcgagttggacgctactggagtggaaccggaaccggattccatcgacgacgggctcccctctccatgggagggagctgtcgtctaccgccgcgacgctgccgtccagcacctcgagtacgccagcacgctggagcgcctcggcctaggggacctctcctcccccgactcccgcgcgcgcgccgctgacctgggcctggctggagggaccctggacagcactggcgcgcagcctcggacccccgtgctcgtctccgtcgacgtgaccaggcgccgcggccgcctgcgcctggacggcatcgtgcgcaccgtcatcaccctcggctgcttcaggtgtgctgagccagctcctcaaggtatatttgccaatttctccctgctgttgacagaagacccagtagaggaggaaccagacctcggcacgatttttcaagaggacgacgacaaaggtggtgcttcgctagcctgcgccatggatggagatcaagatatcgactgggatgaccggctgcatttcccagcagctgacaaggaaatcgatatatccaagcacatccgggacatgattcatctggagatcaccttggatgcagtgtgcaaccccaactgcaagggtctatgccttacctgcggcgcaaacctcaacaccaccagcagctgcacatgcaagcccaggaacgtccaaggactttctcctctcaaaggggttttcaagtgatgatgcggataccaaagaccaggatgattatgtacataaataaataaaataaatgcctccgggaccacgaacaagaagggggacatgtgaggctggctatcgatgac

SEQ ID NO: 56459 - DNA, 5381 bp, Zea Mays
atctcgggcgctactgatggaatatggatgggcaggcgaaagagcaggaggagcagaagaagcgcggtttgctgacgtctccatcccatcatgtattatcctcagcctaccgtctccttggcggcggcggttgccctcctccgcccctcactccgccgccactctcaaagggcgtcatcccttctccgctcctccacgccgcctccatgggttagtgcgaggaggaggacggccgtctccgacgacttcttcaccgtcgagttggacgctactggagtggaaccggaaccggattccatcgacgacgggctcccctctccatgggagggagctgtcgtctaccgccgcgacgctgccgtccagcacctcgagtacgccagcacgctggagcgcctcggcctaggggacctctcctcccccgactcccgcgcgcgcgccgctgacctgggcctggctggagggaccctggacagcactggcgcgcagcctcggacccccgtgctcgtctccgtcgacgtgaccaggcgccgcggccgcctgcgcctggacggcatcgtgcgcaccgtcatcaccctcggctgcttcagaagacccagtagaggaggaaccagacctcggcacgatttttcaagaggacgacgacaaaggtggtgcttcgctagcctgcgccatggatggagatcaagatatcgactgggatgaccggctgcatttcccagcagctgacaaggaaatcgatatatccaagcacatccgggacatgattcatctggagatcaccttggatgcagtgtgcaaccccaactgcaagggtctatgccttacctgcggcgcaaacctcaacaccaccagcagctgcacatgcaagcccaggaacgtccaaggactttctcctctcaaaggggttttcaagtgatgatgcggataccaaagtttgtacaaccagcccaacttcatgtcatgctgtgagcctgtgacttctagattcatataatcgcaaatatgcattgaaacttcacatttatagattcacatccgcagatgacaaaataccaaatcgacttcatatatcttatgttcttcattgtaacaaaccaccaaagatgaaaaatcttaacaaccattttataaatattatcactcatcaatgttagattattctgtgtttctgatgtaatggccttgtgaaagggcctctagccgagttggttaggtggtctgagtagcactccttgggtcctcaggctgtggttaaaaaaaaaatccccttttctatgccacgccaaaacacaggtctaagtctcagccctcatcacggtcgttctcacatgggcttcgatgccgatgtgtatgtgtgggacatgggtttggaggttttctcgacctgtgtgagaatatcttcttaatacaaaactcgagggttgtcttaccctctgtaggtcaattttttttatgtaatgaccttcggcctagtctgtatactattcccatgcatgcctaccctaatcaaggttaagtcctctaacatggtatcaagtcaggttttctccccccccccttcctcctcctgtggccactgccttcctctccccgctcctcgctgtccaactgtagctatggaagccggtctccctctctctctcctctcctctcctttccttccctctctctcacagctggagtgccatcgtggccccttcgcctgccctcctcaacactaggcctcgtgccacacgcccttcccgacgcggcctccccaaccattgtacactctgtgtctgcccgcgagcctaggcttgccctcactgtcagcactgataccattgtacactctgcgcgggcattttatgccggtgagcctaggcgcactctcaccgtcagcgcctcccccaccattgtacactatgtgtctgcccgctccctccgtcgccacgtattccccgcatccttggctgccactactttgtccaccacctaacatcgttgtcttggacatcctggcttcgatgtcatgtacaaattgtttagcagctcagtcatctcttggagcaggggcttattttgatagttatgtcatgcttgtcagttagatcgaaatatttgcctccccttccctagtttctccttccaggctactcaggcttttgaccttgtgttttcaacctcttggggtataaatattacttactgattcctgatgatttctctcattttgtttggactttccctttgcatttgaagcctgacacattcaccaagctctcacacttttttgcttgggtctccacccagttcgaccgcattgttcgtactctctagcgtgacaacggttgtgggtttgaccactcctcttatcttcttcctttatcacgatgttcagctgcgactctcgtgcccctacacctccccttaaaatggttggattgagtgcatgattcgcaccaccaccaacatgttgtgttgcctcatcttccaagcttctcttcccacacactactgggttaaggcgctgaacactgccacatacctcattaattgtcttccctcccaggcgatcaaccatcccactctgttttttgccctcttcgataccaccccctcctatgagcatcttcgcgtcttcgagtgtgccttctatcccaacatccctactatcgcttcccacaaacttgcgccctgatccactcatcttttcatctggtactcccctaatcacaggggggtatcggtgcctcgatctcctcacttgccgtatcatcatctcccatcacatggtcttcaataaggacgtctttcctcttgtcggctcttccccacctcctaaccttgacaccctcttggatgtcgattctgtcgtcgtccctcctcttcagtcatggtatgtgatcctttcaatcatggtagcggtcaaatgtatgacttcgaggtatcagggcaaaagggggctcgagggcttatcctactagatgccttggggcacgaggagcctaatggattatgggtgtgtttggtttgacttttgactttggcttttgcctccctaaaagccaaaagccaaccaaagggctggatccaggaagcagctttttctaaaagccgactttctcgtagtgcaaatctaaaagcacctctgtacatgcttttagtggcttttcggatggaactatgaaaacatatattgaagaatttttaacgacttttagtggtttccaccaaacggtttttagctttttaacagcttacagtctacagcagctttttccacagctcacagcccacagcaacttttttcacagccacagcccaaccaaacagaccctatttatgaggtgccacggggcacaaaagggccatgaggcttagcttgctaggtgccctggggttgcgaggcttagggacttatgtgagatgccttagggcgcaaggggatctaaggattatcttgctaggtgccccgaggcgtgaagggccctatgggcttatttggtagatgtccataagcatatgaagctttaggggctagatcgataatcgacctagggtgcatggggccttttgaccaagatccttcaacacatcattgcaatagcctggggtatgccttcccccaggtgctatcagtcctcatcccaacatgagaaagccttctatgccataaccactaagtgatattttagtgattaggcatgtcttcaagttggcatcttggaaagtgaaatcaaccaagtatatgctgtatctaaatccttttagtatgaattgattattatctttctaggatacaacttgttcctctgtgaaagtgtgaataggtattgcaagacaagatcacataattgcccaacagatagcgaactgagactcaatgatgcaattaagagcacattagatattgactggtcatttgaaattgccgctttgcccaaacttttgactttccttttttgaattgtccctaaaggtatcttctcttgatcatccacttcttcagttagtgaggtgaacattcaagggtcatgggtcatgtgttgggtacatccacattcaattatctaatgactcctatcggtctttacttcacctatatgcaaggaagatcaagcttgatgtttaagcacccaaactcgatggggcctactaccttctcaaccaaagcctttccaacccaaatcttcttaggcctattcttgtttggtgggcctaagaacataactttgtcacttgcatctttccttatcatgcaatgtgcttcttttccatactcaaagaatctctttgacttaggcttaggtattgtcttgttttcttgttgatatttattctctttatgtgctcgataaccaatactgcttttgtccattttcatgacaatattcatgagaagttcactttgtggtattgtcccttaatgaatttttgctaattggtagcaagatgattctttttattgttttagtttcttgttttcttctctaagtttttcattgtcaagcgccattgcattatcaaccacttcattttctatgacaatattactcttgattactatcttttcaattcttgtccaatcttctcattttatttctcgattttctcaatctcgtcaagaagcttgttatctaccactttattgcatttgcttttagtacaatgttccatgctttcaataaattcatcatatgaggttgttatatcaatctcaattggattagtagcaacatgtgtttcactaaacaagagctcataaacaatagcaaggttatcatgattaactttaacatgagtatagttttctttcaaagagctaaatctagtgttgagctcctcatgtatctctttagggttagatgacatagttttattttcttctttaagctcgtaactggctttttattctatgacatagttagcaagtaaagacttattctcatgttttagtttcttattgtttcgtcttgtttttctaatgatttgagtatacttaataagcaaggcaactaattcatcatatgtgagaacgatgaattcttcatcgctatcactatcattgctataatcatagttttataccgttcgatcaccttttgccataagacatgagtgtgtagtggatgatggcagtgatggtggtagagaagaaaagtcaatagcaagtgcgaccatcttgtcttcatcgtcactagcgcatgaagatgagttacttgtgaagtcaatgttggtaagccaatcagcaacaatataggcataagcaggggcggatctccacccggggctgcctgggctgcagccccgggcggcactcgcggcccaccagaggcccaccgtcgcgctcagccccaaatcccaaccctagctccagcctctagctgccgcagctcctc

SEQ ID NO: 56460 - DNA, 5449 bp, Zea Mays
atctcgggcgctactgatggaatatggatgggcaggcgaaagagcaggaggagcagaagaagcgcggtttgctgacgtctccatcccatcatgtattatcctcagcctaccgtctccttggcggcggcggttgccctcctccgcccctcactccgccgccactctcaaagggcgtcatcccttctccgctcctccacgccgcctccatgggttagtgcgaggaggaggacggccgtctccgacgacttcttcaccgtcgagttggacgctactggagtggaaccggaaccggattccatcgacgacgggctcccctctccatgggagggagctgtcgtctaccgccgcgacgctgccgtccagcacctcgagtacgccagcacgctggagcgcctcggcctaggggacctctcctcccccgactcccgcgcgcgcgccgctgacctgggcctggctggagggaccctggacagcactggcgcgcagcctcggacccccgtgctcgtctccgtcgacgtgaccaggcgccgcggccgcctgcgcctggacggcatcgtgcgcaccgtcatcaccctcggctgcttcaggctgtctttcaggtgtgctgagccagctcctcaaggtatatttgccaatttctccctgctgttgacagaagacccagtagaggaggaaccagacctcggcacgatttttcaagaggacgacgacaaaggtggtgcttcgctagcctgcgccatggatggagatcaagatatcgactgggatgaccggctgcatttcccagcagctgacaaggaaatcgatatatccaagcacatccgggacatgattcatctggagatcaccttggatgcagtgtgcaaccccaactgcaagggtctatgccttacctgcggcgcaaacctcaacaccaccagcagctgcacatgcaagcccaggaacgtccaaggactttctcctctcaaaggggttttcaagtgatgatgcggataccaaagtttgtacaaccagcccaacttcatgtcatgctgtgagcctgtgacttctagattcatataatcgcaaatatgcattgaaacttcacatttatagattcacatccgcagatgacaaaataccaaatcgacttcatatatcttatgttcttcattgtaacaaaccaccaaagatgaaaaatcttaacaaccattttataaatattatcactcatcaatgttagattattctgtgtttctgatgtaatggccttgtgaaagggcctctagccgagttggttaggtggtctgagtagcactccttgggtcctcaggctgtggttaaaaaaaaaatccccttttctatgccacgccaaaacacaggtctaagtctcagccctcatcacggtcgttctcacatgggcttcgatgccgatgtgtatgtgtgggacatgggtttggaggttttctcgacctgtgtgagaatatcttcttaatacaaaactcgagggttgtcttaccctctgtaggtcaattttttttatgtaatgaccttcggcctagtctgtatactattcccatgcatgcctaccctaatcaaggttaagtcctctaacatggtatcaagtcaggttttctccccccccccttcctcctcctgtggccactgccttcctctccccgctcctcgctgtccaactgtagctatggaagccggtctccctctctctctcctctcctctcctttccttccctctctctcacagctggagtgccatcgtggccccttcgcctgccctcctcaacactaggcctcgtgccacacgcccttcccgacgcggcctccccaaccattgtacactctgtgtctgcccgcgagcctaggcttgccctcactgtcagcactgataccattgtacactctgcgcgggcattttatgccggtgagcctaggcgcactctcaccgtcagcgcctcccccaccattgtacactatgtgtctgcccgctccctccgtcgccacgtattccccgcatccttggctgccactactttgtccaccacctaacatcgttgtcttggacatcctggcttcgatgtcatgtacaaattgtttagcagctcagtcatctcttggagcaggggcttattttgatagttatgtcatgcttgtcagttagatcgaaatatttgcctccccttccctagtttctccttccaggctactcaggcttttgaccttgtgttttcaacctcttggggtataaatattacttactgattcctgatgatttctctcattttgtttggactttccctttgcatttgaagcctgacacattcaccaagctctcacacttttttgcttgggtctccacccagttcgaccgcattgttcgtactctctagcgtgacaacggttgtgggtttgaccactcctcttatcttcttcctttatcacgatgttcagctgcgactctcgtgcccctacacctccccttaaaatggttggattgagtgcatgattcgcaccaccaccaacatgttgtgttgcctcatcttccaagcttctcttcccacacactactgggttaaggcgctgaacactgccacatacctcattaattgtcttccctcccaggcgatcaaccatcccactctgttttttgccctcttcgataccaccccctcctatgagcatcttcgcgtcttcgagtgtgccttctatcccaacatccctactatcgcttcccacaaacttgcgccctgatccactcatcttttcatctggtactcccctaatcacaggggggtatcggtgcctcgatctcctcacttgccgtatcatcatctcccatcacatggtcttcaataaggacgtctttcctcttgtcggctcttccccacctcctaaccttgacaccctcttggatgtcgattctgtcgtcgtccctcctcttcagtcatggtatgtgatcctttcaatcatggtagcggtcaaatgtatgacttcgaggtatcagggcaaaagggggctcgagggcttatcctactagatgccttggggcacgaggagcctaatggattatgggtgtgtttggtttgacttttgactttggcttttgcctccctaaaagccaaaagccaaccaaagggctggatccaggaagcagctttttctaaaagccgactttctcgtagtgcaaatctaaaagcacctctgtacatgcttttagtggcttttcggatggaactatgaaaacatatattgaagaatttttaacgacttttagtggtttccaccaaacggtttttagctttttaacagcttacagtctacagcagctttttccacagctcacagcccacagcaacttttttcacagccacagcccaaccaaacagaccctatttatgaggtgccacggggcacaaaagggccatgaggcttagcttgctaggtgccctggggttgcgaggcttagggacttatgtgagatgccttagggcgcaaggggatctaaggattatcttgctaggtgccccgaggcgtgaagggccctatgggcttatttggtagatgtccataagcatatgaagctttaggggctagatcgataatcgacctagggtgcatggggccttttgaccaagatccttcaacacatcattgcaatagcctggggtatgccttcccccaggtgctatcagtcctcatcccaacatgagaaagccttctatgccataaccactaagtgatattttagtgattaggcatgtcttcaagttggcatcttggaaagtgaaatcaaccaagtatatgctgtatctaaatccttttagtatgaattgattattatctttctaggatacaacttgttcctctgtgaaagtgtgaataggtattgcaagacaagatcacataattgcccaacagatagcgaactgagactcaatgatgcaattaagagcacattagatattgactggtcatttgaaattgccgctttgcccaaacttttgactttccttttttgaattgtccctaaaggtatcttctcttgatcatccacttcttcagttagtgaggtgaacattcaagggtcatgggtcatgtgttgggtacatccacattcaattatctaatgactcctatcggtctttacttcacctatatgcaaggaagatcaagcttgatgtttaagcacccaaactcgatggggcctactaccttctcaaccaaagcctttccaacccaaatcttcttaggcctattcttgtttggtgggcctaagaacataactttgtcacttgcatctttccttatcatgcaatgtgcttcttttccatactcaaagaatctctttgacttaggcttaggtattgtcttgttttcttgttgatatttattctctttatgtgctcgataaccaatactgcttttgtccattttcatgacaatattcatgagaagttcactttgtggtattgtcccttaatgaatttttgctaattggtagcaagatgattctttttattgttttagtttcttgttttcttctctaagtttttcattgtcaagcgccattgcattatcaaccacttcattttctatgacaatattactcttgattactatcttttcaattcttgtccaatcttctcattttatttctcgattttctcaatctcgtcaagaagcttgttatctaccactttattgcatttgcttttagtacaatgttccatgctttcaataaattcatcatatgaggttgttatatcaatctcaattggattagtagcaacatgtgtttcactaaacaagagctcataaacaatagcaaggttatcatgattaactttaacatgagtatagttttctttcaaagagctaaatctagtgttgagctcctcatgtatctctttagggttagatgacatagttttattttcttctttaagctcgtaactggctttttattctatgacatagttagcaagtaaagacttattctcatgttttagtttcttattgtttcgtcttgtttttctaatgatttgagtatacttaataagcaaggcaactaattcatcatatgtgagaacgatgaattcttcatcgctatcactatcattgctataatcatagttttataccgttcgatcaccttttgccataagacatgagtgtgtagtggatgatggcagtgatggtggtagagaagaaaagtcaatagcaagtgcgaccatcttgtcttcatcgtcactagcgcatgaagatgagttacttgtgaagtcaatgttggtaagccaatcagcaacaatataggcataagcaggggcggatctccacccggggctgcctgggctgcagccccgggcggcactcgcggcccaccagaggcccaccgtcgcgctcagccccaaatcccaaccctagctccagcctctagctgccgcagctcctc

SEQ ID NO: 56461 - DNA, 5382 bp, Zea Mays
atctcgggcgctactgatggaatatggatgggcaggcgaaagagcaggaggagcagaagaagcgcggtttgctgacgtctccatcccatcatgtattatcctcagcctaccgtctccttggcggcggcggttgccctcctccgcccctcactccgccgccactctcaaagggcgtcatcccttctccgctcctccacgccgcctccatgggttagtgcgaggaggaggacggccgtctccgacgacttcttcaccgtcgagttggacgctactggagtggaaccggaaccggattccatcgacgacgggctcccctctccatgggagggagctgtcgtctaccgccgcgacgctgccgtccagcacctcgagtacgccagcacgctggagcgcctcggcctaggggacctctcctcccccgactcccgcgccctcggacccccgtgctcgtctccgtcgacgtgaccaggcgccgcggccgcctgcgcctggacggcatcgtgcgcaccgtcatcaccctcggctgcttcaggtgtgctgagccagctcctcaaggtatatttgccaatttctccctgctgttgacagaagacccagtagaggaggaaccagacctcggcacgatttttcaagaggacgacgacaaaggtggtgcttcgctagcctgcgccatggatggagatcaagatatcgactgggatgaccggctgcatttcccagcagctgacaaggaaatcgatatatccaagcacatccgggacatgattcatctggagatcaccttggatgcagtgtgcaaccccaactgcaagggtctatgccttacctgcggcgcaaacctcaacaccaccagcagctgcacatgcaagcccaggaacgtccaaggactttctcctctcaaaggggttttcaagtgatgatgcggataccaaagtttgtacaaccagcccaacttcatgtcatgctgtgagcctgtgacttctagattcatataatcgcaaatatgcattgaaacttcacatttatagattcacatccgcagatgacaaaataccaaatcgacttcatatatcttatgttcttcattgtaacaaaccaccaaagatgaaaaatcttaacaaccattttataaatattatcactcatcaatgttagattattctgtgtttctgatgtaatggccttgtgaaagggcctctagccgagttggttaggtggtctgagtagcactccttgggtcctcaggctgtggttaaaaaaaaaatccccttttctatgccacgccaaaacacaggtctaagtctcagccctcatcacggtcgttctcacatgggcttcgatgccgatgtgtatgtgtgggacatgggtttggaggttttctcgacctgtgtgagaatatcttcttaatacaaaactcgagggttgtcttaccctctgtaggtcaattttttttatgtaatgaccttcggcctagtctgtatactattcccatgcatgcctaccctaatcaaggttaagtcctctaacatggtatcaagtcaggttttctccccccccccttcctcctcctgtggccactgccttcctctccccgctcctcgctgtccaactgtagctatggaagccggtctccctctctctctcctctcctctcctttccttccctctctctcacagctggagtgccatcgtggccccttcgcctgccctcctcaacactaggcctcgtgccacacgcccttcccgacgcggcctccccaaccattgtacactctgtgtctgcccgcgagcctaggcttgccctcactgtcagcactgataccattgtacactctgcgcgggcattttatgccggtgagcctaggcgcactctcaccgtcagcgcctcccccaccattgtacactatgtgtctgcccgctccctccgtcgccacgtattccccgcatccttggctgccactactttgtccaccacctaacatcgttgtcttggacatcctggcttcgatgtcatgtacaaattgtttagcagctcagtcatctcttggagcaggggcttattttgatagttatgtcatgcttgtcagttagatcgaaatatttgcctccccttccctagtttctccttccaggctactcaggcttttgaccttgtgttttcaacctcttggggtataaatattacttactgattcctgatgatttctctcattttgtttggactttccctttgcatttgaagcctgacacattcaccaagctctcacacttttttgcttgggtctccacccagttcgaccgcattgttcgtactctctagcgtgacaacggttgtgggtttgaccactcctcttatcttcttcctttatcacgatgttcagctgcgactctcgtgcccctacacctccccttaaaatggttggattgagtgcatgattcgcaccaccaccaacatgttgtgttgcctcatcttccaagcttctcttcccacacactactgggttaaggcgctgaacactgccacatacctcattaattgtcttccctcccaggcgatcaaccatcccactctgttttttgccctcttcgataccaccccctcctatgagcatcttcgcgtcttcgagtgtgccttctatcccaacatccctactatcgcttcccacaaacttgcgccctgatccactcatcttttcatctggtactcccctaatcacaggggggtatcggtgcctcgatctcctcacttgccgtatcatcatctcccatcacatggtcttcaataaggacgtctttcctcttgtcggctcttccccacctcctaaccttgacaccctcttggatgtcgattctgtcgtcgtccctcctcttcagtcatggtatgtgatcctttcaatcatggtagcggtcaaatgtatgacttcgaggtatcagggcaaaagggggctcgagggcttatcctactagatgccttggggcacgaggagcctaatggattatgggtgtgtttggtttgacttttgactttggcttttgcctccctaaaagccaaaagccaaccaaagggctggatccaggaagcagctttttctaaaagccgactttctcgtagtgcaaatctaaaagcacctctgtacatgcttttagtggcttttcggatggaactatgaaaacatatattgaagaatttttaacgacttttagtggtttccaccaaacggtttttagctttttaacagcttacagtctacagcagctttttccacagctcacagcccacagcaacttttttcacagccacagcccaaccaaacagaccctatttatgaggtgccacggggcacaaaagggccatgaggcttagcttgctaggtgccctggggttgcgaggcttagggacttatgtgagatgccttagggcgcaaggggatctaaggattatcttgctaggtgccccgaggcgtgaagggccctatgggcttatttggtagatgtccataagcatatgaagctttaggggctagatcgataatcgacctagggtgcatggggccttttgaccaagatccttcaacacatcattgcaatagcctggggtatgccttcccccaggtgctatcagtcctcatcccaacatgagaaagccttctatgccataaccactaagtgatattttagtgattaggcatgtcttcaagttggcatcttggaaagtgaaatcaaccaagtatatgctgtatctaaatccttttagtatgaattgattattatctttctaggatacaacttgttcctctgtgaaagtgtgaataggtattgcaagacaagatcacataattgcccaacagatagcgaactgagactcaatgatgcaattaagagcacattagatattgactggtcatttgaaattgccgctttgcccaaacttttgactttccttttttgaattgtccctaaaggtatcttctcttgatcatccacttcttcagttagtgaggtgaacattcaagggtcatgggtcatgtgttgggtacatccacattcaattatctaatgactcctatcggtctttacttcacctatatgcaaggaagatcaagcttgatgtttaagcacccaaactcgatggggcctactaccttctcaaccaaagcctttccaacccaaatcttcttaggcctattcttgtttggtgggcctaagaacataactttgtcacttgcatctttccttatcatgcaatgtgcttcttttccatactcaaagaatctctttgacttaggcttaggtattgtcttgttttcttgttgatatttattctctttatgtgctcgataaccaatactgcttttgtccattttcatgacaatattcatgagaagttcactttgtggtattgtcccttaatgaatttttgctaattggtagcaagatgattctttttattgttttagtttcttgttttcttctctaagtttttcattgtcaagcgccattgcattatcaaccacttcattttctatgacaatattactcttgattactatcttttcaattcttgtccaatcttctcattttatttctcgattttctcaatctcgtcaagaagcttgttatctaccactttattgcatttgcttttagtacaatgttccatgctttcaataaattcatcatatgaggttgttatatcaatctcaattggattagtagcaacatgtgtttcactaaacaagagctcataaacaatagcaaggttatcatgattaactttaacatgagtatagttttctttcaaagagctaaatctagtgttgagctcctcatgtatctctttagggttagatgacatagttttattttcttctttaagctcgtaactggctttttattctatgacatagttagcaagtaaagacttattctcatgttttagtttcttattgtttcgtcttgtttttctaatgatttgagtatacttaataagcaaggcaactaattcatcatatgtgagaacgatgaattcttcatcgctatcactatcattgctataatcatagttttataccgttcgatcaccttttgccataagacatgagtgtgtagtggatgatggcagtgatggtggtagagaagaaaagtcaatagcaagtgcgaccatcttgtcttcatcgtcactagcgcatgaagatgagttacttgtgaagtcaatgttggtaagccaatcagcaacaatataggcataagcaggggcggatctccacccggggctgcctgggctgcagccccgggcggcactcgcggcccaccagaggcccaccgtcgcgctcagccccaaatcccaaccctagctccagcctctagctgccgcagctcctc

SEQ ID NO: 56462 - DNA, 752 bp, Zea Mays
cttgaggcaataaactgccttcagctgctcattatgtggtattaccaaaggctcacgaaggatgaggctactaggaaaatttgttgagaatgaatgtgaaaagatagaccgccttatggagttatacacaaggtattcagacagagtgaaagaagagactgaaagacttgatagtcttgatttggaagatttagagatggacgatgatgagcggtataaccgaaaactcgaagctgggctttacacactgcaggaattcccagatgagagcaagagtagaattacttcttaagcagaacaaacttacaaagcaagatgtgaagagcatacttgaggagtaccatgacaacattggagatttggatggacctgaagagaaggaaagagcacaagtgcggaccaaggaaattattgacgcgttgtgatgtgcatgggcctagggtagttggttgtggagcaagacagaggctggtagatattttgagtatgttgagtgaatttatatccgcagtcagcaaagctgtgtaacttactaggttgtagatgatggatgtcagaaacaagggtgcattaattagttctgttgtattctatttttgtgtaaacttgctagttactatttgtcgttatatgctttgggaaggaatttgtaacacctcaaaaacttaacttgggaatttagtaaaattctccaaagaaaataagagaatgaaatatgaaaatagaaaataaaatagaaaaggaagtaagaa

SEQ ID NO: 56463 - DNA, 1012 bp, Zea Mays
taggaatatctgggctcaataccttatggtaattaactagaaagctagcaatggcaaagtgaatgccattaggggcatatgctcttgttgccttcaaatttcagatgctcattgagattcatcattcatgcaatataggagttttaggaacatttttttactgtcttctacagcaaacaaatgtcaatgcacatactggtgtaaaccacgagagcacattcccttgaggcaataaactgccttcagctgctcattatgtggtattaccaaaggctcacgaaggatgaggctactaggaaaatttgttgagaatgaatgtgaaaagatagaccgccttatggagttatacacaaggtattcagacagagtgaaagaagagactgaaagacttgatagtcttgatttggaagatttagagatggacgatgatgagcggtataaccgaaaactcgaagctgggctttacacactgcagttaattgcgcttattctgggacacatctggcactctgggaattcccagatgagagcaagagtagaattacttcttaagcagaacaaacttacaaagcaagatgtgaagagcatacttgaggagtaccatgacaacattggagatttggatggacctgaagagaaggaaagagcacaagtgcggaccaaggaaattattgacgcgttgtgatgtgcatgggcctagggtagttggttgtggagcaagacagaggctggtagatattttgagtatgttgagtgaatttatatccgcagtcagcaaagctgtgtaacttactaggttgtagatgatggatgtcagaaacaagggtgcattaattagttctgttgtattctatttttgtgtaaacttgctagttactatttgtcgttatatgctttgggaaggaatttgtaacacctcaaaaacttaacttgggaatttagtaaaattctccaaagaaaataagagaatgaaatatgaaaatagaaaataaaatagaaaaggaagtaagaa

SEQ ID NO: 56464 - DNA, 1854 bp, Zea Mays
cttaccgcaacacagaacagaccgcactttctctggcagaccgtgttctcccgctccgatccgccagagcaaaccctagccaatggacgccgccgccgttcacaagcgcaagcgacctgaagaggccgacccaagcgcgggggagctcgacctctccgccgccgacgccgtcgaggtactcgacctccgggccgccaaacgcctccttctggccttcgagcgccgcctccgtgacaacctcgaggcgcgcatgaaataccccgacgaccctgcccgctttgcagactccgagatcgcgctccacgccgagaccgaccgcctccgcctccttgccggcgcgcctgagctcttccccgacctcgtccccatcggcctcgcctcttccctcgcctcccttctcacccacgacaatgtcgatctcgcagctgccgccgcatcactcctcgccgacctcaccgactccgaggacccctccgacctcgccgctgtccaggccctcgccgacgcgctcgtcgacgccaacgcgctcgacctcctcgtccacaatctctcccgcttttccgagaccgaccccgatgaggccgaggccgtgcacaacaccctcgccgtcctcgagaacctcctcgacctccgccccaacctcgccgacaaagtctgcggcggaaccaagcttctacgatggctcctctcgcgcgtcaaggcacgcgagttcgacgccaacaagcagcggttgccatgtacaaatcaagggacccaaagacgtctgacgaggaggagatgctcgagaacctcttcgactgtctctgctgcgtgctcatgcccctggagaacaaggagaggtttgtcaaggctgaaggtgttgagctcatgatcatcattatgaaacagaagaagctggcatacagctctgcgacccgcaccctcgattttgccatgaccaagttcccgcctgcgtgcgaacgatttgttgatgtgcttggccttaagactgcttttgcggccttcatgggcaagattcccgtgaacaagaaaaacaagaaagagagttaccaggaggagctagaagagcgtatcatttcacttattgcttcattgtttggtggtattaccaaaggctcacgaaggatgaggctactaggaaaatttgttgagaatgaatgtgaaaagatagaccgccttatggagttatacacaaggtattcagacagagtgaaagaagagactgaaagacttgatagtcttgatttggaagatttagagatggacgatgatgagcggtataaccgaaaactcgaagctgggctttacacactgcagttaattgcgcttattctgggacacatctggcactctgggaattcccagatgagagcaagagtagaattacttcttaagcagaacaaacttacaaagcaagatgtgaagagcatacttgaggagtaccatgacaacattggagatttggatggacctgaagagaaggaaagagcacaagtgcggaccaaggaaattattgacgcgttgtgatgtgcatgggcctagggtagttggttgtggagcaagacagaggctggtagatattttgagtatgttgagtgaatttatatccgcagtcagcaaagctgtgtaacttactaggttgtagatgatggatgtcagaaacaagggtgcattaattagttctgttgtattctatttttgtgtaaacttgctagttactatttgtcgttatatgctttgggaaggaatttgtaacacctcaaaaacttaacttgggaatttagtaaaattctccaaagaaaataagagaatgaaatatgaaaatagaaaataaaatagaaaaggaagtaagaa

SEQ ID NO: 56465 - DNA, 1982 bp, Zea Mays
cacagtcatcaaaaacaaattcgttcgaaaaaacggaaaaagcacgaatcttaccgcaacacagaacagaccgcactttctctggcagaccgtgttctcccgctccgatccgccagagcaaaccctagccaatggacgccgccgccgttcacaagcgcaagcgacctgaagaggccgacccaagcgcgggggagctcgacctctccgccgccgacgccgtcgaggtactcgacctccgggccgccaaacgcctccttctggccttcgagcgccgcctccgtgacaacctcgaggcgcgcatgaaataccccgacgaccctgcccgctttgcagactccgagatcgcgctccacgccgagaccgaccgcctccgcctccttgccggcgcgcctgagctcttccccgacctcgtccccatcggcctcgcctcttccctcgcctcccttctcacccacgacaatgtcgatctcgcagctgccgccgcatcactcctcgccgacctcaccgactccgaggacccctccgacctcgccgctgtccaggccctcgccgacgcgctcgtcgacgccaacgcgctcgacctcctcgtccacaatctctcccgcttttccgagaccgaccccgatgaggccgaggccgtgcacaacaccctcgccgtcctcgagaacctcctcgacctccgccccaacctcgccgacaaagtctgcggcggaaccaagcttctacgatggctcctctcgcgcgtcaaggcacgcgagttcgacgccaacaagcagtacgcctccgaaatcctcgcgatactcctgcagaacagccccgccaatcagaagcgcctcggccagatcaacggagtcgacgccctgcttcaggcggttgccatgtacaaatcaagggacccaaagacgtctgacgaggaggagatgctcgagaacctcttcgactgtctctgctgcgtgctcatgcccctggagaacaaggagaggtttgtcaaggctgaaggtgttgagctcatgatcatcattatgaaacagaagaagctggcatacagctctgcgacccgcaccctcgattttgccatgaccaagttcccgcctgcgtgcgaacgatttgttgatgtgcttggccttaagactgcttttgcggccttcatgggcaagattcccgtgaacaagaaaaacaagaaagagagttaccaggaggagctagaagagcgtatcatttcacttattgcttcattgtttggctcacgaaggatgaggctactaggaaaatttgttgagaatgaatgtgaaaagatagaccgccttatggagttatacacaaggtattcagacagagtgaaagaagagactgaaagacttgatagtcttgatttggaagatttagagatggacgatgatgagcggtataaccgaaaactcgaagctgggctttacacactgcagttaattgcgcttattctgggacacatctggcactctgggaattcccagatgagagcaagagtagaattacttcttaagcagaacaaacttacaaagcaagatgtgaagagcatacttgaggagtaccatgacaacattggagatttggatggacctgaagagaaggaaagagcacaagtgcggaccaaggaaattattgacgcgttgtgatgtgcatgggcctagggtagttggttgtggagcaagacagaggctggtagatattttgagtatgttgagtgaatttatatccgcagtcagcaaagctgtgtaacttactaggttgtagatgatggatgtcagaaacaagggtgcattaattagttctgttgtattctatttttgtgtaaacttgctagttactatttgtcgttatatgctttgggaaggaatttgtaacacctcaaaaacttaacttgggaatttagtaaaattctccaaagaaaataagagaatgaaatatgaaaatagaaaataaaatagaaaaggaagtaagaa

SEQ ID NO: 56466 - DNA, 1961 bp, Zea Mays
ggcacagtcatcaaaaacaaattcgttcgaaaaaacggaaaaagcacgaatcttaccgcaacacagaacagaccgcactttctctggcagaccgtgttctcccgctccgatccgccagagcaaaccctagccaatggacgccgccgccgttcacaagcgcaagcgacctgaagaggccgacccaagcgcgggggagctcgacctctccgccgccgacgccgtcgaggtactcgacctccgggccgccaaacgcctccttctggccttcgagcgccgcctccgtgacaacctcgaggcgcgcatgaaataccccgacgaccctgcccgctttgcagactccgagatcgcgctccacgccgagaccgaccgcctccgcctccttgccggcgcgcctgagctcttccccgacctcgtccccatcggcctcgcctcttccctcgcctcccttctcacccacgacaatgtcgatctcgcagctgccgccgcatcactcctcgccgacctcaccgactccgaggacccctccgacctcgccgctgtccaggccctcgccgacgcgctcgtcgacgccaacgcgctcgacctcctcgtccacaatctctcccgcttttccgagaccgaccccgatgaggccgaggccgtgcacaacaccctcgccgtcctcgagaacctcctcgacctccgccccaacctcgccgacaaagtctgcggcggaaccaagcttctacgatggctcctctcgcgcgtcaaggcacgcgagttcgacgccaacaagcagtacgcctccgaaatcctcgcgatactcctgcagaacagccccgccaatcagaagcgcctcggccagatcaacggagtcgacgccctgcttcaggcggttgccatgtacaaatcaagggacccaaagacgtctgacgaggaggagatgctcgagaacctcttcgactgtctctgctgcgtgctcatgcccctggagaacaaggagaggtttgtcaaggctgaaggtgttgagctcatgatcatcattatgaaacagaagaagctggcatacagctctgcgacccgcaccctcgattttgccatgaccaagttcccgcctgcgtgcgaacgatttgttgatgtgcttggccttaagactgcttttgcggccttcatgggcaagattcccgtgaacaagaaaaacaagaaagagagttaccaggaggagctagaagagcgtatcatttcacttattgcttcattgtttggtggtattaccaaaggctcacgaaggatgaggctactaggaaaatttgttgagaatgaatgtgaaaagatagaccgccttatggagttatacacaaggtattcagacagagtgaaagaagagactgaaagacttgatagtcttgatttggaagatttagagatggacgatgatgagcggtataaccgaaaactcgaagctgggctttacacactgcaggaattcccagatgagagcaagagtagaattacttcttaagcagaacaaacttacaaagcaagatgtgaagagcatacttgaggagtaccatgacaacattggagatttggatggacctgaagagaaggaaagagcacaagtgcggaccaaggaaattattgacgcgttgtgatgtgcatgggcctagggtagttggttgtggagcaagacagaggctggtagatattttgagtatgttgagtgaatttatatccgcagtcagcaaagctgtgtaacttactaggttgtagatgatggatgtcagaaacaagggtgcattaattagttctgttgtattctatttttgtgtaaacttgctagttactatttgtcgttatatgctttgggaaggaatttgtaacacctcaaaaacttaacttgggaatttagtaaaattctccaaagaaaataagagaatgaaatatgaaaatagaaaataaaatagaaaaggaagtaagaa

SEQ ID NO: 56467 - DNA, 590 bp, Zea Mays
agccaatccggtcaacaaactgcgatgcggaatacgaagcgttgtcgccgcggcggacgctcctcgccgccgccgtcctcggcgccccagcccccgccgcagccgctcttgcgcggccctcaattgcgacccccttcagccatcctcatcgattccgtcgggacggcgatctgacccggtttaacgcttctttgctgcagccgttgggatccgctacggtaagtactgcggtgtgggatggagcggctgcgacggcgaggagccctgcacctgcacgacctcgacgcctgctgccgcgaccacaactgcgtcgagaagaaaggaggcttcagctttgagaataaggtgtgcatggtatgaaggtgcagtctggaggaaggataaattagctccaaagttgtggctgaagaagcttcggcttagcacgaggacgatggtgaaagatgaaaccgacctaaagaagaaaagactgcttagtcctcgacggcttgccttatggtcaacagtaaatgtcggggacatgaatgtaattttgtgcaggctacgtcctgtgcctataaatagatgaacaataacaccgtgctgttcac

SEQ ID NO: 56468 - DNA, 585 bp, Zea Mays
atggcggcttgctatgtaagaagagttggacgctcttgatcgaacgggtgccttatttccagctcagagagaacggttggacgctgaatgcttatatggatgggaaatgggatgttagatttgaaatgtgaatccacttgctcagtagtgttaccaattctacttgtctgtactgcacttggaactgttgatctggtaatatgtaaactggagagctttccatattcatctagttctgaagcgtacgttgttggctcactgcatcatcagctttggttctagtagccgctattcatccaaacgtcacaacatgtaatgtgacgtgggaattgagacttcatcatcattattatatacttagggctagtttgtcaacactattttcccatgagatttctaatttcttagggctagtttaggaaccttattttaccaagggatttctatttttccatgaaaaataaactaatttcctttgagaaaataaaaatcttttggaaaaatgaggttcccaaactagcccttaagggaaaataaactaatttcctttaggaaaacgaaaatccttgaaaaaatatggtttcc

SEQ ID NO: 56469 - DNA, 1248 bp, Zea Mays
cagcccagcacacagcccataacgatggcccccggcctattcgggctcgcctaccatctctcctccggtccttcctatcataccggcgggcggcgcggggcagctaatcggcaatccggcttcgcctcgtcgcagtccaatccgcactcaccgccgccctcccgcccctcacctgcccgcggcagtgtcggagtaaaccctaccggacctatcgtcacgcgactgcgggagttgcttgcttcttctgccgctctctcgctccgtcccttccgcccatggagacctcgctgcgcttgcgcagtggcggcggcctccgcatccacgccaaggagaagctgcccctcggccacagctcgctgctgcaggctcatgcggagctcgacctccacacaagccccgccggagttactaccccgagttatctcgctctctttgtcaggcacttctactcgcagctatcagccaatctcggagctggcgtccagttgcacaacggcgatgacctcgcctacagttttcgcgccaagaaggccgtcctgttcaaaccagataatgggttcctaggtctgaaccttaaagggcgcctacttaccgataaagagttgaagccgacgaagacaactggatccgttgaactggcatggaccatacttgacttgaaacagggccaagacgtaaggctcaaagttggttacgaattgtgtgacaaggtgccttatttccagctcagagagaacggttggacgctgaatgcttatatggatgggaaatgggatgttagatttgaaatgtgaatccacttgctcagtagtgttaccaattctacttgtctgtactgcacttggaactgttgatctggtaatatgtaaactggagagctttccatattcatctagttctgaagcgtacgttgttggctcactgcatcatcagctttggttctagtagccgctattcatccaaacgtcacaacatgtaatgtgacgtgggaattgagacttcatcatcattattatatacttagggctagtttgtcaacactattttcccatgagatttctaatttcttagggctagtttaggaaccttattttaccaagggatttctatttttccatgaaaaataaactaatttcctttgagaaaataaaaatcttttggaaaaatgaggttcccaaactagcccttaagggaaaataaactaatttcctttaggaaaacgaaaatccttgaaaaaatatggtttcc

SEQ ID NO: 56470 - DNA, 1380 bp, Zea Mays
cagcccagcacacagcccataacgatggcccccggcctattcgggctcgcctaccatctctcctccggtccttcctatcataccggcgggcggcgcggggcagctaatcggcaatccggcttcgcctcgtcgcagtccaatccgcactcaccgccgccctcccgcccctcacctgcccgcggcagtgtcggagtaaaccctaccggacctatcgtcacgcgactgcgggagttgcttgcttcttctgccgctctctcgctccgtcccttccgcccatggagacctcgctgcgcttgcgcagtggcggcggcctccgcatccacgccaaggagaagctgcccctcggccacagctcgctgctgcaggctcatgcggagctcgacctccacacaagccccgccggagttactaccccgagttatctcgctctctttgtcaggcacttctactcgcagctatcagccaatctcggagctggcgtccagttgcacaacggcgatgacctcgcctacagttttcgcgccaagaaggccgtcctgttcaaaccagataatgggttcctaggtctgaaccttaaagggcgcctacttaccgataaagagttgaagccgacgaagacaactggatccgttgaactggcatggaccatacttgacttgaaacagggccaagacgtaaggctcaaagttggttacgaattgtgtgacaaggatcgtcgcacaggggctgtgattgggactggtcgttgccgtagcactgctcctcgcctctacatcctcgacagcttgcgccttacttagttcacttcatcatctacgacccgtgtgctttctgcagcctcagtgccttatttccagctcagagagaacggttggacgctgaatgcttatatggatgggaaatgggatgttagatttgaaatgtgaatccacttgctcagtagtgttaccaattctacttgtctgtactgcacttggaactgttgatctggtaatatgtaaactggagagctttccatattcatctagttctgaagcgtacgttgttggctcactgcatcatcagctttggttctagtagccgctattcatccaaacgtcacaacatgtaatgtgacgtgggaattgagacttcatcatcattattatatacttagggctagtttgtcaacactattttcccatgagatttctaatttcttagggctagtttaggaaccttattttaccaagggatttctatttttccatgaaaaataaactaatttcctttgagaaaataaaaatcttttggaaaaatgaggttcccaaactagcccttaagggaaaataaactaatttcctttaggaaaacgaaaatccttgaaaaaatatggtttcc

SEQ ID NO: 56471 - DNA, 2135 bp, Zea Mays
cgctggtaaaaatcgcgccgctcaactgtcaagaaaaatcctgctcgcgcttatcttccacccgaacgcgacgatctccctcctatcctctgctccattcccctccttggctcccttcccgtcgctctccctctgtagccgctccctgggagcttccctcaacggcgctcctcctgccccctcccatggcgagctcgccggagatgtcccttccccagccgcttcatcttcctgcgggagcagctcgccggacctccctgctctctctccccattcccccctgctcgccctgcatccatggagctcggctcctggcttctcctgcgcacgcgccgcggcctcttactgcgcccgcccaagaccgcgcgcgccctgctctgtgcgtctccggtcccagcttgccgcgccctggacttccatggcgcgcccagccgctccttccccaatcgcgccctccctgcaagctccagcttcctgcgcgcccagcaagagctcccctgtgtgccgcagtcgccccagctccctttgcttcccttgctcggagcctcggactgctctcggtcgaatccccctggagctcctgcgcgtccctggttcctgcctcaatccggaccgcgccctgcccagaattcctccatggccgagcttccctgctcccatggctgcttgcccagtcgctcctctctcctccctccactctctcccctcagctcgccttcctgcagccacgccatgcgcgcgctcctgctgctctgctctcgctgccgagctcctctgcgcgcattgtcccggctccgcgcgtcctcgttttctccctgaccctgctcggacagcacccggcggatctcctggtgccgtgagcttgctgtgctccctggtgcttcatgcttgccatcgtccatgaccgcgacctctccttggctctctgctgtagctcgcctccatgttcgctagcggtcttgctcgagcctctggtcgcgactcgagtcaccccttcgtgctggtcgccgctgcccttctctggtgcttgcttcccagctgccgtgagctctgtttcgccgtcgcgtcctggccgcgtcgagctcccttctccaactcgccggctgtgcaactctcctctggtgccttggtcgtgcgtatccgccgctgctttctgcgcacgcgtcgcgcgctctggcgtcggcgtcctgcctttttccctgcgcgcagttcgtcccaacgccgagctcggtcctgctctctactcctgctcgcagtcgctgcgttgccgagtccctggccgcgtctgtgtggctgtgttcttttgtggaacgctcacttgaccgtgctcctgcgctttctgttccgtccagcgtgggttttagttgtcggtcaagcgcgcccctatctccgttcagtcacatttcctcgatgctggtccctacgtgctgtctctaacttgtgtttgcgctgacagaagcaagtccgtggtcgatgtcccaagtgctcggcgaaaaggcagaacaagaatcatcgatgtttatgcggagttttacttaatatgaagagattccaagaattgtggatagaagagaaagtgaagctccgttctatactcgtcagctgtttgatcgaagattttattcggagactgtggacgttctcgcaagctttaagtcgcatttaatggacgatacgttaattaatcgcgcgatgcggaagacaagccaagtcgaccccaagcacggactactccgcatggtggcgctgatggacgaacccacctaatcaagtgttaggacaaggatgatcgtcaagtggacgtcgtctaacaaacactaacgtagtgtttattccaggcaagccccggtgcatgcaaccccttccttgtgttttaaatgatttttacacactttaagtctagtgaaatgtgcattaggtttataggagttgcttggaaaccctttgatgcattggctaccttgaaatccattccttttatggatacttctggtgaagtatcaaaatatgatttacaaaaaaatacttagccctgaaagggaaatgtacccttaggacatttctataagattttggtgattaagtgctccacacaaatgctttgagtaatatttgtgccaaagacttaagaagtg

SEQ ID NO: 56472 - DNA, 2055 bp, Zea Mays
cgctggtaaaaatcgcgccgctcaactgtcaagaaaaatcctgctcgcgcttatcttccacccgaacgcgacgatctccctcctatcctctgctccattcccctccttggctcccttcccgtcgctctccctctgtagccgctccctgggagcttccctcaacggcgctcctcctgccccctcccatggcgagctcgccggagatgtcccttccccagccgcttcatcttcctgcgggagcagctcgccggacctccctgctctctctccccattcccccctgctcgccctgcatccatggagctcggctcctggcttctcctgcgcacgcgccgcggcctcttactgcgcccgcccaagaccgcgcgcgccctgctctgtgcgtctccggtcccagcttgccgcgccctggacttccatggcgcgcccagccgctccttccccaatcgcgccctccctgcaagctccagcttcctgcgcgcccagcaagagctcccctgtgtgccgcagtcgccccagctccctttgcttcccttgctcggagcctcggactgctctcggtcgaatccccctggagctcctgcgcgtccctggttcctgcctcaatccggaccgcgccctgcccagaattcctccatggccgagcttccctgctcccatggctgcttgcccagtcgctcctctctcctccctccactctctcccctcagctcgccttcctgcagccacgccatgcgcgcgctcctgctgctctgctctcgctgccgagctcctctgcgcgcattgtcccggctccgcgcgtcctcgttttctccctgaccctgctcggacagcacccggcggatctcctggtgccgtgagcttgctgtgctccctggtgcttcatgcttgccatcgtccatgaccgcgacctctccttggctctctgctgtagctcgcctccatgttcgctagcggtcttgctcgagcctctggtcgcgactcgagtcaccccttcgtgctggtcgccgctgcccttctctggtgcttgcttcccagctgccgtgagctctgtttcgccgtcgcgtcctggccgcgtcgagctcccttctccaactcgccggctgtgcaactctcctctggtgccttggtcgtgcgtatccgccgctgctttctgcgcacgcgtcgcgcgctctggcgtcggcgtcctgcctttttccctgcgcgcagttcgtcccaacgccgagctcggtcctgctctctactcctgctcgcagtcgctgcgttgccgagtccctggccgcgtctgtgtggctgtgttcttttgtggaacgctcacttgaccgtgctcctgcgctttctgttccgtccagcgtgggttttagttgtcggtcaagcgcgcccctatctccgttcagtcacatttcctcgatgctggtccctacgtgctgtctctaacttgtgtttgcgctgacagaagcaagtccgtggtcgatgtcccaagtgctcggcgaaaaggcagaacaagaatcatcgatgtttatgcggagttttacttaatatgaagagattccaagaattgtggatagaagagaaagtgaagctccgttctatactcgtcagctgtttgatcgaagattttattcggagactgtggacgttctcgcaagctttaagtcgcatttaatggacggtaagtggattcgttattccagtcgactaaatatgatatttattagactacctgaattgtttacggcaatttgatcggtagtcgtacatgttgctgatcccttgcgttataatagttattacgttctaggtagtttgcttaggttattagtttcgagtaatttaatattagtacggtatttaacgtgtaatcgacgaaaaactcggattcgtattcgttaatcaaagtagtgaatctaaactaaatttattactggcgcgcaagttgttagccgaattgttagatagattaaataaatatgtgtgatgcgaaataaaatttaattagttcttggtaagcaaagtgatataatttataaagcgagagataaatttagcatttaa

SEQ ID NO: 56473 - DNA, 4326 bp, Zea Mays
agaacggcttcaaccaagattcccaagagcaaaaaaagggggtttaatagtatgataatccttggggcttggagtatttggaagcagcgaaacaggtgtgtttttgaaggagctcgaccctgccttaataccttagaggatggatttaaagacgagatgagattgtgggtttctgctggagccaagaacttgcgctctctttttgaccctggatagagaaaggaaagtcttatagcctactaaaagacgggggtgttggggtgtcgtatgtgtctgtgtggtgtgtgctttgtaagggtgagtgtgtgtttgtgtttagagtgtgtgtttgtgttgtgtgtgttctgtttgtcccgggccacaggccctttttccctctactttaatttaatgatacgcagccctcctgcgtattcgaaaaaaaaagattcggagaatatccaacacctcctttgcacttgcatttttgtgcggcaattttggtactacattctttcttcattgggactgactaatctttctcctgcctctaatgagtccgcttttgctgactggtgggagaaggtgtgtaagcaagtgcacaaatccagatctcactccgatgaaagagaggttgaaactgagtcgcaacagcacgacggaggtggatgctacacagtgtcggcgtcttgtggggagccttcgctacctcgtccacacacggccgaacttggcatactccatcggctacgttagtcggttcctgcagcgaccgacgatggagcatgagcaggttgtgaagaggattattcgctacgttgcggggaccaaggttattatggcgtcgcctaggcgacgcctaggcgtccaggcggctgtagtttctgggcgtcgagctcgccgcaccttgggtgcgtatggcgtccccgcgcgcctaggcgtcgccatggcgtccaaattgtgccgcgggcgccacggacgcgggaacggacgcgggagttttaagttcgcgcgcgtacaggaaagggttttagggtttgtccagcgcgccgcctctcatccaacctacgcgccgcctctcctccaataggcgtgccgcctctccaaccggtgcgtcgcgccgccgctcctccatccagcgaccggctcctccatccggtgtgccactctgctcttcctcttcctcttcctctgcttcctcactcctcagttcatctgctgactgctctgttgctgctcgcctgctcttcctcttcctctgctcttcctcttcctatgctcttcctcttcctctgcttcctcagttcatctgctgactgctctgttgcttcctcaggccaacagcaccctgccaccttcatcaatcaatggctagcccatcttcagtcaacaatgccaaatgatccaaagacagacaaagcaaggaaggctagctcaaatgatccaggttggaagtatggttattgggcatatttggcaaatagagatcaagtgacatgcaccctttgtgacaccatagttttcggagggataaaaaggctaaagcagcatctagcaggtggctatggaaatacaaagatatgttcaaagaccactactgcaattagaaaggagatgagggattacttggaatccaaaagaaggaaaagagctattttcctagatgataatgagcagcaagaggaggaagaggatgtaatggtggtggatgcagcagctgaatctgttcaagttcaacaagatgcacctatagaatcccaaggctctaaggtacaaccaagttcagggactgcagccaaacataggcgtgcaacctatctgtacaaggatacaacatcaatcaagaccaaggcaaatcaagcaagcaagcaaaagtcaattgtggagatgcttcggaaatcacctgaagatgtagttgatgaaaggcgtaaagggtgttctcaacccacaattgcatccaagatgaagtccaaagaggagaagaattatgtggatatgcaatgggctttgtggttttatgaatgcggtgtgccatttaatgcagcagcagcaagacaatttcaggttgcagttgaggcaactgcccagtttggttcaggctataagcctccatatcaacttgggcagccattgcttaaggatgctgtgaaattgacaactatgagggaggaacacaagagggcatggaagcattatggttgcacgcttatgtcagatggatggtctgataggaggggcaggcatttgatcaacttccttgtgagcccatgcgttgcacattgcttagatcttatgctagaagacataggaaacttgaaggaatttaagaagcccattgtacgtgcaagacgtgtcacaactttcatctataggcacggtagaattcttagtttaatgagagagaagacaggtggggcagatcttgtgagagttgcagccactagatttgccactgctttccttactttgaaaagtttgtacaagcacaaggatcctttgaaggccctatttcttagtgaagaatggaatgaaaacaagttggcaaaaactgctgcaggtaaggaggcttgtgatattgtgctctctgtggagttttggaataaagttgaagattgtcttagagcttcagcccctctcctcattgtacttagagtggttgatggtgatgagaaacctgcaatgccagaggtcgcggcactaatgaaacatgcaaaagagaagatcaagctaagctttgctattgatagcaagaaaagcttacttaagagaatcatagacattattgagaaacgatggatgaaacaaatggatcatcctttgtatggggctgctctttatttgaatccaggaaaattgcatcctctcattcgagatgatgatgatgcaactgttggccaactaagaggttgtttccttgatgtgcttgcaagaatggtggatgatgaagaaacaagagccaagattgatgctcaatccttagactatgaagctcttagaggagaggccttctcaaacaaaatggccaagaataacctggagacaatgaacccacattcaaagatccatacaaagaaacgtaataggttgctgcataagagattgaatgatattgtctatgtttcctacaaccgaaggatgaagactaggtttcaaataaggcgtgagaagaaagggaaaggttttgaccctttggtcattgaagagttcgattgggataatgagtgggctgattcctcctatgtgcagcctcaaggtgctcgtgggtgtgattgtggtgaggatgagaatggccttacatgggaacttgttgatcaagctgtgggtgcatcaagctcgctgcgaggccgaaatcttccaaggaatgccaacaagcgtgcaagagtttcacactcaaggtttgactttgaagaagattttggttcagccaatgaagaagaggaggaccaagatccacatgatgatgttgatgtgactgattctgaagatgcacatgatgatgttggtggagaaaacactgaggctgctccagatgagttcgaagatggatattgactcactaagagttggctgatttcatatttgcagcttacctatttttgtgcagtgcttcaatgcttcactgcttgtgcacttaatcaactagtcttttaatcttttgattgatctatgttgctaagtcattatggggctggactggaactaattatgccactaagactagcagtctagcatatgttgttgctgctattttattcccaccaatgtattgtgggtttaatttgatatacctgtctgctgctgctattttatgtattactgttttaatatgtcaatattcataggttaatgtagcttgcagcttgaaagaaaagaagaggggttggatcttcgataagagagatggatcatggatgctacaagaacaacaaagagaagtgcagagtacataccaaagcatggacaacaaaaaggcttgtattgtattctctaaccttaccaattttgctattgcaagtgttagattgttaggatttttttgcatatcctcgcctacacgatcctcatatggcgtcgcctcgccgcacgcctaactcgcctaggcgtttggaagggggtcggtcgccatgtctcgccttaacgccttaataaccttggcggggacccttgactacggtctctactacccgaggtgccctggggaggcacacctcgtcgggtacgacggtgatcacgccggtgacatctgtaagcaacgggactcttactctcatcaaaaggatgacactacgagttagaacaattttttgtttattttctcaaaacaccacaatgccaatacccatctaa

SEQ ID NO: 56474 - DNA, 2190 bp, Zea Mays
ttgcaacacacgggtacgcacctaataaaaagataatactacaattactcgggcgcaaatgtgtttgtttaaaaataaaggaaaacaacaccatcccacccaaggccagcgcatgggcagaaaggaaggagaaggaaaaaaaacccgccctcccctcccgcaccgcaccccagcaaggcaggcaggcaggccagccagaatcacacgacacacgcatacagttttagtttgttcaactacacacgcaaatcggaatcgaaaccctatctcggatccgatggctcgttcgccgccgccttcttcgtcggccggcggcgcgcagtacgcgcagcagttcctcaacacggcgctctcccagcggggcccgtccgcgctgccgtacgccgaggacgtcaagtggctcatccgcaaccacctggtagcgctggccgaggccttcccctccctccatcccaaggccgccctcttcacccacaacgacggccgcgccgctcacctcctccaggccgacggcaccatccccatccaccacgccggtgcctcctacaacctccccgccgtcatctggctgcccgagccctacccgcgctccccgccgctcgtcttcctctccccgacccgagacatggtcatcaagccccaccaccgcctcgtcgacagctccggcctcgtcgccaacgcgccctacctccgctcctgggtcttcccctcctccaacctcgtcgacctcgtccgatccctctcgcacctattcggcctcgacccgcccctcttcaccaggaaccctcctgccgccgcacaggctccgccaccgaatccctcgccgacccagcccccaccacggctcgccgcctccccttccccctcctacagcaggcttgggggtgccgccggcttcccggcgtcgccccagctcgccccccgcccgccccccacggaggaccccgccgaggtcttcaagcgcaacgccgtcgccaagctcgtcgacatggcctacgccgacgccgccgcactgcgcaccgcacgggaggctgaggtcgacgccctcttcgccgtccaggccgagctgcggcacaggggaggcatcgtcgctcaaggtgtgcgcaacatgggggaggagatggaagcgctcgagcggcgcctgcaggacgtcatgatggccaccgatgttgtggaggactgggtcaggcagaacaacaggagaggcagcaaccaagccaccgaggacgacgaagccatcgagccggcggatgtgctgtccaggcagatgatccagtgcacagcggcagatttggcgctcgaggacaccatctacgcgctcgacaaggcaatccaggaaggatccgtgccctttgacggctacctcaggagcgtgcgtgcactgtcccgtgagcagtttttccaccgcgccctatctgccaaggtgcatagcgcgcagcagcaggctaaggttgctagcatggcagcacgggcgccaccgcagtacgcatcatagggatcatgggaaggggaagatgattcaatgctgcctgtcacatttacttaaaacatttggatgtcttgttcttctttggagacaaacccacttctatctgtttatgatatgaaatttcatgggcctgcttgttccccatgcgctaactctgcagcgcagtgcaaccatgatgtaattcaaccgtcagctgattaacatagtacatggattcatgttcacctttggaaggttaggtttccattctttcattttcaggggcaactatgtgaatgctgggaactttcaagttgatcagttccgagtcctggattattttcagaagtgttctatcttaaaatggaatatgattacatactatctctgttggaattgaaggctgattgctttagtttagccctttttctcctcatttgtcttggccccgagctagatccccagggaaggatatgatgctagcatgtcaccattgtcttgtaagtagattataaacaatgcaataacctgtatggtattttgtgctgaagaattgtaacatcaacttgggggcgtcgtcagaaacattgccttatggctggagccatgcagaaatataagggagcggaccagatgtgttggagtattttaggacagaagaaggctggtgatgtgtccaaaccattctggatttgaccatgtctttagaaatttatggcgtg

SEQ ID NO: 56475 - DNA, 2244 bp, Zea Mays
ttgcaacacacgggtacgcacctaataaaaagataatactacaattactcgggcgcaaatgtgtttgtttaaaaataaaggaaaacaacaccatcccacccaaggccagcgcatgggcagaaaggaaggagaaggaaaaaaaacccgccctcccctcccgcaccgcaccccagcaaggcaggcaggcaggccagccagaatcacacgacacacgcatacagttttagtttgttcaactacacacgcaaatcggaatcgaaaccctatctcggatccgatggctcgttcgccgccgccttcttcgtcggccggcggcgcgcagtacgcgcagcagttcctcaacacggcgctctcccagcggggcccgtccgcgctgccgtacgccgaggacgtcaagtggctcatccgcaaccacctggtagcgctggccgaggccttcccctccctccatcccaaggccgccctcttcacccacaacgacggccgcgccgctcacctcctccaggccgacggcaccatccccatccaccacgccggtgcctcctacaacctccccgccgtcatctggctgcccgagccctacccgcgctccccgccgctcgtcttcctctccccgacccgagacatggtcatcaagccccaccaccgcctcgtcgacagctccggcctcgtcgccaacgcgccctacctccgctcctgggtcttcccctcctccaacctcgtcgacctcgtccgatccctctcgcacctattcggcctcgacccgcccctcttcaccaggaaccctcctgccgccgcacaggctccgccaccgaatccctcgccgacccagcccccaccacggctcgccgcctccccttccccctcctacagcaggcttgggggtgccgccggcttcccggcgtcgccccagctcgccccccgcccgccccccacggaggaccccgccgaggtcttcaagcgcaacgccgtcgccaagctcgtcgacatggcctacgccgacgccgccgcactgcgcaccgcacgggaggctgaggtcgacgccctcttcgccgtccaggccgagctgcggcacaggggaggcatcgtcgctcaaggtgtgcgcaacatgggggaggagatggaagcgctcgagcggcgcctgcaggacgtcatgatggccaccgatgttgtggaggactgggtcaggcagaacaacaggagaggcagcaaccaagccaccgaggacgacgaagccatcgagccggcggatgtgctgtccaggcagatgatccagtgcacagcggcagatttggcgctcgaggacaccatctacgcgctcgacaaggcaatccaggaaggatccgtgccctttgacggctacctcaggagcgtgcgtgcactgtcccgtgagcagtttttccaccgcgccctatctgccaaggtgcatagcgcgcagcagcaggctaaggttgctagcatggcagcacgggcgccaccgcagtacgcatcatagggatcatgggaaggggaagatgattcaatgctgcctgtcacatttacttagtaagactggatggatatgaaaggacttgtctctataatagcttgagtttgaataaacatttggatgtcttgttcttctttggagacaaacccacttctatctgtttatgatatgaaatttcatgggcctgcttgttccccatgcgctaactctgcagcgcagtgcaaccatgatgtaattcaaccgtcagctgattaacatagtacatggattcatgttcacctttggaaggttaggtttccattctttcattttcaggggcaactatgtgaatgctgggaactttcaagttgatcagttccgagtcctggattattttcagaagtgttctatcttaaaatggaatatgattacatactatctctgttggaattgaaggctgattgctttagtttagccctttttctcctcatttgtcttggccccgagctagatccccagggaaggatatgatgctagcatgtcaccattgtcttgtaagtagattataaacaatgcaataacctgtatggtattttgtgctgaagaattgtaacatcaacttgggggcgtcgtcagaaacattgccttatggctggagccatgcagaaatataagggagcggaccagatgtgttggagtattttaggacagaagaaggctggtgatgtgtccaaaccattctggatttgaccatgtctttagaaatttatggcgtg

SEQ ID NO: 56476 - DNA, 1943 bp, Zea Mays
ttgcaacacacgggtacgcacctaataaaaagataatactacaattactcgggcgcaaatgtgtttgtttaaaaataaaggaaaacaacaccatcccacccaaggccagcgcatgggcagaaaggaaggagaaggaaaaaaaacccgccctcccctcccgcaccgcaccccagcaaggcaggcaggcaggccagccagaatcacacgacacacgcatacagttttagtttgttcaactacacacgcaaatcggaatcgaaaccctatctcggatccgatggctcgttcgccgccgccttcttcgtcggccggcggcgcgcagtacgcgcagcagttcctcaacacggcgctctcccagcggggcccgtccgcgctgccgtacgccgaggacgtcaagtggctcatccgcaaccacctggtagcgctggccgaggccttcccctccctccatcccaaggccgccctcttcacccacaacgacggccgcgccgctcacctcctccaggccgacggcaccatccccatccaccacgccggtgcctcctacaacctccccgccgtcatctggctgcccgagccctacccgcgctccccgccgctcgtcttcctctccccgacccgagacatggtcatcaagccccaccaccgcctcgtcgacagctccggcctcgtcgccaacgcgccctacctccgctcctgggtcttcccctcctccaacctcgtcgacctcgtccgatccctctcgcacctattcggcctcgacccgcccctcttcaccaggaaccctcctgccgccgcacaggctccgccaccgaatccctcgccgacccagcccccaccacggctcgccgcctccccttccccctcctacagcaggcttgggggtgccgccggcttcccggcgtcgccccagctcgccccccgcccgccccccacggaggaccccgccgaggtcttcaagcgcaacgccgtcgccaagctcgtcgacatggcctacgccgacgccgccgcactgcgcaccgcacgggaggctgaggtcgacgccctcttcgccgtccaggccgagctgcggcacaggggaggcatcgtcgctcaaggtgtgcgcaacatgggggaggagatggaagcgctcgagcggcgcctgcaggacgtcatgatggccaccgatgttgtggaggactgggtcaggcagaacaacaggagaggcagcaaccaagccaccgaggacgacgaagccatcgagccggcggatgtgctgtccaggcagatgatccagtgcacagcggcagatttggcgctcgaggacaccatctacgcgctcgacaaggcaatccaggaaggatccgtgccctttgacggctacctcaggagcgtgcgtgcactgtcccgtgagcagtttttccaccgcgccctatctgccaaggtgcatagcgcgcagcagcaggctaaggttgctagcatggcagcacgggcgccaccgcagtacgcatcatagggatcatggggcaactatgtgaatgctgggaactttcaagttgatcagttccgagtcctggattattttcagaagtgttctatcttaaaatggaatatgattacatactatctctgttggaattgaaggctgattgctttagtttagccctttttctcctcatttgtcttggccccgagctagatccccagggaaggatatgatgctagcatgtcaccattgtcttgtaagtagattataaacaatgcaataacctgtatggtattttgtgctgaagaattgtaacatcaacttgggggcgtcgtcagaaacattgccttatggctggagccatgcagaaatataagggagcggaccagatgtgttggagtattttaggacagaagaaggctggtgatgtgtccaaaccattctggatttgaccatgtctttagaaatttatggcgtg

SEQ ID NO: 56477 - DNA, 3113 bp, Zea Mays
attagccccgagaggagataatgcttcgaaggacgaaggtctttaactattaacaatcgtgttgtcttgttcttgatccatagcgtttgagaacaagtgaccaacaatctcttcttgcctcttcgaactgctcgacagctcatcctcgagctggacgttagggtagaggtacttaaattgctgaagcggcccccaaatggtgtcgtcactaggcaggccacgccactgaacaaggacgtgtcatctgccctgtcgtagttgggtgcacaacacatgctttggctcgggcaacagatggccatcatgtaacgatggcacgtgtatggagtcgtcggagggtccccacggaacggcttgagcagccccacgtggaacacattgtggagacgagcgccctctagaagctgaaggcgataggccaccttccttagcaggggccgatatagcatagccctagtttatccttgggtcgggactctagcgagggtgtcggtcggtggagacaaaaccacacccaaccacccatcgcgaagctcacgatggcaattgtcatagtaatgcttggtatactgctggtccttgagaagatgctcccgaacctccccgaggaaggtgtcacggtcacacaggacgacgtccaccgccactgtctgagttgtctttgtgacgtgcagaagaataggtggcaagggtcggtcgtacaccacctagaagggcgtgatgtggacgccatgtggaacgaagtattatagcaatacaccgcccaagggagctagtcaacgcaggcgcgtgaatgatccttggggtagtggcaatcaccttgttgatgtgctcaaacgaagcttgatgccagccatcttcaagaggtcgccacatgtgactaatgaagatcgggtcacggtcactgaggatggaggtgatgaagtcgtgtaaggcgtgggtgtccgagacaaccatgtatgggtggctgagggcgatgaagtgcgcgtacttggagaagcggtcaacaacgatgagaatgacagacttcctatagaccttagggaggcctcgatgaagtccatgagatgtcggcccacacacgggatggcatgtcgagcggttggaggtcggccaactgcagggccggcatcttgttgaacaggcacgtgacacacacactgacgttgtcctgaacaagtgcccagtcgctagatgtagaaattatactattaggtgccgcagtacgccccgggatgcgaggggctcaagggcttataccatcaagtgccccagggtgcgaggcgccctacggtgttatgaccgacagcctagcagccctaataaaatcagttagtttgtttagatggataagtatcagttagtttgtttagatggatacggataaggagtttgtttagatagataaggatttggtttgttaagatattagataaggacaactgctatctcagccctataaatgtacccctccaatcaatgaaagattaagcaagcaataattttgctcggcttccccctttatctgtgtctattgttcaccgcgggtactgttcatcccgtgaacagtatcgcgcccctttcggccagcagccctaaccctaggacaacgacgcccaaacgtcgtggtccagagcctcgcccttctcaccactcataccttcttagaagccgcagcaccaacaatctggtatcagagatgccaggcaacgatgacaacaccagcgatgtgcttctgctgccgcgaccaactctgccaacgcagcgctagagcaaaagatcgacaccatgacgaaggcccttgtcgatctcaccacagccatcactcagatgatcagcaggccgccaacaccgccaccacccccagcgtccactagccctacttccatcccatatggcatgccaggtgccctgaaacatcagaagcccaaggggcttatactatcaggtgccccaaggcacgaggggctccgagagcttataccattagatgccccgagacgtcaggggtcccgggaacttataccgtcaggtgcccaggggcacgagaggcctaggtacttataccatcaggtgctctgggatgcgatgggggccgagggcttataccaccaggtgccctaggactcgaggagccctaggggcctatagtgccctaggcgtgaggggacatgtgggcttatgtttgtatgctatgggatgtgaccatgaaagtttagaggatacccttgtataaaatgactcaggtcgaatttcctctctggctaaggccaagggaggtccccatgccatgtggccccaagagtagtggtcccaccaccatgggcctagaagctagtttcatatgtcaggatccttaagcatgtcttggcatcagccgagggtatgtccttcctcgggatctgatggataggatccagaatcctaccatggttgcataagttgcatgggtaagagatcgatggctagggcatgtgggtggtgcacgagagtcgtggtagctcacaaggagcagacgagtgagagacatggaagatggcccttgaggccaggtaagataattgccttgctcgattagattgatacatctcctctccttatgtagaaaggcttacttgacccctaagcaagtgatcgttatttctatggaaacctcttaacaagaatcaatcatgatcctattttttggaaacaatgcaaaatatctaaggcaaattctaggcattccccccccccacctgcccgcgtgacctataggtgatgtcgtcgccaatcgtaacacataccatcaaaggtgatttttataataccattttgggtcttataaaggtttcccctttctttcttgagggtgggatatggggaggctacattggcatcgaacggcttgacatgaatagtatatgcaataaaggaacaatgatttgatattacttaaatcataagcaagtggtgagccaaaatttcacagtacatgtgaagatcattcagtttgtgtggcacaagatttcgcatgtgtatttcagataattttggcaatgtaactggcaacgaatgagaatgaaaggccaattctggaggaacataatatgctgcagatagaggtgaagaat

SEQ ID NO: 56478 - DNA, 343 bp, Zea Mays
cgctagggttagggagtggccggtttaatgggccttggtgggccggctaggttagattagcttttttttctttttttttcttattcaaaacatgcttttgaataaccatgaaattcataatgtttaaaccaaaactatttataaataatatttatattttttgggactaataattatattattaatttactaggattttcatttaacaagaaatgtttattaaatatccaaaaatcaattatgcgcaatgagaaatcaaaaaccattccaaaggcaaataaataacaaacacttaaaagaaaatttttaattaccataaatatcattattaactaaatgtatt

SEQ ID NO: 56479 - DNA, 835 bp, Zea Mays
attagtactatagaggagcgagctgaagagcatgttatacattgcaaagtagaaacatagactagtgatacataaaaatcaatttccaccgctcattctacgaatttgggataggcttatatctgaactttggatagtggtggaatgtcaaattccaaatcaaatagcctactctattaagtaaattccaattccttcaaaatgaagggatccaaacagcccctaatgcaaattgcgtttgcaggaccgcaggagtgtgtttccacaaccataaatgatagtgtaccatgtactcagacaataagtgcatctatcacagaaaactataatctcctcggtacctgcactactggtgtacaaaggcaatatcaagcgtcagcttcttcttgcgagggagattattcatcaactggaatccgcccaggattcaagattgctgtcctcactggaaatttggcttcggagacagcttaagcatcatattttgggcttgtcttcctttgagagaaccagggcaaggctgcgttctggtctgagatggctcaaagagggggatgccaatactgcttatttccagcaccatgccagatacaggaagaagaaaaactttattgccagtttgaagaaagaggacagggtgttcactgatcagaaggataagattgaggtggtctgggatttttacagcaatttgttgggatctgagggacagcgtaacttcactcttgatcttcaatcctttcacgatcagttgttgatcttaccgagttagaccggattattgatgaggaagaaatttggaacaccatcaaatccatgccttcagataaagctc

SEQ ID NO: 56480 - DNA, 302 bp, Zea Mays
aatacatagaaatggcccaagggcacatttccctttcagatagcacttagcaacgctaggcagaagatgcacttttgaaatgtagtgttgcaccgttgctgtcgcaattgttagttacacatatgttctctatatgctgtcagatatccatatctcttaatggtcgtacctaccaatttgattctgataaaaatcaatcaatttattagttacagaacaagcagagaactcactgtacacggtctcttcttgtactgaactggtattcagcttcattcaaagagttttggtaaagtataaac

SEQ ID NO: 56481 - DNA, 142 bp, Zea Mays
ccgagatttggattctcgaggtaatccaggtttacactgcaccttcccgagacaagatcaggaggcaacacacccccactggtccaattggtgaccgcagaggatccgagacaagatcagaaggccaccggctgtcgcacgg

SEQ ID NO: 56482 - DNA, 51 bp, Zea Mays
aagccatcgctctggatacattagcatgggataacatcataggattccggc

SEQ ID NO: 56483 - DNA, 194 bp, Zea Mays
gggggagggacgaatccgtgcgacgcggggctggatctcagtggatcgtggcagcaaggccactctgccacttacaatgccccgtcgcgttttaagtcatctgcaaaggattcagcacgccgcccgttgggaagggagcttcgaggcggccccccccggggggtcggccgggcgggctgagccaatggcacggg

SEQ ID NO: 56484 - DNA, 1699 bp, Zea Mays
tgtggttgaaaaacataggtaatttatgcatcaaagggatccagtgagcttgccgtgcttatccggcgaaggggaagaagagctcgcggaactggcttctggctcctagcgtagacttgtagatctggcctccacgagacagtacgaacgctccgataactatgcaacatgaacaagcaaacatacaaacaagcaagtataccaacaaatatttagtatagtggtcagaatagagatatatggatgggtagagtcttgagtagaatctgtgtcttgtggtgttgagatactactagtggtggagcggaggtgcttaccaggagggtggactggaggtgaagcgacactatgcgtgtagccggtagagcggagtaactgagtgggtgggcgtttgccttggctgagggtgttgagtgtgtgtggagagggagagggtagctgggtgtatttatagctgggtgtatgtggtgtagcacagtgaagttcactgttgatgagaatagtgacgaatgaatcgtctgacttagtctgaacagagagattataggcagaatatgggataagagtattttaggagttttctggattatgaaccatgcttatgggatgacatggttggataggaaataattcgataagaatttagaaacgagaattattggaatctgagtttggaagcctggttcgaaggaatctcaagttaagcgtgctcaacttggagaaacctaggatggctgaccagatgggaagttcccactggaaggaaaatcacagtcaccggagtttgtaaaactggaatatgggtctggctggtcttaggtggactggacaacatgatggatgagtagttgaaatttggggtgatcggatgatcgatgaatagtaacggtgaatactaacggtaaatagtaacggtaaaaagtaacggtaaaaagtaacggtaaaaagtaacggtaaaaagtaacggtaaaaagtaacggtaaatagtaacggtaaaaagtaacggtaaaaagtaacggtaaatagtatcggtaaaaagtaacggtaaaaagtaacggtaaatagtaacggtaaaaagtaacggtaaaaagtatcggtaaatagtaacggtaaaaagtaacggtaaatagtaatggtaaaaagtaacggtaaaaagtaacggtaaatagtaacggtaaaaagtaacggtaaaaagtaacgatgaatagtaacggtaaaaagtaacggtaaatagtgatggtgaatagttcgtatgaacgaacgatgaacgatggataggaactatgaacgaacgatgaacgatcgaatgatcgaacgaacgaacgatcggaatttcggcagcataacaagaaaaagattatttggacgaacgaacggacgaacgatcggacgaacggacgaacgaaccatgaacgatcggacgaacgatcaaacgatcggacgaacgaacgatcggaatttcggcagcataacggcaggaaaaagattatttggacgaacgaacggacgaacgatcgaacgatcggacgaacggacgaacgaaccatgaacgatcggacgaacgatcgaacgatcggacgaacgaacgaacaaactaagaacagggggacgaacgatcgaagaacgaccgaacgatccttgtgctagtgtgtgcttgtgtggaacatggagtgggtgtgtgtggggggggagagagttg

SEQ ID NO: 56485 - DNA, 522 bp, Zea Mays
ggccgcagcgtgcccgcgccggggcgctcggcggccggggcttgcccgcactggggctcaaccgcgcgtaaccgaggctgtccctcgccgtggtcggttcttgccggaccgcgcctggtcgcgagcggccaagggctcgcaacgaccgtgccgtgttcattggactgaccggggtcgtgcctcacccgcgccgaagtgcacctgggcacatgcggccaagggctcgcagcggccagtgccttggccggtgggttggccgcatggatccgtgtggggagcctgcatggtcctccctgtgcatgagccgcatggtcctgtgtaggcaggcagacgcactgcgcatggccgaggtgcgctgctgaaagggaattaggcttacatctagttcctaaatatttttggtggttgaattgcccaacacaaataattggactaactagtttgctctagtgtataagttttacaagtgtaaaaggttcacactcagccaataaaatgaccaagtattggattcaacaaagg

SEQ ID NO: 56486 - DNA, 659 bp, Zea Mays
cgtaccctcctggcaaaggaccgcctaaaaagggtggtgtgctctcgggtggcgcggacctgttcatgcagtggaggatccgtgggaatggttgacatatgcaagggttaagtgctacatatgtcgtgtggttagagatcctcagctgagtaaatcgattcggatcgccgttatatccccggagagtggagacttgatcgctgccctgcaacctaagtcaggatgtaaacattatgaataaaaatgatgttgtattgatgagatggtgaaattagactagatgctaccagagtctattaatatttaatctggcgttaaaatattgaaagtaaggactcactttagtaggctatttctgcaaaagtatctaagttgattcttgctaaagccttttccttgattcctatttaaccagcatatccttgagagtcatttttccttagtcgggtaagacttgcgaaagtacactccgtactcagggttttcgaacccatgttgttgtaggtgatgaggagtactctatgtgttcgtgaggctggagggcgcttccagttctagaggaggattagttaggcttatgtataagctttggagggttcctaccttcctgctattgtaataagttatgcactttgagtatatcaggacttgtaataaat

SEQ ID NO: 56487 - DNA, 839 bp, Zea Mays
tgctagtgcatttagcgttttcagggtcggggatatggggccgatcgacggtgagcgtggaaggggaatacagcagccagacgtagcagcagccatctgtggagggtgcgccgtggtagcaggtagtggtggcagaggccggaggccagtcatcggctgcagtgtcggagcgtgacgtgaaatcaagagggggcgacgaacgatttggcttctggatgtagaatcggagatagatcgaagcgcgtggcggcgtgtttccgtttgtgaaaatataggagtgctgtatggtcgatggcgtgcgcgacggtggagcagcacggcgtagtggcgggaggaggccgtggccgcgccaaccattcacttgggactgtcgtgcaagctgcccatccctgcgctcttgctgaagtcctgtgttgcagctgctcagctgtatgcttgtgacgagcatgtggtgctgggggccggcggggcacataatttcaagcaagcagatgaggatctacaaccaggagggtgtatccatccatgaattctagtccaacacccgagcatttaaccaaactagcacctttgatttcatcctgtgtctggcacgattcgtgctctggatcgtgttcgtcttccctaacaacagctgggtccggtgagctgaggtttgggtttgggggttttcaccagaggttgcacaggattagagtggtggtagaagacaaccaaccgataggaaaggtcggggcgcgtggaggtgttacaccaagacgagtagcatggtcaggcctgggccggcataaactgagaccctgttcaaaattctaaaatggggcctatcactataatca

SEQ ID NO: 56488 - DNA, 237 bp, Zea Mays
ctttaatattctgcatttatattaagcatttaagtttcaatcgtgtattcatacttatatagtgtagattgaaacttagcctttgcggtagagatagcaacacttagacaaaacctagtttgcacattctagtttgtttatttgcataggttttgctctagggatttaattgtggcctagtttagagaaagttttagaagtcctaattcacccccccctcttaggcgtcacccgttt

SEQ ID NO: 56489 - DNA, 564 bp, Zea Mays
ggcgtcgtcagataccgcgagagggccgtcggtatcaacgccccagtggaatggaacgctgccgtcgggatcctgtaacgaggccatggacaccagctattactattagctgcctatcattgccagctgaattttttatattttagccattcctcggaaaaaaattcacgttttagaccttaaaaaattttaatgtcatttttggaccctttgctcggcgcaatagccaatgacgccgaggtaacacagctcggcgccataggctatggcgccgaggtgcgtgttacgctggcaaaaacggacgtcgtggcaccgacgtggcaccaagctcggcgccatagatcttggcgccgagctgtgttacaaaaacaaaaacaaaaaatatctagatgaataaataaatcggtcacaaaaacaaaaaaaactagatgaaaaataaatctggacggacaaatcagcgacataaacgaaaaatatggacaacaaaaaaaacaaattagtaataaaaaaatacgtccgccatggagcttgaacccacaacctcaaggttaaaagtcttgcact

SEQ ID NO: 56490 - DNA, 330 bp, Zea Mays
atagaacagacgacaaattcgtacagtgtgaagtaagacgtctgttgttattgggttacgagccagagacatctcttctcggagaggactccacgatttttttgtaaataacctctttaaacgtcataagagcctctacattaaacatctctctcacaattcggaagtatttataacttgatcaacacacgcggcccacacaggcacacagggagggggccagaggataagacgtcaccataaaaaaggcaaaccgattagttgaagcgatcgtgccagacactcttcatgtgcactatatagagtgcactatatagagttgcagtagtc

SEQ ID NO: 56491 - DNA, 296 bp, Zea Mays
gcgactcaaggagtggccagacgcacacgaaaaaaaatgggcagcaggtgtggctggctgagagtgagaggtgagatcggtcgtgcggtgagataagtttttttttcttttttattttgtttccccttttctattttcagttttctgtttcatttttttgaatttcaaaatgaaatatgtgtttgtatttcaaactttaatttgaatgcacaaacaaaaactcagtgttaatgcacaacattttttttatattaactatttaatccatctaagcaaatgctttaaatacgtagagc

SEQ ID NO: 56492 - DNA, 1206 bp, Zea Mays
gtgattcgtgtcatcttcagaccagaatagtccgtgcccatcatcagcttgcaagccacaacaagccgctatagatctattcctttcgttcgtgtgtttccatcgcacacgtacgcacaacaaagagaacgtcggaatagatccgatgttccttgaaaaacggggaaaacaaggaggcatttatgagtgaaatacagtttcgacggacatcgatgaggatgctggaaatcttggcgagaggcaggacatggggggcgccaccagcaagcagtacctagtggcgcaccagctttgccaaacgtttgcgggtcatttcatgcgttcctggtccaatcctgcgctttcccccgatctttatgcaatgagtgtgcatgcccagctggtacaatacaactcgagtaatataatctttgcattgacgagatggagttctttagatttcgcctttatatatatgcagtttttttttccctgtctttgtttgccaagagttcagctcttctcggtcctagtctgaggctctgaggcctgagctggagcctgttcagaaatgggattgcctccaatgaatttgaagaagtggcctggatcgaagtaccagctaacgtactacgggagagcaaagtcctgcaattgcagtgccgatttgctgctcatctgaaacattgtactacgggagcccatcagtaccggcggcggaagaacgaacacaacgacaagcatgcaagctaggaacgaactagtcttatgccgtgggcggggcccgccggcagagaaaaattaaggctaaacattccgctacagaatgttacagcagtaagtgtacatcgcaagggacaaaggtggcgcgagactaaacaaattaaggcaaccaccagcaattccatcaattaacaactctatagcatgctttcgtacgcagagagtgacggttagtgatccgctgtaggctcacatggggattggctgcatttgtggaatgatcaggaccaacggcggcatgcatggcgtgcagagacacgcatcacggccgccggccggctggctggctggctagtggctagagattcagaagacgctggcaagatctagtcgtgtctggcagataactaagcatcgatcccacaaccactgcccatcattggccgaccagctcgtttcgatccagtcattgtctcgattaattgttttcgtgcgagcaggttg

SEQ ID NO: 56493 - DNA, 883 bp, Zea Mays
aattcgcacattaatagctgtggcagcctcttatggtcttatcattcatcagatggatgttaagacagctttcctaaatggagagttggatgaggagatctatatggatcagccagaagggttcattgcggatggtcaagagaacaaggtgtgcaggttgataaaatcattgtatggctaaaaacaagcacctaagcaatggcatgaaaagtttgataatactcttacagcagctggctttgttgtaaatgaatctgacacgtgtgtatactatcggtatggtgggggtgagtctgttatgctgtgcctttatgttgatgacattttgatctttggatcaaatctcaatgtgattgaggaagttaaaaatcttctatcgagcaatttcgagatgaaagatttgggagaagctgatgtcattctaaacatcaagcttgttagagaagctgatggtggggtaactttgttacaatcccattatgtggaaaaggtattgaatcgctttggttttagtgactgtgatcctgctccaacaccttatgatcccagtgtgctattgagaaagaatcggagaatagcaagggatcaattgacatactcccaaatcattggctcgctcatgtaccttgcaagtgcaacaaggccagacatctcttatgttgtgagtaagctaagtcggtttgtgtcgaaaccaggagatgatcactggcgtgctcttgagagagtgttgcggtttttgaaaggtactatgacatacagtattcattataccggaaacccaaaagtgctggaagactattgtgatgccaactggatttctgatgctgatgagctttatgccacaagcggatatgtgtttctgtttggaggtggcgctgtttcc

SEQ ID NO: 56494 - DNA, 572 bp, Zea Mays
ataataacagagtgtatagagataaatgtcataaaacatcagagtatttattacatagcggaagacttattacaaaataaaagtaataaacatgaaacgaactaaggatcgttggcgccaatgtcgactgggatacgccacctagatcagatcgaactcctcagtgttaggcggctcctcctgaaccacctgatcatctcctgtggggggggtgtgagacagcaagggtgagctcacacatggtcatcgctcaacaagttgtggggaataatgtgacacgaactcaccaaaggtgggagctcatgtgaagtgtaaggctgatcaatgataggggttaaagctgagcattgcttttaagtagttggtcaaaattttattagcagttactaagtgtaagtaaataccaaaccataagtaaagtaatagaacaaaattaataacaaacccatgcaatgcaaatgacaaaattgaatttaagttccataatttaaacatcagagagtcctgagctgctcatgaccgtgagctcggctagtataccagttttacactctgcagaggttgtacccttt

SEQ ID NO: 56495 - DNA, 466 bp, Zea Mays
cccaagttgaacactacacatttaatctgattagaatattaatctaataaatattaatcgagcgagccttaagttaagtatctaaaatatatgacccgataaattaacattattaacgtgagtgttcgtaagcgaaaacaatttattattacgagtagacgttgtgcgacactcatgatcgtcacgcgagacaatgcgcacgacaccgcacgacacgcgtgaggcaacacgactacgcgcgtgaacaacacgatgacgcgcaaacgatgtcgtgcgtgaacaacaacaaataaataattaattaaaagtatttaagttggtattaatcaagttaattaacatttataatcgtagaagcctgagttaaaactacaacctagttttaaatagaaggtaataactatagaataccaaaagaatagataattaattaatcaattaaacttgcgacatgactagataacat

SEQ ID NO: 56496 - DNA, 481 bp, Zea Mays
ggccgattgagccgagggactcctacgcctccgggatacggatatctcactcatcgccttcgcacgaggcaactcacatttggtgaagcggttcagttagccgacaggcgagtcccagtgctcggaacgaggaaaaaacacggcttcgcgccgaaagatacatacatgttcaggccccgacaaccacaatgaacatacgccagcactcaaggtgccattacaaacagaactccggttccgcccccgcaggtacgaacaaccccccacgttggagggcctgcgggggcgacaaaacccctggtggctcaccgacgcccgctccgaagtggccaaacagcagcagccatggtcccaggacggacgcggccgccggagggctctcatttgcgtccccgcacaagggacgtgaaccagatattaaagccaaagagccggaggttggatcacgggtggcgctgacggtctcgtcggcagaaaaacc

SEQ ID NO: 56497 - DNA, 312 bp, Zea Mays
ttgaagctgagggcggaaccaagatcgcagcccggctcgcttctccccaccaccgaactggaggtcaccgtcttgggtgaccaccggcgaggggatgcagccgggctgcctgacgaaaatccttgaagccgaacgatagatgagaggtaccgacttccgcaaagttgcgttcccccaacgaccgtcaggcgggagaaccgcgggcgccccccatctgggggctcaaaaggtggaaagacacaatgcatgaggagagcgcgaagacatggttgcccttcaagggggtcgccctccttttaaaggcaactctcc

SEQ ID NO: 56498 - DNA, 168 bp, Zea Mays
ggcaagtcacccgcaggtacttttggggcgcgcctctgggccactagccgacccctaacaaatagggcacgggtgtcccctcggattacccgttagcaactcactggagacaccatgttcggtgtcctccgagggcaacatggcgctttcccccctccttgcggaaaa

SEQ ID NO: 56499 - DNA, 460 bp, Zea Mays
gtacgattaagctaaggctcggtccaactcaagggacacgacctcgcctcgcccgagcccagcctcgagcaaaagcagccaaccccggaagattcacgtctcgcccgaggcccagtcttcgccaagaagcaaccttggccagatcgccacatcgaccgaccaaatcgcaggagcatttaatgcaaggatggcctgacatcctattctgtcatgcgcccttcagtcgatagagccgaaagtgaccgcagtcacttcgccgctccactgaccggcctgacaagaagacagcgtcgcctgcgtcgctccgactgctgtgccgctcgacagggtgaggctgacagcaaccaagtccagcctcgggcgccataggaaactacgcctcgcccgacccagggctcggactcgggctcgaccccggaagacgacgaactccgcctcgcccgacccagggctcggactc

SEQ ID NO: 56500 - DNA, 298 bp, Zea Mays
gcgcgctccggtgttctgcgtgccttcctctgcgcgcgcgcctgtgacctgcgccgcgaaccccgccgtggagcttccccgaactcgccccagccccttgtatcccccatggccggagcttcttccagcttcagctcggctccatctccctgtgtccgatttctctctactcctctgccgactgcccacctccatggccggctgtagctcccagccatggcgtgcccaggctcggacttctctccagcgcccagccgaacgggtcctccagcgcgcgctctgcctctccctcagcccg

SEQ ID NO: 56501 - DNA, 639 bp, Zea Mays
ctgacacacgatggcgagataagttacaagaggtgaacctcaagttccatgtttgaaactgcttactggctttcactagagggaacacatgtgtcaatgtgtggcaagacacaaatgacaaacctataaactagagcgtgcaataggaagctcaagttgaaacaccaagctcaaacatctacagtgaccatgggatcccagtgtccagtgacgtgatgatcactctttatctcgcaatattggtgcctcaagaagcttgcgaggtaactcttcaactttcgattcttagtttatgacaactgatagaaatacacaaataaggagttctatgaattcagcgtgtcagtaccaacctgggcaacaaatatatataggacacaagaatcaacaaacatatggtatcctgatggctttgagagtatcttgggagcaagccacattcccaggtccgctgcagtgcccactggccactgcccaccaccaggagccctcttctgcctccttcccttgagcttcgccgactacgcgattcagtgcgggattctgcaggactcgcctcatccttgctgtggctatgagcaactgccgccgcgaattccaccaaagctccggcaagagagaggaaaaaaaaaagaccag

SEQ ID NO: 56502 - DNA, 769 bp, Zea Mays
caaaatgataaacataaatttattgcagcggaaataactaacggagaaaaccgagtaacatggcgaagcctggccacgctactccataactaacggagaaaaccgagtaacatggcgaagcctggccacgctactcctcctggtcctctcctgcggaagcagtaacccactcgaccgtctatcccggtggcagggatgaaggccaagtcacaccatcaacaaaccatcctaaggagtacctgcaaaaattatgccacaagcaaggctgagtatactaatactcagctagacttacccggtgtgaggagtctactcctctacctctagacatgcagctgtttggctggggggtttggtttgccaaaagcactagctgagtctaaaatcaagttttagcttttcaagttttagtatgatccttttaaactagatgagtacctagctattcatacatggtatcacacatttttaagcaatcaacatttttgccagtcaactcatttccacttattactcaatgtagcagcatggatcaagcagtctcattagctgcgagaagcagacgattcgaatcgagttttatccttgcaaggtaaacctaaacacacgacatggcgaggcactccgtccccacacatatcaaccgtccccatcgattccccgtcagcagatcagggctcaccgccttggcgtacaatgcctcactgaccccgactggccgtcgtgcagtgaccgcacttgtacccaccataaccggaatgggagacct

SEQ ID NO: 56503 - DNA, 529 bp, Zea Mays
cggcgtggggctcgtcgtccgcgccgctgcaacaccacatcctcaatgcaagtggcagctgcaatgcaactgcaatgcaaccacggccggccgaccggtcgacgacccgcagttctgtactcaacttgctggcaagcttggactaaccgatctttatatggcaagaggcaagagctagcccaagagggagacgacggacggacacggaaggaaggaaggaagagaatggtttgccagctgccgtcaaacttgagtagttgggaggggagcgaggagaggaggatggcttgcgtcgagggcgcgatcgagggcggactacgagattcccggccggcgcgcggccgaccgcgcgtcgtaatcaaatcattcgtccgctggggggctctgcactacgtgcggcttggtgttgctgccatgtttggacctgtgtactcatgtcatttgcaactgcatattatcgtcttatcgaccggtcggtactgtacggcgataggaggtgcatgcatgcgtgcatgcatgatgcgttgag

SEQ ID NO: 56504 - DNA, 578 bp, Zea Mays
agcgcctcctccgccttgcgcagcgccgcgtggcggaagtaggagtgcaggaacacccagagcgccgcggagcccagcacccacaccagcaccgccgcggcgatcagcttcgccttcacggtccacccgccgccctcctccgcatccttccccgcctcctccgccggcaccggcgccggcgccgacaccgcggcctgccctccgcctcctcccacgcccatcccaggctccaccccccagccgccgcagctctcacatgctctgcggtctgcgccgcaggccaccgaccactcctgctccttcgcgagaatccttttgacagagaagagagagagagagagaggaggtcaggactcaggaggatgcctcctcgctttttttttccgccaatcctctctctctcttctatgctctcccgccgctgctttgatgtgtttttgttggcttgcggcttttcgcgacgagggagaaagcagccgggattcgagtgaatcgaattttgctggatttgaagaggtgcgctgccactataaaaataaccccatggttttttttccctcgaccctgcgggcgacgcg

SEQ ID NO: 56505 - DNA, 875 bp, Zea Mays
gagagtcaatttagatagccaaataatttggcaggttaaatgactagtcttttggatagctattttgctattaaataattaaaatttagctaaggcaaatggcaaattcacagtcaacagctacagatcctatcctagcgtatatccgatccatctgtttccatctcctctgcctctccgggctgtaaatccctccctccctcgctccgtgcaccctgttggccgatgcccaaacgggatacgaagacagacacctcaagctagtaattcatcccaacgcacgcgacgtgtcgttttcctagcggcgcgtcgctgtaaacccccggtttggaaatgccaccaggtaaaaactaattaaagcccggggatccgaatccgacagcaacgaaccagtggtaccaagggaatcaccgcaacatatcccctgaatggcttagaccacgatgcgtgtcgccggagtttccacgggaaaaaaaaaacagcttcggttccaccctcacgtcattttccccgcgcgcctcgtggagccaacagccaagctcgcacgcccgccgcgaccgttgggagagcgtggtgggcggctggctgggctggctggctggctgtggagacaggatcgagcccgccagcgtgacgcccggctttgtcctggcctcgtcttgggcaagtcctaggcggaggagggcgcacacgggtcgcgctcgcgctccatggcggaatccgcggagcagggcagggcgaacggaaggcaaaagagaacaaaccggcctcgtcaggaacccggtggcattgacgccttgctgccgctattttgtactaaatgctgctttcggcgggtggcggcactggagatcctgctgctgtgatgggcaaaa

SEQ ID NO: 56506 - DNA, 324 bp, Zea Mays
acactacttcgagtcccatccggtgactgtggtgtcatccttccccctgggggagatcatccagtgccgagaggcctcgggcaggatcgcaaagtgggcagtggagatcatgggcgaaacgatctcgttcgcccctcggaaggccatcaagtcccaagtgttggcggatttcgtggctgaatgggtcgatacccaactaccaacgactctgatccaaccggagctctggaccatgtttttcgacgggtcgctgatgaagacgggggccggtgcgggcctgctcttcatctcgcccctcggaaagcacttgcgctaagtgctgcg

SEQ ID NO: 56507 - DNA, 790 bp, Zea Mays
aaaagaaggccagcgaatccacaacgccgccggccgccgcttgtggaagcccgactaaatgagatgtttttaacagacaagagccaaatcaaccagatgttctcttgaatgaatatactagctaaaaaaacactaaatgttgttgtttcctaggtgagaagtaattaattggggtcacgcacccgtccaattgcgatcactggcaggcgcgagagacgaacggtgttgtgttggtctgtcttgtcaccgccgactgtttctatctagtctagctacgactgttgcttttctcgcttatcagcctacctcgatcgtcgttggcgccagcagaagcggcgtcatatgcagcgaaatcattgatgccgatgccgatgccatcatgcatgccgcctgcaagctgcaaaccctgcatgctaatcagtttgctttgctctcaggcatctgcaggcagcgtagatgaaccccctgctgctggctgccgcagacaagatggatccatacgaatgaatacaacagctgctacactactattccctggcaaacgcattgcagccgcagtactgctcctttggagcttccctgtcttgatcgggtgtcgtcactcgttccatacttccatgggctgctagctgaacgctagccgacgatcacgactagacctggtggtgctcctgatctgtactgtacttcttttttgagcgaaccaacaaagcggcgagaagctctccaaaataaaataaagccgctctacgcgacagcaacgtgtgcccctcgccgcacatctgcgtcc

SEQ ID NO: 56508 - DNA, 716 bp, Zea Mays
gttaaattctaggtgaaagcttgtttgttttgctctcaatacatgtggattgaatgtaattgagtgagttttaaatatcaagcaactcaaaatctttcataactttttccaatcctatccgatccacatgagataggaataactgaacaaggtctgagtgagttcgttagtttctagtttctttgtaaaaatgcaatattcccaagaatctgtatgtcagaccagcaaccttgtacaaaatgcaagggttgacaacaacaaatgagaatttggataaaaatatgtaagaaaatagggaaaataacattgagattgttgtggatttagatgagatttcttaatagtgagataatcacacaaattctagaagcaaaacaccatgagtggttctaggcgagcttcaagacacactctgcctcgctagggtcacgcctggggtcgctttctccatgctgctgatgcggtgatgcctgccacatcctccactctcggcccttattccttggtctcctagcgctctatcctctcctccctatgagagccccttacgagaccagagtcactcgccctctccctcgatgatgcacctttctatctcaatagagtctcggagggccaccccaactcccatcgataggcagaggatggcttttgggacaactctaactatgaaagtctactgatggtctttcccaactctctaccttgacgacact

SEQ ID NO: 56509 - DNA, 2779 bp, Zea Mays
tcggaatttgtcaagcagctgtagggtaggaaagtttcaatgaaggtaggacacacacacgcacagcacattctgccggtaaaaacaacatggatgtgggcccttccttagatttctgctgctgactttcgttgaactaggtgtgctcatctgtttccagcttaggaattttccgtgaactggtgtgctcatctgcttccagcgtaggaaatttccgtactggaacatcgtaggaattttccgtcttgtagtctgtagggtcagcaatgggcgctgaaagtcaagggtgctgagcttgtgccagatctaatattgccgttgccgatggggaatggatggactaccctctacccatgcccaccccacttgaacccagtgattaatcagaagacatctctcaaactatccccaaactccaggaaaaagtttatttttagcccttaagttgtctgattaaaggagaacatatcagttacaaccaggcacattagtgtaaccgtgcaaccagacacattgagaacatttgtaaagttgtctgattttattattgtaaggagcgtgaggcctaaaagtccagacttcgtcaaaactttggtagctaaaagtagacttcttcatatgcctaaatggacatagattatccaatgggcaattagaaaatgatgtaaagaagagtagcctttcgcgttagtctccatccccatgtcatgcctccatggtttcgttaagtcgccgcttatcgaccaggttgggatagttgcctgctctagtccgggatgtggtcgtctaggcggcgcgcggactcggacgatgactcccaaacagaaatcactgcctccgatccatcacttgttcctgtttcttccgcatgcttcttctcgcgggtcgtgctggtccaggtccacacgcggcaggcaggccgtcgacggaactcggaaggatacggtagcacgggaacaggaagccccgtcttctcttctcgatgctgggcatgcatgggtaaccatagtattttttacataagtaaaatctaagacctgtttggcaacaaagtattttcgtatacacagttttaatcaattcataaattaaataaaaggtcagacctgtttggcaacaaagtattttcgtatacacagttttaatcaattcataaattaaataaaaggtctattcaaatgcatgtatacctggtatgattgtttagatcgtgtccagcagtttatatctatagtttatccaaaacattgttaatgtttttgcactttagactgtagtgtttgtagattggagtttgaatagctgatggagatagtcttacacgtccgcaagaaccgccccacagaagcaaagtagcaacatttcacatgagttaggccctgtttggtttgaggggctaaagatcacatttagtttctaaattgccaaacggtaggactaaatcactagatcagggactaaactgctttagtccctagtccctcaagatgtggctaaaagggactaaaccatattaattccacccctcatttagttcaattgtactaatattaagagaatgttaaaggttattttagttttcttatgagtcatttagtatattcttacaaattttagtccctagaaccaaacatgttatggactaaactttagtcctctaactaaactttagtactagactaaagaaaccaaacaggggccttataaaaacaaaatactccatggacggggtcggacggggcactctcatcagcaggagcgtgtaagctccagcaagagaccctaaagggttctgtaccctaaatatagaggatcgaatggtcctctacgctctccagcagcgtcctctaaacagttctctaaatttagaggacgctgctaaattctctatatatagagtttctctaaacggtcctatatccatttgaatactttaaataaccggtttagcaaaactaaaatatgtataatacatttgagagtatgacaaatacgtacgtataaaaaataaaaataaaaaatatctcagatatatatatttgagtatagaggacgtgatttagaggacgttgttgtagaggaaggagatatagagaataatttttttagaggagactgtaaatgacggatatatatgatggatatagagaacgttgctagagacaacctaagattcggtggacagagcagcagcagcgtgtaaaacaaaataccatggtttactaattgcatggcaagtattagcaatacaatggtttaagttacagagttgttaggtgacctaccaaacaccttttgatcaaaaactacagtattcataaataccatggtattttctctcttggaattagaaaaaactgagttgtttaaaacactgtagttttgatatactatagtttataattgtatatgacataaatactacggtattgctttactacaataaaactacagtattgcttaaaaccgagatatgtttggttctattagaaaaataaagtatatgtagagaaaagagaagaaaactgaggtcctgagtggagttttgaaaactccaaaaacaccacagttttgcaaaactgagttttaactataaaaactaaacaccttttgagctttaatactattgtttcaaaactgcaaaaatactacaatttcaaacagggcctaagtggataaattcgtacccgtatgcagcgtatccttttcgtttgtctaatattgcctctatcctaaattaagactcattttaaataattaatggtgtcatacaatactt

SEQ ID NO: 56510 - DNA, 533 bp, Zea Mays
ggtgagtgagttgggccggccgaggaattcacggcccaagcgagatcctcttttttctttttctttttcttttttattttcttttcttgtttttcttttccttttattttcaaatctagaattttgaattcaaatctcgcagcaaaatttgtactcaaattaagtattaaccttgaacatactagtggaatgaatttatttaattatggatgtgttttgtgttttatagtatttctttcttttctccaaactctaaattgcgaattaggtcttaattcaaatttgggtactaatgtttttctatagttattatctttattgttatcaaatgcacacacaaataaacttcgacatgatgcatatattatttatatgtttttggctaattactcacttaaataaagttgttcacatgtgatataaaaatagaggaatatcatataggaataactatctcctttaatttggtttacaaatttgagtattacacatcacacagtaaattaactgttccaaacgataaagattataac

SEQ ID NO: 56511 - DNA, 445 bp, Zea Mays
cacaaatctcccagatgactgaccgcacgggcccaagtgtcactaggacgccagagcagcgcggggagtttatttgttgtcgcgcgagcccgtgagccattgagaaggagcgagtgtgagagcggttgttcagtgggtccccattgtctgtgggcggttgtggagggaaacgggtcacgtgggtgagtgagttgggtctgccgaggaattcacggcccaagcgagatcctcccttttttctttttctttttattttctattttctttccttgtttttgttttcctttaattttcaaatctagaattttgaattcaaatctcgcagcaaaatttgtactcaaattaagtattaaccttgaacataccagtggaatgaatttatttaattatggatgtgttttgtgttttatagtatttctttcttttctccaaactctaaattgtg

SEQ ID NO: 56512 - DNA, 349 bp, Zea Mays
agcatcccctttgcaagattgcataaaagtgggggcaacagagtataaacatataacatgactaaaatatactaagtattattaatcgactagcaagggaagataaacatacgacctgaactgaattaaccagtgcgcacgaccatataaagaaaacaaacttcctttgacaataagtttctaattaaatcatggctgcgcctgggcagcgttattgtgagagtaaaagtggacgtgctgctactcccctcattcccaacatgtatcaagtacctgcattgagtaatgcaagagtgagatgacacatctcagcaagtaaaataatatcaaacagtttaaccacataaga

SEQ ID NO: 56513 - DNA, 143 bp, Zea Mays
catttacctctctgtgcttaatatatacttacatctcgccttgatgtactcggaggcgtacaactgtacaagtcacaacaactagttgtgccccacacacacacaaacactgcccagtgttccatccacaatccaactagcca

SEQ ID NO: 56514 - DNA, 752 bp, Zea Mays
caactcgatccctcaagtgattttgtaacagagtcgagttttggaggtaaagaatcatagatctgggtcccgcgatatttctgttattttctgtgatgattttagtgcatctgtacacttttgattcacgcggtttttgaaaaaaattagggttctaaccctagcttcgttctgtacgacttttttctgatctgttcttgaccgtgaattaaaaaaatcacgagtccctgtttacaggtgtaccgattagggttaggtcataaatcctaaccctagacagttatgtgacctctctctggtttgaggccttacagtgaccaaacctaaatctcagggttgaaaaccctaacccgagagcatcgacttctttctgttctattatctctctgatcttggtgatgaacaataataaaaaaatgagctcaatcacattaatcgggacctttctgtgatctcataaaaccgatgtggattaggagttctagggttcttaggatgctccgataccattgttagaatctatactgtctaggatcgattcctaagtccctagaataccaatccgtaactgaaagtaaaatcttgatgacgtgtagatctgatctactgatctactgagaggaacggagaaacacacctttgttgctgttgctatctttatatcgtcgtcctgcagagaagcagcaggcatcgggatccgagccgctgtaggttgtcgcgtttccaaacactccgacgcctaggcgatgggg

SEQ ID NO: 56515 - DNA, 1440 bp, Zea Mays
gccctcccgatcaagggcccgattaaaggaacgatagttgggttaagtccaatccagtctctattgaccggctgtagaggacacacccaacattcctctctcttttttttttcctttgaagcttgctgttctgtttttgttccccatgcataaggcactggtgcttcttgcggctatgccgaattgccgatgccaaatgcaatgtccatccatcgtgtcgtatactgttggctgttcatggtcatggcctagcctaatgcaactcttcattctctagcctagcctgatgccatgatgtagctagctgcaagattgaagcaagcaagctgatcgggctaaccagtttatttataactagtacccatgcatactagattaactgaattttagccatacttagagcatctccaacaatgcctcaaactagtgcctcaaattgaaatatggggctctatataggaaaaaccactccaacagtgcctcatttcataaaattttgtcaaaaaaatatagggcaccctctcaagtgcctcaaatatactacaccgtaatgggctgccctataatttagatttggagctttactgttggagcggagtgttttgttggtgccctaaattctataaaatatacttatttttaaattatagggcatttttataggtcacattgttggagatgctcttaagccactttagcattcgctgctgggctatatgtcacgaaacgtgtagttaattaatcaagtagctagatttttcacattaataactaatcagttgtgtgcatcgatctggaggaggctgtccagtttccacgcgaatttacactgcggctgggggaagaacatgaatcttagcggaggcttcgcttcagctggaagaaggtgcggcacgtgaggttcaagttcaacaacctggtcaagaaagggaggctaaggctaaacgacaaaagttatggcgacacggcgaagctggtggctgccacgcgggccctacagggtcgcatgcattcctttgcggccgctcagaccggctccaacaagcaacgctaaatggatctgtactctatatttagagaaagaaacgtccaccgttctctccaacaagggactgtaaacgaatcggtaaaatatagcgtgcgttcgacgaacgctaaatgtggaggatcttcatcacgcacgctaaacgccggctccgtccacttcctcatgtgaacgacgacctcggcaacctctctgttgttgacttgttctcaaatgctatgaatcaagaacaaagcaacataaaatattaaatattaacgcacttcgtccttcgaaacattatttcccttaggatataatgatcttcagacgaaggtcatgaaggacataccttcgaatatcgaaggtaagatggtaatagaagaagcgtgtaaaatacaaaagataacatgaac

SEQ ID NO: 56516 - DNA, 355 bp, Zea Mays
tagatcgctgagaagccgcaccggcaccagcacccgctggccaccatcgccgtcgtcgtccccgccagcgaccagcatcgggacgtggcctctcgggaccttctccgcctcctcgtagccggcgccggccccgcgtgcgggcgacccgctggcgctgccgttcttcctcttccacgccatggccagatgttccgtttattatttgcccgaccccgctcgagagagagagagagagagagagagagagagagagatctaggtagctctcgatcggcgctggagttcttagctagctagctagggcgactgggcgagtggtgatgattggatcgcgtcttgttctttttgggctcgg

SEQ ID NO: 56517 - DNA, 459 bp, Zea Mays
cgcgtcttcggtagggatgacacgcgggccccagcacctagtgggatgagtggagcagcgcatgcacaggatgggaattgggcttcgcggcaggtaagggggatatgggtcgaaaagggagccgccagcccaacaggtaatcctttcctttttcttttattttttcttttttttctttttttaatccctaatccaacttgaattcaaatttacattcaaatcttgtactaaatttatctttgagttatattgtgaccttaaggtaataattttggaaatatataaacttcctttatattttatatatcttctctttttctcttctacataatacttccaaaaccctaaagtgcaactttgggttaaattcaaatatccatctcattattgtatttcttttattattattttattactaagtgcacaaacaagcaaaactccatcatgatgcacaattta

SEQ ID NO: 56518 - DNA, 598 bp, Zea Mays
gtttcttgcaacgttcgggtggagtgctcgtgggcgaggttcgtatttattgcctcgaacccacggactcggaggtgtggatcggcagctccgagagaagggggagaagttctgcgcttcgcgctcgcgtggttgacgcgtcttcggtagggatgacacgcgggccccagcacccagtgggatgagtggagcagcgcgtgcacaggatgggaattgggctgcgcggcaggtaagggggatatgggccgaaaagggagccgccagcccaacaggtaatcctttcctttttcttttattttttttcttttttttcttttttttaatccctaatccaacttgaattcaaatttacattcaaatcttgtactaaatttatctttgagttatattgtgaccttaaggtaataattttgtaaatatataaacttcctttatattttatatatcttctctttttctcttctacataatacttccaaaaccctaaagtgcaactttgggttaaattcaaatatccatctcattattgtatttcttttattattattttattactaagtgcacaaacaagcaaaactccatcatgatgcacaattta

SEQ ID NO: 56519 - DNA, 182 bp, Zea Mays
acatgcgcccctcccggaagtcggggtttgttgcacgtattagctctagaattactacggttatccgagtagcacgtaccatcaagcaaactataactgatttaatgagccattcgcagtttcacagttcgaattagttcatacttgcacatgcatggcttaatctttgagacaagcatatg

SEQ ID NO: 56520 - DNA, 190 bp, Zea Mays
gataataatccagctgatatgatgacgaagcatgtttctgttgctaagtttgagctatgctcaaacttagttggtattataaattagcccttagtggctgttggcgccggcaagatgatgatgcatttgtttaaggtggagtttgctattatgatgctacaaggaatttgtctcaaggtggagtttgttg

SEQ ID NO: 56521 - DNA, 348 bp, Zea Mays
tatgattcatggtctactagggtgacaaatgcttttagaaccatagattctcaattagaacaaattttagacaagagtatcattccttctggctatgataggaaaaatgcttccgaggaagatctaagatgtatacgcttaaactatctagcctatgacatcttaagtaaatctcttagcaaagaagattatcgtgcattcataataagatataatgaacctatttgtgatgcacatgatatttggactagaattaaaccaaattttatgagtccaaacatgatggttcattttgtgcttctacttcctttggtccttgtgaaactaaccctttgaaggaagaagaag

SEQ ID NO: 56522 - DNA, 204 bp, Zea Mays
gactggggcagcgatagcctgctctgctcccgccactataaaaggcctcgaggtagagtggactaggacgcgtcgatcgcagcaagtttgcaggtctctcactctcgcacatcacgagctatctcgagctccaattaatctgctagccaagccaatctccgctcccaccctagtccagcccttgccttcgctgcttgagatgga

SEQ ID NO: 56523 - DNA, 463 bp, Zea Mays
ccgctccacgcccattctgtgttatcttattctggccttagtctgcccgaggcaagacttacccatgacgaggcatgtgaccagttaaagggtcctcgatcagcgcgcctacatacacattcaatccttaatcaacctgggtagaacatcacctattcctagcccaagtcccgatttaagtactttcatccttaggattgtttgtgttccttaggatgaaaagagcatcaaagggaactttgcagtaagatcccaccacgctctcaatgaaagtattcttgcaggtagaagtcatctttcctcaggataatccctgagctaggccttaatgcaaaagacaacctctatccacaagatctgagcagggctaagcatttttgtaaatcataattttgatacttcaacagaagtatctataaaggcatggatttcaaggaaggcaatgcatccaagggtttccaag

SEQ ID NO: 56524 - DNA, 155 bp, Zea Mays
caccttggagacctgatgcggttatgagtacgaccgggcgtggacggaattcggtcctccggattttcaagggccgccaggggcgcaccggacaccgcgcgatgtgcggtgctcttccggccgctggaccctacctccggctgaaccgattccag

SEQ ID NO: 56525 - DNA, 247 bp, Zea Mays
cgcaaggaatctccacaagttggagtctcttgcagccttacaaaagatcagggccacaaatcagagtaagggggaccgagggagagagtacaagcataagagatcaatactagcaactcaacacaaaatagataaacacaaatgcataatacacaaaatgtgaagaacaacactaagacgacgcttagatctcctcactagaatcgcacggatgagttgtagcagagtgtcggagtgttgtgtgtcc

SEQ ID NO: 56526 - DNA, 340 bp, Zea Mays
ggaagagcgggtgcggcgcggtttgggccaaaatcgacccagccgagggggaaggatttttcttttttttctttttctgttttctatttcatttttccattttctatttttgtttctttttatttccttttcttttgaatcaacaatttgctgaataatcttaagggttgaaaataatctatgtgaggtgttcctaacaatccaagtgtatgcatatgatgagatgacctaagggtggagtttagggagaaaaatagaaataagggggggggttaggagattagggttccaaaccttgggttgagattttgggatgttacacttggtcccttgggtggaa

SEQ ID NO: 56527 - DNA, 129 bp, Zea Mays
tgttcatcgattattttgtaaatgatatgcatatagtttcgttttgctggaatatggtagctcgtttagctcgcgagctggctcgttaacgaaccgagctaggatgtcagctcagctcgtgaaaaaatt

SEQ ID NO: 56528 - DNA, 724 bp, Zea Mays
cacaagaaacgtacccatcattaccggctcaccgtccggcgtagtgaccacttgcgtataatatatgtgtcccgtcttcttagtatttttgcccacagtatttcccttggcttgagatgaatttccagatccttgctaattatttgactggttctgctttggataagggcaatccttgataaaatgcccagacttccacaattgaaacatccagttgatgagctgggcaaagcagagaatcgagtgcctggggcacccggctgacttgatgcagtaggggcattattgggacgaataaagattggccgcttaaaagggaaggagggtggacgagagaaagaacaattctggttggaggccggatgacaacccgttgcttcttcaccgggccctgactagccctgtcacctccaaaacccttggattttccagcacctcaatactttgcttctactgctagtgctgtactgacagctcttccataagtaagatctatgcaggttgccatctttctttgcagtcggtcatttaaccctctcataaagcaattcttcttcttcttcaaatcaatgttcacttgatcgattgcatattgtgacaaatgattgaatttattgagattctgattaacagtatcccctccttgttcagcttcataaattcttcttgcttcatgtgaagaacaccttctggtatgtaatgttcgcggaaggccaacttgaat

SEQ ID NO: 56529 - DNA, 5597 bp, Zea Mays
atttgttttaccgaagttcggccctcgaaggtctagtccccgttgaggagtccactaaggacatgtctttttcaaccctttccctctctccactgatcacccaaggatcgacgagctcttctttttctcaaggatcactcttgatcccgcaaggaccaccacactctttggtgtctcttgctagcttttacaagcctccaaaactttggaggaagttcgatgggagtcaaaactccacgcgcaaatgaacacaaagatgtagcacacactatctctcaatgaatctcacaaggcactagtgctaaactcaaatgagtagctctctattgctagctctctcttttgtggcacttgtgtttgttgtagtggactaaatcttgtgtataggatggatcaattaatgtatgtggttgggagggcttgagtatgtcaactagatgacttggaatgttgcttgggctccctcaccttgaagtggccggttggggtggtatttatagccaccaaccaaaaactagtcgttggtgtattctgctggcgaagggcgcaccggactggacagtgtccggtgcgccgccacgtcatcctgtcattaggtcctggacctggtcgaccgttggaggttctgtcctcatgtggcaccggacagtccggtgcccctctgaccgctgctctgacttctgccgtatcactgttcactttgcagagtcgaccgttgcgcgcagatagtcgttgctccactggtgcaccggacagtccggtgaattatagcggagctgcgcctaggaaacccgaaggtgaagagttcgagctgaagcaccctggtgcaccggacactgtccggtggcacaccggacactgtccggtggcacaccggacagtccggtgcgccagaccagggcagccttcggttccctttttgctccttccttttgagacctaacttgttcttttgattggtttgtgttgaacctttggcacctgtagaatatatagtcttgaacaaactagttagtccaattatttgtgttgggcaattcaaccaccaaaatcaattaggaaaaggtttgaccctatttccctttcaatctctccctttttggtgattgatgccaacacaaaccaaagtaaatatataagtgcataattgaactagtttgcataatatatgtgcaaagattgcttggaattaaaccaatctatcatttcataagatttgcatgaatgcattctttttatatttaatgttttagaccatgcttgcaccaattgttttgtttttgcaaactcttttggaaattcttttcaaagtgttttgcaaaatagtcaaaggataaatgaataagattttgagaagcattttcaagatttgaaatttttctctccctgtttcaaatgcttttcctttgactaaacaaaactccccctcaatgaaatcctcctcttagtgttcaagagggttttaagatatcaaatttgaaaatactactttctcccccttttgaacacaataagataccaatttgaaatttaccaattgaaaatcattagttttaaaattagggtggtggtgcggtccttttgcttggggcctaatactttctccccctttggcatgaatcgccaaaaacggatacttagagtgaaatgtaagcccttgttactttatccccctcctttggcaaataatatatgagtgaagattgtaccaaatttggagagatggcggaataccggcaaggaaggataataccattggagttgagtggaagcgatgtctttgccgaatacttcatttccctttcaatctaagacttaatacatgagtgctcatgaaaacatattagtcttagccttggcacacaatagagataagaaatatgcgaatgtaccaaaggaaagagacatgattaaaaggatatgtcaattaagcttaaacaattctatacaatatagattgctccccctaaatatgtgcatagagaggaaaacaaattttttgtctaaaatgccaagtgcacataattaggttaatgaggtcatatctatatcataaagagtgtgaagtgcattgtgtcatagtataggtgtgatgctcatgacaatttatgcacttatgaaagcatgttgtaaacacctcaagcattcacccttaaggatttcaaagaggcttaaggaccatccaccttttgaacaaaggcagcttatcctcgttacaaggttaagctttaagctccttgacaataaaattacttcacccagtttaaacaaagaagtaagaatgaatatttgagaagttaacctaggtatgaagcagggttaatgcatgaacatgctttctcttccttttatacaagatatgcaaggaatgaaggaagatttaggtacatgtatgaataagattgaatagttttacccttttgtacctttacatagtgatgttcacttcattgtgctttgtccttagtcttattgaattcgccgaagacctatactcaagacaatatatgaaaatattttgcacaagagagagttctacaactagtgatctttttctaagtcattgtttttagatatcaagtagatcacaaattgcataaatatatcatgaattcttcttttaacatagtgcatatcaagatagatgtcgattgaaattaccaattgaaatcaaattgaaattgcatgaagcactaagaagcataagtgataattgaagttattcaatgatcatacaatagatgcgatcaaaagaacaacataggcattagattttcaaacatgctcataaaataggagaatccgataaatatgctactttaacattgaaagctacaattcttgataaaggcgacattattttaccaagttggattgaaatgtagtagcatacttcatgagaaacttgttctcatacatgagacaatatgagatttctaagataacgtgctagtctcaaaataatcaagatatagaaataggctccccctagagatatgcatcaagaatgaaggaaatgggtggatgcactcacttttaaaggcaaatagggagaagcactatttatctcgatcaaggcttaaaagatttgcaataaacaatttttgcctagtattctcataatgaaaagttttagaatgcttacaaccacaccattgaatgttttgaagatctcatatccaagtaggtattgttgctcttgatgtcttcctttttcatttgagtgtcctccctttattgttgactctgtttccttccaaacttattgaaaatactcaagagagatgttaatagcacaagggagtatatagtgatgatttctttagatagaaagtaaaaacaattcatcatccataagtcatatagacgtgaagtaaaatccttaacattagtgcacattacttgaaaagaggaacatgcactatttaaacatttgagcaagcataggaatttacttcttcatattgaatttattaataattacttaaaagcaagtcaatatgagaacatatatagcaaaggtatgaaatagattctaatggataagtgcattaatgagaatgagattgaatgcacatcttagccaatttaagtttaataaagaatctatttcttcacaaagatataatttgagtgaacaatcattgatgggaactaaattaaagagatgagttcccatacctttgctttgacctttcttccttttgggtgaagagtaccctttgaggcttgtggctttaaccttgcacttactctcttgtagattttcataagtaggctcaagagaaatgttaatagcaacacaagcactagtttccctttttgtaatcatttttgataaggaatgaaaagtgaattactaaagcatggaaactttataatatgaactaaattattccttgaggtatgcttagttttaacttatggaacaagcatagtaagccctttaagattacgggaataaatctaattcataacatggagagcgatgaatgtagaagaatcatatccaatataagcaagaagcataacaacataagtcattggattgacttttctttttatgttaaattatgcatctccaaagagaaacatattctctactagtgagactacatgggttacttagataaaagcattagactcactattctagttatagagagaatcttccttttgtaggtgtcgtagggatttgaattcctatcgtgacaccctattcttttaagaacttggaatatctctctctacatcatggcaataataagataataaatgtaagacatgccatgagttgcttaataattttagaacatgtagattgccatagtataagaatgatgaatatacaatctaccatatgggaggaatatcttcaaggaatggtgacataattttaagaacattttaagtgcttccttttctatgtaactacacaatacacataagaaatgataatttgagatacttgcacttgaaaacatagttgttaccatcctttggctttcctccatgttgtaggtcttgacttttcgacatgggattagttctttgtttcctacaacatcaatatcttcccgagatgatatgagttttagacataataatttgaaataaccttgggtcaatcttggatatgtagatcattgtagattgatagcttgagttaatgtgaattgacttgactctctcaagcacccaaagtttcatatcatctcattctcctgcaaagcttgtcaagcatgttttggtacccatcgcttgatggatccattatggttagtcaacaaagatctaggaaccctgaatgtcctttgcgctagcgcttggcaaattcattgcctttctagcacaagttgcaattttgggttgcctagttatatatgaatcaaatgacaagctatgagtggaggagttatcaatgggacaatccttgcattgatgtcccttttccggcatgtgtagcataggcgttttccaagttttgaagatttcttctttccttgtttgttgcttgctacatggttaataaaaactttcttttctaaccctatgcccttttgttttaaatggggacaagatttaataaagtgtcccttctttgaacatttaaaacaacgtttgttattcttgttaataatcaagccatttttaatatagggacatgatctaatcaagtgcccctcttcaaagcattcactacacttcttgattctatttgtatgaagtgtaacttgattattaccttggatgttaccttttatggaggcatggttgaggcttttggaagagatattgattttcttcttttgcttcctcctcttggcaatcctcaagtccttgacattttctccaagggatttagtgcatgcctcggttgttcccgtctcaagcttcttcaccatgtgatcacggttatcttgagaaggttgagcaatgcatttcccttttagttgagtcaagctcatttttagcctctcattttcttctttgagcttttgatatgtatcatcgtttgctcctgcagattctagctcaaaagaagatttgcttgtcgacagacaacaagcattagcacatggtaatatagtttctat

SEQ ID NO: 56530 - DNA, 1717 bp, Zea Mays
tcaatcttggaaaacactttagctccagaaagctgatcgaacaacaaatcaatgcgcggaagaggatatttatttttgatggtcacctcattgagtggtcgatagtccacacataaccggagcgtttgatccttctttttcacaaagatagcaggacaaccccaaggcgatgaactcgggcgaatgaaacctttattgagcaagtcttgcaactgagtcttcagttctgctagctccttaggtgccatcctatatgatcttctggatatgggtgcagtacctggctgcaattcgattacaaattccatgtctcgctctggaggcaaacctggtaaatcttcagggaacacatctggaaattccctgacaacaggtatatccttgacctctttaactgtagcagcacacactctttccactgctctcttaagagttggtaatcggatcagcaacttataattactgttaggtgagtccaactgtatcgtcctttatagagcgtcgatcaccgccccatgccgtcgaagccaattcatacccagaatcacatctatgtcctgatctggaagaactagcatattggtaggaaacatgtgaccaactagctttatgggtatctgatataccatctccttagtatgcaaacgccctccaggagattgtatgctatatcccttctctaccacctccaaagacaactggtgctttaacacaaatgtccgatttataaaagtatgggaagcaccagaatcaaacaaaatactagccaagtgattggcaactggaaaagcacccagcataactggttcaccctcaggaatagctttgatcttagtataatgaacttgtcccattttaagaacaccctctttcttctttgcttttggctggctaccgcgagaaagagtcacaagcgattgtcgctcactcactcggctagggaagcgacaatccagaatagagtgtcctgactttgcacaattcgcacacgaattgatattatctggaatattttcaaaatgaatgtctgggacatccggctcatgtggaacaaaaggaataatagcatgtctttcacatgactgttgtgagctaggtaactggggtagaaaagaacgaggatgataaacaggttgataaacaatcctccggcactgcttgacactaccagaggattcctccacaagttgctttcttttagattcctgatgacgacgaatcttgttatcacccaaaacagcctgactgaccacctcattaaaatcttcagccaaactagttgccatcaaacgttggagcttctcgttaaggccacgcaagaaataaaactttttcttctgattagtattcacaaaatccaagacatactaggatagacgagtaaacctctcaaaatatcccatcacaccctcttcttcgccttgctttagatctaggaattcgttgaactttatttccataagggctttcggaatatgatgtgcccgaaatacctcacagaactccgcccaagaaacttgatgaccttctggctgcagtgcaaggtattcggtccaccaagctccagcgggaccctgaagttgttgggtagcacactgaactttttggatatcatcacaacggatgagtcccaatttctgttcaatcgttcgaagccaatcttctgcttccaatggatcttctaccttggagaacactggtggttgcgtactgagga

SEQ ID NO: 56531 - DNA, 720 bp, Zea Mays
cttttatcggcgtaactcttttgacgagattgtgccacctgcagatttcgttggatcacttgaaccttttcctccgcttcttttacaagatcaggtccaaagaaacatctctcccccggctctgaccaatttaatggtgtcctacaccttcgaccataaagggcttcaaaaggtgccattcttatgctttcctgataaccattgttatacgaaaactctgccaatggtaaacattcatcccactttgctgagaaagcaagaacacatgctctcaacatatcttctagaatctgatttactctctcagtctgtccactcgtttgaggatgataagcagaactatgaattagtttggttcctaacgagttgtgtaactctttccaaaatctagatacaaattgtgagcctctatcagatacaatgatcttagggactccatgaaaacttaagatacgagcaatatataattctgcataagtcttgactgagtaagtagttttcacgggcaagaagtgtgccaacttggtgagtcgatcaacaattacccatatagaatcatatcctttggaggttttgggtaacccgacaatgaaatccatactgatactttcccacttccaacctgggatagacaagggttgcaatggtccggcagacttcaaatgtacggcctttactcgttgacaaatatcacatctagcaacatatcgagcaatctct

SEQ ID NO: 56532 - DNA, 504 bp, Zea Mays
atgatgcgcatggattgtttctttgtttttgacatattggaccacattttgcaccatatgttttgtttttgcaaaaatcttttgaaaatcttttcaaagttcttttgcaaatagtcaaaggtaaatgaataagagtttgcaaggcattttcaagttttgaaattttctccccctgttccaaatgcctttcctttgactaaacaaaactccccctgaatgaaatcatcctcttagtgttcaagagggttttgatgattaaagttgaaaaactattttctcccccttttgaactcaataagataccaactgaaaaaatgctcttggaaaatactaagtttttgaaattggtggtggtgcggtccttttgctttggggctcaacctttctccccctttggcatgaatcgccaaaaacggaatcattagagcccatttgttgactattttctcccctttggcaaatgaaacatatgagtgaggattataccaaagacggagagtggag

SEQ ID NO: 56533 - DNA, 1256 bp, Zea Mays
ctgcagaggtggtaccctttacccacaagtcatgttacccatctaccaagggatcgcgacttcccatacacctctaccgaggaggcgaggcagggtaacactacgaggcctttacaaagttccactagcttcagaaaacccgctacagtttataggaagctccaatgcagggttcttgcctgaccgccatcgcagcaaaatcaaccaaggacctccctacactgaccactcccctactgcccttgcccctttcgggtaaggtagtcctccaccagctttcctaattaatcagccaagggcgtccataaacccttgtggtggcacgtgtttctcaagttaagctctatgttccagttaacattaatgatcttgacatgaacataaatagaataacaaaataactggaacatagctatgataaataattatcccaaatccatgtaaagcaatagcaaactacccaagtgattcagaggtaaacaagataatgagataaacaatctagggtaacctattgggtcccatcaaaattaacctatgcatgaataaatgatattaaagaacattattgggtaaaaagtggtcaagggcacaacttgcctggcacttgagattccaggtaacaggatgatcttcaggtgactcgtaacctcgcgctagtcgtagcaatacaaacaagcatggtatacgcaaaattaacatcacactaaacataagaataaactgtgtaataataatctacgcgttgctacgagactaacggaacttgaacggattaaatcggagttaaaacggaggagttatgaattttcgaagttattaagtgcttagtatagactaaatcaagtgaataacattaattcaatttttatggctaaacaaaggtactagatgatgaacaatattaaaacaaaattattgcaactggaatagattaatttgaacttcatatgaattttctaagaattaaacaatttctgcaataaattttatactagaaatctatttccataatcatttatcctctttctctatcctctggatcatgcgcactattacagaatagcacaggggcaactctataaaactcgcccagactcagccaaccatcaagtggactgcgggttaattattcaatctctagggggttcttatgaaaatgtgttcgcgacggggtatcgcagaacatcggtcgtccgatctaaacaaaggtcacgattaaatctggccgcgctcaaatcggtacgcaacccgag

SEQ ID NO: 56534 - DNA, 644 bp, Zea Mays
gattaatttgaacttcatatgaattttctaagaattaaacaatttctgcaataaattttatactagaaatctatttccataatcatttatcctctttctctatcctctggatcatgcgcactattacagaaaagcacaggggcaactctataaaactcgcccagactcagccaaccatcaagtggactgcgggttaattattcaatctctagggggttcttatgaaaatgtgttcgcgacggggtatcgcagaacatcggccgtccgatctaaaccaaaggtcacgattaaatctggtcgcgctcaaatcggtacgcaacccgagccccaggatccaagatctacgccctggatttaatgagtcgaacgggtatacgtgaatctaatctgatacgtccattccgcgatcaacggtccacggtacatccttcccatatcccatcctaaccgtcaacttccaatccaatggctgccagttttcttcctccctacgccctcctatttccttctctctctctctccatggctgaccggcgtcggtagttcttccccaccgcggtgctagtagcagcggtgagcacaaccacgcacaacccgccagcgatcaagggccctagtccgactgctgttgcgcgagacaaggg

SEQ ID NO: 56535 - DNA, 295 bp, Zea Mays
gaaagcgtgagagggagcccagctggggttcttttctttttttttcttttatgttatattttctgtttttctttttctttgagtttgaaattcaaagttcaaaattcaatttcgctctgtggtaaatcctcctcaatttaagagaatcatgttgcacataatattctttcttttttccatttttcgatttgaattcaagtttaaatttaaccttgtggctcaataattataaattatatttgtgcagttaaaagtactaacttggagatattttagatatattatttatattttt

SEQ ID NO: 56536 - DNA, 143 bp, Zea Mays
cgcgttcaaccgcgtcatggccgccggagtggacggtgcgcgtccttccgctgacggaggagaacatggagaaggtactggacgaggtgcggccgagccccgatggcggacggcagcaacacggcgctgcacgagatcgatgg

SEQ ID NO: 56537 - DNA, 687 bp, Zea Mays
accaccgacaacgtcgaggtcagctcccttctcgctcggatgcaagcctgcagattaaagacgtgctcaagaaatttgccattatgaaagaccacgggtgcggcttcgacgaattggaggcttatgagagtgattcgccgttatgaaaaaccaggggaaagcccacactctgaaatggacacgaatactccattacacggttcgaaccaggattagtgtgataccggcatcgtccccagcgccgtgagttctccatcgccgtcgagttgtcccttctctcctctcgcagacatctctctctcgcaccagagatctccctctcgcaccagagattctccccccacggacgtcagacgtcagatctgcacggacgccgggcgccgctgtctcggacccgattgaagggcgccgcccgtgagtttgtcattgttgttcttcattcattcaacttctctcccccattcatctcctccttcaaccagatctagctcgttctctgtgtgcaatggatccaccatggatgatttggagctattcaatgacacagacattgccatttctttcccctaaggtagctatttgtggtcggctatggtacgaattgtgcacatttaacctttgattttgtaaattattggttgaattgttgtcaggtcccgtaatgtcttcaccgccttgttcaagttc

SEQ ID NO: 56538 - DNA, 1641 bp, Zea Mays
ttgtattgcatgattcgcatacttgcacatctagtggaaggaagaagacgactacaccaagttgtggatgggtagcttttcacgctttaccactacttatgaagaaaccccagatgggtgccaaggaattgcaagatacacttcaaggagttcacaatgtcattattggttatgacacagtttggaaggggaaggagaaggcattataatagttgtttggcagttgggatgagggtttcaagctactattctcttggcgggagccgggaggcagtacttgctaaggcgtctgacagcattgtagagattgatgtggttttagaggatgggaagtactatttcaaccatttcttttgtgccctagggccgtgcatctcaggttttagggatggttgtacaccatacctaagtgttgacgcgaccgcacttaacggtagatggaatgggcagcttgcttcatcaactggtgtggatgggcataattggatgtatcctttagcatttgggtttttccaatctgagacagtagaaagttggatttggttcatgtcataattgaagaaggttgttggagaccttggagtactcgctatttgttcggacgctcaaaaaggcttaatgcatgtagtgacacattgtttccctcatgctgagaagagagagtgcttccgacatctaatgggcaactatgtcaaaagctactcaggttccaaacacatgtatccagctgccagggcatataggagtgaagtgtttgagcaccatgtcagctaagtaagaagtgttcctaagatagctgaatatttggatcaacatcacaaattcctttggtacaggagtggtttcgacccatctgttaaatgtgattacataacaaacaacatggttgaggtctttaacaactaggtgaaggatcacaaggacctaccagtttgtgacttagctgataagattagagagatgaccatggagttgtttcataggagaagaaggataggggaaagactccagggtttgatcttgccatctgttatggctacattgaaagctcagactagagggttgggccatttgacaattgtcaaaagtgacaattacttggcagaggtgagggatagtactaattgtttgacaaaacatgtggtgaaggcagagtcgagacaatgttcttgtcaagagtggcagcacacagggaaaccttgtcaacatggattggcagtgattattgcccaggatgtaaggaatgttggtatggagaactttgtcgatgattattattatgttgacaagtttagaaaagcttacatgcgaaggattccaccaattggtgaccgttctttttggccaaaggtggatttttcaaatgaagtggcttgttaagaaaattactccgaggaaaaaaactgaagcgtgatgcgcaaagggagtagtactaatgttgccagtcgttgttgtcccagaaaaaactgtattagggaacaatgtttgtgaactatgtttgtatgtgtatttgtggtcccagaaattctgtttgtgaacagcaagaatttctgtttgtgaactgtatcagtgtgtttgtgaacacaaactgcattctgtttgtgaaccattcccagaaaatcagtctgttttcagtttgtg

SEQ ID NO: 56539 - DNA, 514 bp, Zea Mays
gtcgcctagaaggggggtgaataggcaaatctgaaatttacaaagtttaagcacaactactagccggggttagcgttagaaatataatcgagtccgaaaaaagggcgaaaacaaatcacaagcaaataagagcggatgacacggtgatttgttttaccgaggttcggttcttgcaaacctactcaccgttgaggtgatcacaaagaccgggtctctttcaaccatttccctatctccaacggtcacttagaccgagtgagcttccttccttgatttcccgggtcacttagactccgcaaggaccaccacacaattggtgtctcttgcttcgcttacaaggctttgagagtaacaatgagagaaagaagaaagccaaccaagcaacaagagcaacaaaagaacacaagtcgatctcctcacaagtcctaaaaactagagttgaattgtggactttgattagatcggaggctttgatttgtgtcttggagtgttgtgtattgctcttgtattgaat

SEQ ID NO: 56540 - DNA, 392 bp, Zea Mays
cttaaaacaaactttccctgtcaggttcatggtttaggaacatggtggcccaggtaatgggctcggactcgtgaatgatgtgtaacatgactcatctgacgtgtcaagtagtcgggaccgaagaatataataatgatcttgctttgtttcaggtctcctttccattttccatgccaggtgttgacctgacatgcattgaacctacactcagccccgtcggagaggtgatattgctcgataaagccactggttggtgttggtttatagttgtgttatattagagatattttatctgacctttgtcgcttttgatctgacgtagtgacatgcggccatgtgggctgcggcaaagtccattgttcagaatttgaaagatgggtatttaaaagtgc

SEQ ID NO: 56541 - DNA, 387 bp, Zea Mays
ccgccactctcgctaatgctgcgtcaactcgactgcagaaccagtgccgcgactcgaggcagccctgcgcctgacccaacagtgtcaattgagtgcaacgatcatgggtcagtcagccgcggggataggcacgacgactgatatgaccagaagcgggccgacagtaattgcagcaacagacgggcggaagcagcggtccaataacctacaggctcgcaccctctcctgaaacggcaggggagccctctcccacggagtaaaagacgacgcacccgtgctccgttccttgaacggcttgcgcacacgcaacagacgccccgcgaatcgcccgtcccatcgcattaactccttggcagggcaagcgactcctccagcagcagaaacggg

SEQ ID NO: 56542 - DNA, 332 bp, Zea Mays
gtttgagaatatggatcttaacaaagatttagatgagctaaagcatggtttgcataagtttggtcaccaaatgttcaaacactaatgaggtgtctcgttatataacccttccttactcgaccctattcgggcttggtatgattaactgaccatgtggtgtgctccttcgaggggctccacaagggagtttgaggtacgatcttgaacacacatgggcgaatgtatagtcattttagaggctacatccacgccccctaaaaataaaaactagttataatgagtaaattttatcttatatgcacccccatcacgtgatgtcatgcatccatgag

SEQ ID NO: 56543 - DNA, 462 bp, Zea Mays
ctcactttagattggatcagattaaccatattagattagtccacattagatcatattgttttagatgggatctagattagactatatatgactagattagactagtttaaattagatagtgaaagtcgcctagaggggtgtgaataggcgaaacctgacatttacaaactttgaacacacacttcacccgggttagggttagaaataaataatagtggattaggagtgcggaagatagttcttcttactacgagttggtcaatcaatgcgaataactttgggagctaactgaaaacaatatgagcaagagaacttttagtgagagaggagagggaagaaacaaatagaatggtgaagatcaatcacgagtggacacggtgatttgtttcccgaggttcagttccaaagaacctactccccgttgaggaggccacaaaggccgagtctatttcaaccctttcc

SEQ ID NO: 56544 - DNA, 1084 bp, Zea Mays
actagttagtctataaggtttgtgatggtcgtcaaacactaaaatcgactataggaaatgttgaggccatttccctttcagatagatcaattaggataagatgaatctattaggataagttagaatcttttaagatgagatagatctattaagctagatatatttttaatgggagataatctaagttgtctagttatcctacaaatatattttttatgcctatatgcatatgcagatgtaattgtggatattactccacaactcatcacactcaatcaaagaaccaaatcaaacatgtatcataagaacaaacattcaagcgcggatatacttatcaaaacagtttttaggattatgtgtcctcttcctaagggtcactttaggtacatgattccaaagtgtgagatccatttggtctttagaagagataagataagagtaatcagattaaagcagcaatatacgagaaaagatttgaagaaagtttagaaagaatcagagtagtaaaggtaagtatgtaaggattgtctagttctatgtaggttatgtcctatagtcaacattcctctgataccacttatgtcacaccctgatttaagggcaaatctagacgtgaatcaaattttgttaggatcaagtctcacacatatgatgactcatggtacagaaacgaatgtcacatctttactatataacaagagttccgtataaaatagctaaataattacatcatataaagacaacgatccagcaaccatagtcgactggaagacgacggtctagacctctcataaatacatcgtgaccattttcatgctcctcatcttgcggtacctgtccttgacctgggggtgtgagtacaacaagggtaagtgaaagtcgcctagaggggaggtgaataggcgaaacctgaaatttataaactttaagcacacactaagggcggggttagtgctagaattaaatcagagtacagaagatagttctccttgctatgagttgcacaatcaatgcagataacgtttgggagcaaactcaaatctatatgagcaagggaacttttagagagaggaaagagggggaa

SEQ ID NO: 56545 - DNA, 711 bp, Zea Mays
aaaatttcggcagcatctcctttgaaagattgcataaacgaggggcaacagtgtataaacatatatcatgacaaaaaacatactaagcattgttaatatgctagcaaaggaaagttaaacataacaacatgaactgaattaaccagtgcacacgactagaaaaaaacaaacatcatttgacatcgagtttctaattaaatcatggctgcaactgggcagcgttattataatagtgaaggtggacgtgctgctacttccctcattcccaacatgaatcaaatacctgcattgagtaatgcaagagtgagatgatacatctcagcaagcaaattattttgacgagatatttaaaccacaaattgaattaaacaacattttaaaggaatcccaattgagatcagaaatacttgtagatatagaactcaataatcccaatataaccaataccatctcatttcctcgaacaaccacaataggttgtcccttccctgcgtcaacaatacctgcagatatcacttcaatgtatgcataggaatgcaatgtgtaggtcatctgccctcatacctctgagagtataaaaccacatcatctgctaatatcacttcaatgaatgcatataaatgcaatgcatatgtcctctgccttcatacctctaagggtatgaagccgcatcgtacccctcctcgggcaacgtacgatgctaagttgtac

SEQ ID NO: 56546 - DNA, 385 bp, Zea Mays
ccatccaatctaaccaaaaaaactaattgcagggcctaaaactcacccaaaacaagggaaaacattcatcaagtggataaaagagagagaggaaaggaaatccaaccaattcttggagaggaacgacgatgatgggcgacggtatgccctcatctcccctctcttctcttctttttttcttcctctcttctcttggggcaaggcacaaaaaggtgacggctgctagggatgggaggacgtggcttctagggttagggaggtataaatagaagaaaacttccacaatcctaatatccaatggctcagatcaaccggcactcaaaaagactcatccggactccaaacaaggcaaactagtgattgatcggaatcatcttgatgagat

SEQ ID NO: 56547 - DNA, 397 bp, Zea Mays
gttaatttgtgtttgcgtgctcgatgccttcatgtggtccgcataatgacgtcatgcccgcaccccaccgcacctggtgcgtcaggctcagagctcatcgaggcggaacgatcttgatccagcgcccagcggcgggtgttctgcgctgacagagaggctccgcctccggtggcggctatacgaggagttgacttgacccgcgctgtttagatctcggcgcagtcgttagaaatcgttgtcgacaaattcagctgtgatcccaacggccgcaaaaaaaaaaaaacaaaatatcatggaaaacaccgcaaaaaaactcgacaggtcgacatcaatatctggctcgttgacgcgcgggtcgacggccggccggcgggtgaggctgcgtgtggaacccggg

SEQ ID NO: 56548 - DNA, 94 bp, Zea Mays
gtggttcctagaggggtcgagtgtaaacgagttggtccgggtgtgtcaagttctgctcttcatgaactactttggtaactgctctaacatatac

SEQ ID NO: 56549 - DNA, 146 bp, Zea Mays
gttatatgtccccatacaaaaacatatcacatccatgctaataggcttaccactatccagcttgagattctgataccgttcctagctatgacttccacttgaaagacaatttaaatacacatgttctaggaccacatgaaatcaat

SEQ ID NO: 56550 - DNA, 1098 bp, Zea Mays
ctaaattctagtccctaaacatcaatctaggaagcacttaattcaggaaaaaatacagccaaactaaggagggaacaagctgtccacattttagtaatcctttcttcccaagtccatgaacttagcttatgttaacctacctcaattgatttttgtaaggcctattttgatttcacaaaacttatagtatatcgtcaattctacaaacaacagccgagttggttaggtggtctgagtaacactgctcaggtcctgggttcgacttcccgtgaaaaggaattttcaggttgtggttaaaaaaaatctcctcgtctcaggtcctgggatcgacttcccgtgaaatgaaattttcaggttgtggttaaaaaaatctcctcatctcaggtcctgggtttgacttcccgtgaaatgaaattttcaggttgtggttaaaaaaatctcctcgtctgtccgccaaagcataggtataaagcccagcctaggttactagacctaatagttagatgctaaaattagttgaaggcacccaaacaatctagctactaattcagctattagctacttttagcaaattagctaatagttagctagctaattccattagcaatgttttagtcaactacctattagctctagtgcattcaaatcagggccgtccctgtggggggtgcaagggtgcggccgcaccgggcccccaaaaatagagggccccctagccaccgtacggtagcattttttcctattaaacctatctattatagacacaaatacgtaaagagtgatgcgttattgagttatcgactagtcttgctcatattcttaaactgtctcaattacttatcgaatactccatccgtttcaaaatagtatttgttttagttcttgatttttatgtttatattgatgatgatgaatccactaaagaagcaaaacaaattctattttgatatagggagactgggagagtattataaactatacatatgatggttgctttggcagagagaagctttttaaaattaaaatatttttgtaaactattttttatcaacaataactcaagagatgttaaatggcttggtgattttatatatcgaa

SEQ ID NO: 56551 - DNA, 273 bp, Zea Mays
tgcagccgtgcagctcgttcccccccctagccacttcgcgctcctcgctgctcggccgcccatcccccttgccatggccgccctccccagctgcctgctatgctggttggaataataagccttgtcacgttattttcatagtcatcaagttaggtgcatgcattagttagttttagtgctgcacgagctccagaatttgtggacgccgtgcgtagtgtggttgtggtggagcgagtcgcgcggtcacctagagacgtagatgctttcacgatg

SEQ ID NO: 56552 - DNA, 249 bp, Zea Mays
tttatgagtagtgttgatcatgggctacagcatagccttgtaggtttcagtttatcatgcctgatgcaccagggttcttagcataaaagtgtgtaggtacttttttaagttttagcttatcatgccagggctttgtagactgttgtttcagtactttactacttcataaaatgtacagattatcatctagtattaaagctggagttggagattgcaaacaagctcttattttgctcttttagcttgtag

SEQ ID NO: 56553 - DNA, 272 bp, Zea Mays
cgacgtcctaggcatggagcagagagcaggagagagggaaggaggaaggtggcggctaggggaacaccagggggcgacgactgctaggagaggcggctaggtcagtagccagggagcggtggctctgacatgggcctaatgggctttagggtttaggtttttttctttttttcctttttttcttttctaatttctttctaatttcaaaatataattttaaataaccataaaattcataacaattaacccaaaaatatttataaataaaatag

SEQ ID NO: 56554 - DNA, 1214 bp, Zea Mays
caaacacaggcacacatagaaaacatatttcacaaacacaggcacacatagaaaacatatttcacaagaacagaagcagcagcatgcctgacgcagcaggctaccaaacgaccataagccaaaggaggtcgtttccatttcagtatgccgtcgaggacacaagatcggaggaaggttgtcacttagggcgcccgaactgcgccggatcggagcatgtgacgcgcgaccgtcgccacgcgcacctcgccttccatggacgccgttcgatcctcgcgcctcatacggcgccatcgctgctcgcacatcgtggggtgccaccgtcgttcatgggttagagtgtgccaccgccgctcgggcctaggggtgcgtcgtcattgctcgcccgcctcaggagcgctgtcgccgcttgccggcccgcctcgggactccgtggtcgccgtcgcttgcctgccccagggccctaccgtcgctctccctccggaaaggggagccgccgccaccgctcctccgaatctgggaaccgccgtcacgactccggatcgaggaaccgtcgccgcagcgcgtccagatcggggagccaccgcaacaaccgtgaaaggatcatgatgcccaagagggggtgaattagggttttctaaaaatcaacaacaattaaaccctaaacaagagcccaacatcacccaacaactagcaataagagaatactaataaaaatacaacaatactaaaatattgcttcaactacttgctaaacaaataaacaaggtaaagagcttgaattaaatgcggaatataaagcaaagtttagaagactcctccaatttttcccgaggtatcgaagagtcggcactcttccctagtcctcgttggagcacccgcgcaagggtatcactcctcattggtcctcgcaagaaccaagtgctcattatgagatgatcctttgccacttcggcgtggtggatccctcatgaccgcttacaatcacgagccgggttaccaacaaatcctctaaggtgatcaccgtgctcccaacgccaccaagccgtctaggtgacgccgatcaccaagagtaacaagccgtagactttcacttgaccaagagaagcctaatgcatgcggtgtgtgctctaggtggctctcacttacactaacaaggtcctaatgcgggattaagattttctaatcacctcactatgctttgtggtgcttgcaat

SEQ ID NO: 56555 - DNA, 283 bp, Zea Mays
gtccatatgaagtaactccaaaggtcttgatgttgtcatcacatttttggcatgatgagagcttcccacctgtttacctgcttgacaagctgcacaaggtctatctttttcgaaagttacattagttagatctatcacgtgttctccctttagaagcttgtgaaggttcttcatccccacatgtgctaaacggtgatgccacagccagcccatgctagtcttagcaactaagcatgcatctagaccgacctcctcttttgcaaaatcaactaaataaagtttg

SEQ ID NO: 56556 - DNA, 345 bp, Zea Mays
ccaactttgcatagtcaaggtaaaagaggtaggcttcttcccttgtatcaaatgtttgccgcaccctggggacaaacacatcaagtatgtttgcaacctgcagaacaacatgcaatcatgagtttgcaattagcggatacccatagttgcaatcaacaagcaataaacgatgtaactggagtaacaacacaacatgcaatggtaatcaaggagtaaaaacagagactcaagtttgcaattagaggatactcgcggcgggaggcgcgcgtacaggagggccgagggcgtgctcttatggggaggcgtgctcgggatgttattgcaccctgggtgcattcaatatag

SEQ ID NO: 56557 - DNA, 171 bp, Zea Mays
attttaatgcagcggaaataactaacagagaaaaccgagtaacatggcgaagcctggccacgctactcctcctggtcctctcctacggaagcaataaccctctcgaccatctatcccggtggcagggatgaaggccaagtcacaccagcaaccaatcatcctaaggagtac

SEQ ID NO: 56558 - DNA, 566 bp, Zea Mays
caggtactaggcttaccgatttaccatatttctcggtatgtgtttagtacgttcaaacgcttgacataggtatccgcacgttaatccttattccattttcccatctcgtagaccacgcgtccccatggacccgtgtccacagaccatcatcattctgttatcaaagtggatacaaccaattcctgacctggcgcgagtgctagaaaaatcactcgtcttctaccgagatccctaattagcaaagcagctactcgacctagcatactagtatccatctctaaaggaattcctgagttcatgcaactagggtttcagtcaactcctacacttaagtgcacagtacaaacctacaaacattaagtgtagtaaaatagcatatataaacggttatgcataaaaccggggcttgcctttaatttaacgcttaggtagtgtttgctgggggggtactcgcttggcgagcatcaactgggtaagtccatcagtcttcaggtcgtccaccaactgcatcttgtggttggcaccacatcactggctcgatcatcatctctcggtcctatatgagg

SEQ ID NO: 56559 - DNA, 1125 bp, Zea Mays
caccaatacaccacatcgaccaaaacgtatttagacaaactacaaatcgcacacatcaaacaacttcttgttctccaaccgcaaaagcgaacctactaatgcgcataaccgaaacattttacacacatccattcaaaataattaatcgagtcgatcgagagcgacatgcatcggctcaccataaacaaacccaaacggtgtttgcaagaatgacggtgattccgatttgtgcatcgctccaacatccgacgagcgttgaatgattggccttcttctcgcaaaacgcagggttcctctcctccacaaaacaaaaaccaaacagcacatacacaataattataggaaaataacccgatgcggaatcgaacataaatcgtcgtggtctcaccgggggtgaatgacgacgacaagggggctgcgcaaaaacagcaacccacagtgagcgttggcggcgtgctgtccactgggcttcacgaaacagcgagccggcagcgcgcgggttgctgcgcattttgccgaacagccggcgggcaccacgacgaacagcgaggaagggggctcgctgctggttttccatggaagaaaatggggggcgctggatagagagagctaggcgcagggaacaacaaggggcatccatggagggggcagatccggccatggcatgctcctgctcgcagctctgcgcagaaacgcgaccacggggaagaagatcagaggagccgagctgctattttctgggcgccatggggagggggaagagatccctgctgctggcgccattggggaagcttgcctgggcgcctgccatgggggagcttgctgctgcgccaggaaaaaggagtccacgccatggctgctggcggccaagagagcacagcgagatgggaaaaaaagagagcagcggcgtcgcgccatgggcaggaaagctgctcgccatgggagggaaaagctcctgctcgccatggacagaaaaagggagggaggaagggcgctggagaacagggaagagcgccatggctgttgggggcgccatgggagcttggagctcggctccctgcgtgctggctgctgcgctgtgaagaagaagaggcagggaagctgtggcggctggaaatttttgag

SEQ ID NO: 56560 - DNA, 305 bp, Zea Mays
tgaaaggcagtggttcaaattgattgacgaagtactagtttatctgggttcttttttttttttttttgctgctagttgtttatctcgagcatcgacaagtggcctagaaaacttaggactacatggtggtttgctatacaattggcgatggttagactagtcttgatggaggaattagtgtgtttggtcgataggcagcattattagaggacaggttaagcttattttaactggtgtttaattcagaggttgctggcaaaagtctatctctaaaagagtatattctctgagcgaacggattcatg

SEQ ID NO: 56561 - DNA, 272 bp, Zea Mays
gtttttatatgattgtgcattaaataaaataataaggataataatagtaaggtaatatttactagaagttggattaaaatcataaatagaaaactagggttgaaaataagaaaagaaaaagaaagtatataaaatataaataaaatgtttcccaaagtagtatttttaaagtcacaatataattcgaggataaattctgcacaaagtttgaatttaaaatttgaattcaaattgatgttgggaatagagaaaagaaaaatagaaaaaaaaag

SEQ ID NO: 56562 - DNA, 426 bp, Zea Mays
aagatgcagaggatgacagctgtaaaataactcttgggaactttcattcagaagttatatcattgtgaaacgaagctcttgataaggataggatattactttccttagtggagaagcttaaatctagcgaggctagtcttgttgcacaagctgaagctcataaagccgaagtggaggagctgaaaaagaaggttgctgaagcagccaaaaattttgaagttgaagcatgagatttgcgagatcgaaaggtctagagcacaaaagaactcagatgagctttgtgcttcaaaagaggaatgttatgaaatatccttggaatgcgccaagaaattgaaggacaactttaatttgctagggttgatgcatactcttctgagcaaaaattcatctatggcgaccctgatggagttgtctagtggattagcg

SEQ ID NO: 56563 - DNA, 421 bp, Zea Mays
atttattttatcaacttcttttctatggagcccaatctatttaaataatagacttttgactaaaataaattattctttaaatttgggtattttttagaaaatattaagtttgaatttatttttgaaatatttgaatatattatatatattcgattaaaataaaaaaacacaactcacacgcacacatctaaattgaaaaaaagaaagaaaaacaaaaaaataaaatcaaaacaaaaaaaaactcacggccgctcggtctagaaacctggccgactcccacctctcccttctctatgccatgtaggcctcacatgtcagcacatattaatgttctccctcacggctctttctctcccatcgtgctgcacgaacagaagccagccgccgccgatcggatgcccgatttcgccgcttggtctgc

SEQ ID NO: 56564 - DNA, 210 bp, Zea Mays
gcatgtcttcgactatctcgggcgttcgatgagggttgagcgaagctgcccgaagctatgaggagaaaagcttcgtctgtgcgcaatcgacaacgaaaacagccgaagtcaacaacttcggacacaacctaaaggggaagctgctatacaatgatggccgaagtgtgcataaccgaaggatagagaaaatacactatttccctaataccg

SEQ ID NO: 56565 - DNA, 668 bp, Zea Mays
cttgagatccttcccgcatgcaacgtcgtacaggacggatacaaagtgagccagtttgcaatgggtggtggtctgtgcagcttctctgaacgcttgttcagaaacgatcacctccgggatctgtggaggcggcgtgcagcagaacacgagaggttaacggagacttctcaagttctcaactgaatagctatagaagcttggacgccatggcaacgcaacctgtcgaagagaggcgcgggcgcgcggcgttcgaccagatgaagaacagaagcatcccaagcagcgcatgcaatgtggcaaaggagcgttactgcacgttgtattcagaaccagaccagcgttgcccccgcgaggatccccgctgacaagttcctgttcctccatagcaggacgtccgaaactgaagacccaaacgagttcagagacaatagccgattcaggcaggccgcaggcaccagtgcattgcctggctgagagcctgagacacgcgagttttcaggaggcggggaaaaaaacactactctgctaatagcaaagcattgcacctttccggtccccgaggagcagcttatgtactctgctactagctttgtcgatcgtcggcccatcgtcgtcgccggaagaatctgtctcatcaacatgaggaagcttggctttagacatctgag

SEQ ID NO: 56566 - DNA, 1229 bp, Zea Mays
cggaggtggaaggattccctcaccctctacggagttgcgcgcttcgcatggggatccacaagaagccggagtatgtctggaaggaataccatgagaacggaattgagaaatgttctatggcagtctacctgggagaaagccgaaactacccaaatcaccctcccttccaagtcaccgccacttggcaccgctttctagacacttgccaaaatgcttcccaaagagccctctgccagctatgccaaaactacagtagggaagtctctgagacaccccttcgctacttcccacccagcaataaaaacacccctacctagaggaaaagacttcaggccttgtcagggagagatcctaatgaagatgaccccaccatagtctacatggccagatatctccacacccttgacaaccactatgacgaccttttctcccactgcacccacctaaattctcgtgtggaaagcctagagcaacaaatcaaggaattaaaagaagaaaaggcgtccctccaagaaagtcttaatggcggaaggcgaagaggccaacactcgcaaggcctaccgaaccctgaagatggattacgcgaagaagttaaagaagctcgcccccgctaagaaaatccataagcggacaaagagctgaggatgccagactgatcgaaaagaggaagcctcgccaccctgcctccctctaggatagaaagcttgtcagacattgaagagatgtccctagttagccttgatgatcttctcaaggaatttggggacaccttagaaagggagtttggaagcaccttagaaatcgctcgtgcgtagcgtgatctgtgacaattgcatgcttgtaatgaacttgagtgatgaataaaataatgtgtttgaaaaaaatatggcatatgcatagtagtaatcctttctccccctggcagatggcttcatataaaaccacgcctaccacatcagggattggagcaaggtctcccctaggtgctgaaggagaattcggtggagaagggagtgatacccacctccccgcaccttcggagctgccattagacttagcccaagttctggtcaaccaaacccgactcattgaggtcctcaccagaagccttgagaaccagcgcccaaatggtggaagacctcaggacagaatgggagattttctaaggctcaagcctcccacgttcgtcagatccagcaatccactcgacgctgatgactagctgcgca

SEQ ID NO: 56567 - DNA, 1120 bp, Zea Mays
ttttgtggaaaagcatggcattcccactgcacatctagaaattcccttagtcacccaaaccccagggtcagaccttctatgccacctcaaatgctcccaagtcaggattcttttaagtggggtagtgttcttggcagacttagccgtactgcaatcccacagaattgacgtgatcttagggatggactggttaaccaagcataatgtcatcataagctgcgtaaataagaccatccttctcactgaccaccaaggaaagtcaatttcatgttaggctcagccacccacccaagatccaatggtgtctaatctagcagcagaaagcatatatgtagtagaagaattcatggatgtattcccaaaagaatttccaggaatgtcgccagaaagagaagtggagttctacattgatctaattctcggcaccgcaccaatcgcaaaaagaccataccgcatggctcccaccgaagtggcagaactaaaactccagaccacaaaacttcaacagaaagggtacattcgtcccagctcatctccttggggagcaccagtcctgttcgtcaccaagaaggatggaagtatgaggatgtgcattgactatcgatccttgaatgaagttacaatcaaaaacaagtatccactacctcggattgatgacctctttgaccagcttcaaggggccaaatatttctccaagatagatctaaggtcaggatatcaccagctgagaatcaaggaagcagacgtttagaagacgacatttgtcacccggtacggacaatatgagttcatagtaatgccctttggactaaccaacgcacccgcctttttcatgaatcttatgaataaggtattcatggaagagttggataagtttattgtagtcttcattgacgacatctttatctactccaaaagtcgcaaggatcatgagcaccacctccagattgtcctcggaagactcagagcacatcaactctatgctaaactcagcaaatatgaattctggttagagaagatagccttcctcggacatatcttaactgcagagggaatataagtggacccatccaaagtagaagcagccatccaatgttagtgaagttcaacgatttttggg

SEQ ID NO: 56568 - DNA, 685 bp, Zea Mays
agaaagtcatcacctatgcatcacacctactcaagccgcatgagcagaattatccaacacatgatttggaattggcagccatagtgcatgccctaaagatatggaggcattacttgattggaaacaaatgtcatatcttcacagatcccaagagcctaaagtacattttcactcagccagacctcaatctccgccagcgaagatggctggaattgattaaggattatgacattgagatccactaccaccctgggaaggccaacatggtagcagacgccctcagccgaaaaccttttggggagaaagcaaccaacttcttggaagactggaagagagaatcagctcaattgaatgcttgtttaggagatagtggcaacatagaagttaaattgatgctagaagatctcatatgcaaggctcagtgcttggacactgagacggcaagtctcatggagagagctcgcaaagaacaactctcggacctcaagacagatgaagaaggaaccctttggttcagggaccgtttgtgtataccaaagggagaggcacgaggaatcctgctcgatgaagctcacaactcagcctactctatccacccagggaccaccaagatgtacctagacctcaagaccagatactagtggagagggatgagaaaggagatagctcagtatgtggcctggtg

SEQ ID NO: 56569 - DNA, 617 bp, Zea Mays
ctcagattcgaggaaggagacttcgtctacctcaaggtctccacgatgcatggggtcaaaagatttcaagtgaaagggaagctagctccacgatttgtgggcccctaccctatcattggcagaatagggcccacagcttaccgccttcaattgccagaattcatgtcagatgtccacaatgcgtttcatgtatctcagctccacaaatgcttgaaagtaccagagagtcacctcatagaagaaacagtccagattcagaaggatctgtagtaccgagaaaagccagtgaagattctcgattcagccatccaaaagacccaaaactcagaagtgaagctctgtaaagtttagtggaacagagaaggagaagaggaggctacctgggagagtgaggactctttgaggagggaatacccttaccttttctcgaacccagtctgaatctcgagggcgagattcttttaagtgggtaggtttgtaacatcccaaattttgatcccaaggttaggaaccctaaactcgtaaacccccctttttttaattatctcataagaccccaacccatgaaacattcccttcatcatatgcatacaccatgattgctagtagcacttcac

SEQ ID NO: 56570 - DNA, 733 bp, Zea Mays
gtggcatttccagaaacccgaagctgagtagtttaaagttgatctccctggtgcaccggacactgtccggtggcacaccggaccgtccggtgcgccagaccagggcagcctttggttggttttgctcctttttatttgaaccctttcttggactttttattggtttgtgttgaacctttggcacctgtagaacttataatctagagcaaactagttagtccaattgtttgtgttgggcaattcaaccaccaaaatcatttaggaaaatgtttgaccctatttccctttcaatctcccccttttggtcattgatgccaacacaaaccaaagcaaatataaaagtgcagaattgaactagtttgcataaggtaagtgcaaaggttgcttggagtgaaactaataattatttctactagatatgcatggattattttcttatttaaaattttcggccacgcttgcaccagtagttttgtttttgcaaatcttttggaaattcttttcaaaatccttttgcaaatagtcaaaggtatatgaatgagatttaaggaagcattttcaagatttgaaattttctccccctatttcaaatgcttttcctttgactaaacaaaactccccctcaatgaaattctcctctttgtgttcaagagggttttaccaattgagatagaattttcaaagataccaattgaaaaacaattaaaacttaaacttatttcgaaaatttttg

SEQ ID NO: 56571 - DNA, 646 bp, Zea Mays
gaaacattggcctttttaccggtgaggagttcataggatgtcttcttgaggattcggtgaagatatagccggttgatggagtagcaggcggtgttaatcgcctcagcccaaaaccggtctgctgtcttgtactcatcaagcatggtccttgccatgtcaagtagagttctattcttcctctccactacaccattttgctgtggcgtgtagggagaagagagctcatgcttgatgccctcgtcctcaagaaagccttcaatttgagagttcttgaactccattctattgttgcttctaatctttttggtacttaagccgaactcattttgagcccgtctcaagaatccctttaaggtctcttggatttgagatttatcctgcaaaaagaatacccaagtgaagcgagaataatcatccacaattacaagacaatacttacacccgccgatgcttatgtaagcgatcgggccgaataaatccatgtggagtagctcaagcggcctgtcggtcgtcatgatgttcttatgtggatgatgggcaccaatttgctttcctgcttgacatgcgctacaaaccctgtctttctcaaaatgaacattgtttagtcccaaaatgtgctctccctttagaagcttgtgaagattct

SEQ ID NO: 56572 - DNA, 599 bp, Zea Mays
agcaaattgtaatctaaagaatatacaagaaaaacattggaaatagaatggtcaggtgatatagcaattttacccaatcctttgaccaaaccttgattttcatccccgaatgtgatagctctttggggatcttggtttttctcataggaggagaacatccttttctccccagtcatgtggtttgtgcactcgctatcaatgatccaacttgagccctcggatgcataaacctacaaaacaagtttaggccttgttcttaggtacccaaatggtcttgggtcctttggcattagaaacaagcaccttgggtacccaaacacaagtctttgaccccttgtgtttgcccccaacatatttggcaactaccttgcctgatttgttagtgagcacatatgaagcatcaaaagtcttaaatgaaacattaggttcatttgatgcaataggagatttctttttaggcattttaacatgggtagaatgcctagaactagatgcctcactcttatacataaaagcatgatgagagccagagtgagacttcctagaataaattctcctaattttgtgttcgggataaccagcaggacataaaatgtaac

SEQ ID NO: 56573 - DNA, 1062 bp, Zea Mays
cttgtttaccactgaacttttgggtagtacctgctattgtttatgtggttttaggtgttaagatacacattattcatgatcatgcttgtattgcaaatgtgttatttactgttcataaacaagatcattatgttaattggaacatggggcgaccacctgggaaaacagtgctaccacaagggtggtatgggacgcccttggctaactaattagaaaagctagtagaggactaccttacccaaaagggcaagggcggtaggggagttgtcggtatagggaggttctcaggttgattttgctgagatgacttttcagacgaggatccctatactgcgctcctcagaaaccgtagcgggttttctgaaactagtggaactttggaaagacctcgtagtgttaccctgctacgcttacttggtagaggtgtatggggcccgtacaaccccgtgacagatgggtaacatgacttatgggtaaagatgcgtaacctatgcagagtgtaaaactggtatatcagtcgtgctcacggtcatgagcggctgggaccctcacatgagtaacttatggaattaaatttaattggtcctttcacatcgcattgtggtttatttattaattatgatctttcattatttgggttggtatttacttatacttagtaactgctaataaaatttgaccaacttattaaaagcacttctcagctttaaccattatttattgatcagccttacactttatatgaactcccacctttggtaagttcatgcacattatttcccacaacttgttgagctatgatcttttgtgagctcacccttgcgatatataagcccccaggagaagaacaggtagctcaggaggaggactactacgaggagtacgagaaaatctaggtgacgtctcccagttagcttgatggcgccaaggaataaatattaattcgctttattgttatcatttatttttgtaaaacacttccactatgtaataatgtttgtgacatttatttctatacacttgatcattatatatgttgttcttctttggtgtaaatatgag

SEQ ID NO: 56574 - DNA, 378 bp, Zea Mays
ccggactgtccggtgcgccatcgaacagacagcctctccaacggctacaaaattggatggtggctataaataccaccccaaccggccacttcaaggagtgggagtccaagcaacattccaagtcatctagtgacatactcaagccctcccaaccacatatattcattgatccatcctatacacaagatctagaccactacaaccaacacaagtgccacaaaagagagagcaagcaatcgagagctactcaattgagtttagccctagcgccttgtgagattcattgagagatagtgtgtgctacatctttgtgttcatttgtgcgtggagtattgactcccatcgaacttcctccaaagttttggaggcttgtaaaag

SEQ ID NO: 56575 - DNA, 320 bp, Zea Mays
attagaacaaattttagacaagagtatcttccctcctagttataacaaaaaaattatctccgaggaggatcaaagatgttttcgcttaaactacctagcttttgacatcttaactaattctcttagtaaagaagattatcgtgccttcatatcaaattatgacgaatcaatccatgatgcgcatgatatttggactagaatcagaagcaaatttgatgagtcctattatgatagttcattttgtgcttctacttctttcgatatttgtgatactaacccttgcaaggaagaagaagaaaatgaacgatggagaccaaacg

SEQ ID NO: 56576 - DNA, 306 bp, Zea Mays
tggaaatgggccgaaaaggaggtttccagtccagcagggtttttcttttttttttattttattttctattttaatttcagatttccaaattcaattattcaaactcaaatttttactcttgtcttaatttttagatttgccaaatgtatcaattgaaatacaaatgtgaatataaaccacctcattttaaatattactatgttattctccttctcatatttgtttctaacaatagttgatttaattacaaattaattttttttctcatttccccaatgtactataataactatttttgtttgtttt

SEQ ID NO: 56577 - DNA, 333 bp, Zea Mays
gtgagaacaggtggagggcgtgggagcacgatattcgtgtgaatagtccgccaaatttcggcccctcgatttatgggagcgtggtttctttttgctgtttttttttttattttttgttagttaagtttagagtccttatacgattgcgatcagataaggatctgagcacatatcggatcacaatcggatcgcgagtctatcagctcgtgaacgtggcccctatataatgcgctgactgctatcgccagaaaccgtcctaaaacacgagcctaatgtgccacacaggggactaattcacccgttttggtccaacagctctcaggttcagtcttt

SEQ ID NO: 56578 - DNA, 628 bp, Zea Mays
gaaaactccttccttctctcgttgagaagaaaaccccatggccggcaacagcgacaagaaatggaagcgggagccaactctcaccctgactcattcaatgaacctgaatagtagggaggagttcttcgatagcgagggggctctccccgcctatggtcctctcaccctcctctccaagtgacttcgagggcctgactccaatcgagcatgccttccttagggttgtcgagtgcattggtctcaccgactctaaggaggaggatgaggaggacgaggaggaggacgacaaggacgaggagggcaatggcaacgacactggaagtggtagcaatgaaggaagcggcggcaaaggcagcgacatcaaaggcgataaccgtggcgaaggacaacttccacagtatatgattcttactctgattttttttaggaatccacagtagatgattatggccataatgtttacatgtcaaagctggagccataggataacttccagcttgtttcagctatcccatgtataacatccgtaaacaaatatggtttaggctcgttgatttgttcttggcaatacggttctgctaagatcaaaaacagatttaacatttcatgacaacactgatatgtcaat

SEQ ID NO: 56579 - DNA, 59 bp, Zea Mays
cgtaaacaacccaccataggtagctgactggggaggtcgctagcctaatcctcgaactc

SEQ ID NO: 56580 - DNA, 123 bp, Zea Mays
aggactaatcacatgacgagggattacaggaaaggattttggagggcttggagcaggcctggtacaccacacatgggagatggccgctcgggtatgctggatgagcagggaggcatgctcgcc

SEQ ID NO: 56581 - DNA, 284 bp, Zea Mays
ccattgaaatgctgctaccgtttcttcttgaacaccattaatagcagccgcccacgcccgcctcttctccttccccactagccgtgccatcaagcagccccactcagctattaatggccgtcgaatcctgtcctctcgccatcgacgtctgtttcttctccaagttataaatagcagtgccggcgccctgtgaaaccagttcctcacctaccctcgctaccaagcgtagctcagtcgaccagagttcctcctgctgttgcgctctccttgctcgtcgaacgccg

SEQ ID NO: 56582 - DNA, 508 bp, Zea Mays
ccctctttcttattcctatccttgtatcgtatttcaaaaaaaatgtgataaactattttccttaagaaagattcctttttagttaaatgagtaacattgagttgtgttgtgctggtttgcttgagttcctattagttgtctttgtgcccgtgcttgatttgcttctgtgtaatgattgttggtgtattgtgtgactttagtccacaatggcatcagtttgctaggtaaaaccttagtcgggttttctttgctctatgtactctatctttgctcaatcatttcccctctttccttcccatacccaaacaggagaatcaaactaagctcaactgtttaagatacatacacccaatcagtcatcacatgttgatagtcaaacaaaatttactcgcaaagaactcaaagcaagaggtgcttgctactactacaaggatgaaggacattattcgttaatgccccaagaagcgtctagaccaactaaagaagaagacggtgaagcaagacccaa

SEQ ID NO: 56583 - DNA, 1717 bp, Zea Mays
agcacctccaaatctcgggttcgattcccctcggggagaattttcgggcttggttaaaaaactcccctcgttgtgcctcacccgctctcaagttacgatgttctgtgcaccacccttcggttgggccgttgcaaagtgtacagttgatgccaaccagttagtgatgggggccagggttcaagggttttctcggctgtggccaatgcttcgatctcttcttaatattataccgtgaggacgttcattcgctccctggccgagtttttttataagaggatgattcaacaatttctgtagcagaacgtgtaaaaccatagtgatctggaggttcaatgttgccacagtcacgaagacaatatccctgattaaaaacaacaggagactcatgattgtcagtacaagtatctgcaacaggttctacatcaggactagcgtggggatagagcaggaacgatgactgtaggtttgggtgacaggtggtttagaggattaagatggagatgatgtggaagtggaaggaggcgtaatgggaataagagcatctggtttggttataggagaagattgtcacacagatgaaggatcttggatgggaggaagacataggaagcatgaggagtgggtggacgagttgtggaagaagggtcgtttttcattaaaactcacatcttgtgaattatgaatgcgacaagatgggttataacacttttttctcgaacgcgcaggaggactacacgtcattatattaagagaggaaaaaggtccaagaggaccaaaatacaatgcccatagggcaatccgaaacacttgaccacagtctagaccctactaataatagcaggaacaccaaaacttgctagctgcttagccccagccctatcccagtaacttaactcatatgggtcataacactgataaccttttatatttaggactgtagccaagtaaaacgcactcaacagattgagtagtcaatttagtcaattcgcggggcactaacaagacaacatgtgcattcaaaaactcgaagatgatcatatcatggagaagtcccaaaagaacttcaccaggtgttttgccagagagttttgatgacaattgtctattgatgagatagaccgccgtagaagcagcttcactcctaaaatgtgaaggaacaacagatgatatcaaaagagttcatgtagtctctatgacatgacgatgtttgcgttcagcaacgtcgttttgtgcataagcacgaggataagaaagttgagcaagcatacccttcgaggtcaataaatggcgaaaattatcagataaaaattcgtcacaaagtcaacgcaaaaaaattaataggagtagaaaatagggtgtgaaccatggaagcactcgcttagcaggaccgtctcgcacacgatgggatgggaggcacggatgaaaatcttgatgagggcgaccgcgggtttgaacacggaggaccggatgtcagcgaaggacgtgcgcgcgacgcggagaagcgaacacttgtgcgtgaagacagtcgtgaccgcggcgagaaatcaggccgcaacaacgaccatgaaattttgctggaattaggtgatcctaatactaacctgctctgttaccatgttactaacgttaggattgatgaatgataatctgtccgtagggactgtagtatatataaaggccaataggccttagtaataggataggcctaatgggctta

SEQ ID NO: 56584 - DNA, 3497 bp, Zea Mays
gtgaactctaacatggtatcaaagccagtggtctcgagttcgaatcctggcagaggctttagttccacgtctacgcttttctctctggctgcacgtgagaggtgttgaagtgtataagtggattgtctaccttctaatagcttaagcttttgggttgaactggttagtgcgtccaccctaacacactacatacttctctttcatggaaacacaaccaacctctctaccataaacaactcaatctacactattgttcgataggtagttaggttgatgcggactccctgctttcgatggaggctcagtaggaggttgtggacaagaacgcaggaaataggagtgggaagggggaggaggattcctggtggcgttctggacgctggagagttcctccagtgcgccccaggtaacctcctaagactaggagatttatttcttcttttgataatccctagtacaagctacccttggtctcttatagactgagcccaggttaatatagaaacaaatcatatcactctcaacttgctagaaaacagactgactaaatatagaaacttatctgctgtctcttttattccttatatgctgactgactaaatatagaaacttatctgttgtctcttttattccttatctgatgtttcctttattcctggcgattccttctctggtatacctttcctacaaatgcatcggtatcatttcccccctcccccaaaaacaggtcgtccgcgacctggacaccaggaaaacggcgacgaaagtcctccagctgaacccaagttgcatcagctgctgattgtcccagccattgcacgagcagtcccacacgcctcagttcttgcgtgccttagtaaccttctcaggctgaggtaggactctgccatgtaatattgggggtagaggaactattgcagccgggggagccccagtatatttctttagtaaagagacatgaaacacattatggatgcgggcgtgagatggcagggcaagcctgtaagatactgtcccaatttcctccagaacctgatagggaccatagaagcgaggcccaagcttagagtaggcggctggtgtgattcctaaagttgtacgctgttgcagtcgaacccacacccaatccccggtagtgaactgcacttcccttcgagacttatcctggaattgtttcattgtgagctgagcctgtatgaggcgttccttgatctgagctaaaaattcatcccgatcttgtaactgagtgtcaatagcagctacaggggaaagtcccggttggtaagagataatagctggagggtctcgtccatacacaactcgaaatggtgaacaacgaagggctgtttgaaatgaagtgttataacagtactccgcctaggacaaccactgtaaccatgtgtggggtcgatccccagctaagcatcgcaagtacatcaagatgatccggttagtaacttcagattggccatcagactgtgggtggaacgctgaactcatctgcaacttgacccctgtcctggtgaacagctcagtccaaaatgtactagtgaaaactggatcacgatcactgacgatggagcaaggaataccatggtgacgagcaatatgatcaaagaaagccttagctaccgaagatgctgtatagggatggctgagaggcacgaaatgagcatactttgagaagcggtccaccacggtaagaataactgatttgcctccaacctttggaaacccctccacgaaatccatggctatatcgctccaaacccctgaaggaaccggaagtggttgtaacaaacctgccggatgaaggtgttcggacttattacgttgacagactgaacagcccttgacaaaatctcttatgcggctggcagcaaggggactatggaaggaagccctccagcggttgagggacttttcgatgccctcgtggccttcttcatgaactgaagctaacaacaggggccacatggatgaggcatctggcacaaaaaattttcccttgaacagtaagagaccatcaacctcggaccacccttccttcgcagttccagccaccaactgttgcctgagcgccaccgcgatcccatctcagcccgtagagtgtcaaacagagcaaatgtgggggtggaaatactgtgtaggttctgcaggacttcatctctgcgagacaacgcatcagcagctccattgagtttgcctggcttgtactcaactgtcatgtcatacccaaataatttgctgacccatgtatgttgagggatggtggataacgttggtctaggatgaatttcaagctgtagtgatcagtctgaactgtgaacggtcgccccagagatatggacgccaatacctgacagctttaaccaagccaatcaattcccgttcatatgctggcagcttttgatgatgaggggctactggcctactgaagaaagctatggcgccctcaccttgatgtaagacagccccaaacccaactccagaagcatcactatcaacaataaagtgacgagtgaagtctggcatctgcacaaatggtgttgtgatgagggtttgtttgagcaatgtaaaagcctcggctgcttccggtgtccaatggaaagactcccttttcaataaggcggtgagaggtgctgctattgttccatatccagcaataaacttctgataatatccggttagtcccaaaaatcctctgagagctcgcaaactattaggaagtggccaggtttccacagcagaaactttgtcgggatccatggcgacccctgttgcagatatgatatgtccgaaataggctactgtagcagccccgaacaagcatttggagcgtttcagggctagttgatggtcacggagggtctgtagaaccaacttgacatgctgcagatgggctgtccagctattactgtaaatgaggatatcatcaaaaaataccagcacgaactttctgataaatggtttcaatatgtcattcatcaagctctgaaatgtagatggggcgttagtgagcccaaagggcatgacaaggaactcaaaatggccacgatgggtgcggaacgctgttttttccacatctgctgggtacatgcgtacttgatggtagccacttcttaaatctaacttggtaaagaatacagcaccacggagttcatccaataattcatcgaccactgggattggaaatttgtcctttactgttttgtcattaagggcgcgataatccacacaaaacctccaggaaccatcaaactttttcacaagaagcactggggatgaaaaagcggaggtgcattctctaatgataccttgctgtaacatagcgtcacactgctgctctatttcatccttcaacaattgagggtaccgatatggtcgtactgccacaggtggagtaccgggcagtaatctgatcttgtggtcatggcggcgagatggagggaggccgtgaggttccctgaaaatatcctcaaaggaatggagcaaag

SEQ ID NO: 56585 - DNA, 1110 bp, Zea Mays
atttaataggcgtactcacgccacgggctgcagggcgcgccgtggagtgtgtgcttacagccagctccatgcgacgctcatatgctcgagcaaggttgattgctgactgcaaattagttggcccttggagttcgacgtctgtcctcaatggctcacccaagccagcggtgaagaggttggtctgttgacgctgtgaaagattgtcacaacggcaagcaacaaggaaaattgacgtgtataatcatccactgttccagtgcgatagagatccttgaggtcagcgaggccattcatgcgcagtggggggccgaacctaagattgatcaattcggagaaacggccccaggtaatgtcgccgtagtcgcgctcgatggtgtagtaccattcagcggcaactccgtcgaggtgcagggacgccatccagacccgttcctcgcgcagtgtcctcatgccgcggaagtagatatcacattttgtcagccacgccagggggtccgattcaccgtcataggacggaaaattgggcctgggccaatgtgagctgtcctcccgacggaaggggccatccccgccgccgccgccgcgcagcccctccttgaagcggccgccgtcgttgggggattttggaacccctgaagatgcttcctccgtgggtggaatttccacgcgggcaaggcgacgatcatgagattcgaggcgtgtgttgatggtggtgatttgggctagcatttgggtttggtgatcaaggatttggcgtagggagtcagcgagtccacgcccatcaggattctgtccagtgccggacttttgggtttggtgatcaaggatttggcgtagggagtcaagcgagtccacgcccatcaggattctgtccagtgccggactcggaagtcatggcgctggctgtctctgataccaaatgatgcggactccctgctttcgatggaggctcagtaggaggttgtggacaagaacgcaggaaataggagtgggaagggggaggaggattcctggtggcgttctggacgctggagagttcctccagtgcgccccaggtaacctcctaagactaggagatttatttcttcttttgataatccctagtacaag

SEQ ID NO: 56586 - DNA, 749 bp, Zea Mays
aggaaggaaatcgggcaccggacactgtccggtgtgcaccggactgtccggtgcaccagacgatagaaggcaagaatgaccttccagatttgctctcaacggctcctagctgccttggggctataaaagggacccctaggcgcatggaggaggacaccaagcaaccttagagcattcttgatcatccacactcagtctttgcgcatttgtctgtcattctcattgatttgagctctgttctagtgagaactttgagatagtcttttgagctcgattcttggccgtgtgtgtgcacattttgctgtggatttgtgtgtgttgcttccctcccttactccgtgtttctttgtgaacttcaagtgtaagggcgagagactccaagttgtggagattcctcgcaaacgggattgagaaaaagcaagcaaaacaccgtggtattcaagtgggtctttggaccacttgagaggggttgattgcaaccctcgtcagttgggacgccacaacgtggagtaggcaagcgttggtcttggccgaaccacgggataaccaccgtgccatctctgtgattgatttattgtggttattgtgttttgactcctctctagccacttggcaattattgtgctaacaattaaccaagttttgtggcttaagttttcaagtttcacaggatcacctattcacctcccctctaggtgctctcaggcgccaagtcacggtgatggagcctttgccgagtgtcatctctg

SEQ ID NO: 56587 - DNA, 358 bp, Zea Mays
gacaaggctccctatttttcaagtgcctattagactagcgccgggcaaataatgctccagtgatctcctttaccagtccctttgccgagtgctccgctaggaactctactggactatccggactccattgaaattttatgatttcatgtgaatgatggctaggtttctacatatagtgcgtgaaactctgtcaaatttttatcacacttctacatataatatcatgatatgtcaacaagttttatgattttctgattttgtttgtgttttatataattttaaaacaactaaatcgcaagttcacgtttatgtttcgtgagcatgttgttctaaaattccggtctgcttatgaaataag

SEQ ID NO: 56588 - DNA, 407 bp, Zea Mays
agttcaaatatgaattatctgaaaaaaattcaattaaacaaactaaatctaatagttatagcaaacactatgataataattgaacatgtaggtatatatactatagaaaatatcataaaaagttcggtgaaaaaagaaaaaaacaacaaatattctttgcagtgtcaaagaaaaacactcggcaaagtattcgtttctatgccgaatgttatatgccgaatgttctgtctttggcaaacaaggtatgtaccacttggcaaataaggtctgtgccgtggagagtcttagttcgtcgagagtggcactcgataaagttcgataaattatactcagcaaagcgtcgagcatttggcaaagaactcaattccggtaatagtgctgatcgagctccggatcatggagtctcg

SEQ ID NO: 56589 - DNA, 699 bp, Zea Mays
ccaactttggctcttttgagccaaacttctccacctccttttggctttccttggtagctttcctacaacttagacaagcatagttagcacttaatccaattgactaagtgtaggaaatataccttttcttctcgttttcaccatgatttgcaatatggcttgtttcaagtccaaaatgcacttttcatgcagaaatgagttagtaaccaaaacaaagtgctaaaaatatagagtagggtatgtgcaacatattcaaacacttaaacctcatgtttttgttgatttgcccaaagttgcacttttggccctccattttagctcatttggacttaatctcttcaacttgccttttaagggcatgtacacatgcacatatcaaagtagttagtctaatgtggtatgttgagcacttaatcaccaaaacagatagaaatggccctatggcacttttgtgattaatatgtgaattaaactttaactttgatgtgctgactttcctgcaattatttgtcaaatctgtggaatccaaaattggtataaaagcatgaagaatgaacctgaacttcttcattcttagttgtccaaataaaaaagctttcatgttaagctgaagttctctagtttttcctgaccccaaatggatttccttggtagactccttgataaactagcatactggaatcggtatgcagagtacaa

SEQ ID NO: 56590 - DNA, 215 bp, Zea Mays
atggcgcttcacaaggaggccaccggcgcgtggcagcgaggccgccaacgtgcctggagagagagatcagggcagcgcgtgataggatgggaggacgccggagtgtgtggagagggggagttaggggcggcgctggatatagctacaggctggcggagcgtttggagaggggagtcggtggcggcgcgcgccacgagagggaggacgacgccaac

SEQ ID NO: 56591 - DNA, 558 bp, Zea Mays
cttgcccgcataaatgtgtttgacatgatctgggaagagatccttcgtggttcctggtctcctctcaaggggtgtctccatgcaccctttattatgaagatgatcgaagtggtcacctagactcacttcgagaagcctgtcaaacactcccgctatgtaccatactgggttgactccagcaacccagctgcacgtactaagcgggctcccgtagggtctggaggccctgcttcttctgatgagccacctccatagcctcctcatcatgagtcctcctctcgcgccaccactgcctcacgttcgatggaccgtagcgggagaggtagaggttggccagggacggggtcaaggctggggactgtttattcgtctagccaagggcattgctggcgccttcgccatgtgccgcaaccgggcgattgaggagtccgtgcacaagcgtcctactgaggcgctgcatgaggactttcgtcgttatgtcgcctccacaggtcatcctctgcctcttgggtctcctccgcctccgatccccacctaccttgagaacctgaatgagtg

SEQ ID NO: 56592 - DNA, 440 bp, Zea Mays
ctccaacacttggccgcccctctctccttttcccttaggctggctgccctctcctcccatggcagcccctctccacggcttcctcctccctctagatctccccccgtgcagcaaggatcgagaagaggaggagcacattgagttgaaggggaagagaggatcaaggagatgttcttccccatctcttcttgcagaatttcttggggaaaccctaggtatggatgagatccttgttcctccctgcaattatgtgcttttggaggttgtggatcatgggaattaaaggattagaggttggattagatgtggggttaggttttgatctcgaatttagttttctgcagaatggcagattcgacagtttctgttaatcccagttttccgtggtcttagaggcctcaaaaaaataaaaggtctatatataagtcatagataatttg

SEQ ID NO: 56593 - DNA, 507 bp, Zea Mays
gttatacaaactattgtggttgtttaaggaaatgagatggtattggttatattgagactactgagttctatatctacaagaatttctgatcttaattgtgattcttttaaaatgttgattaattcaatttgtggtttaaatatcttgtcaaaacaattcgcttgctgagatgtttcatctcactcttgcattactcaatgcaggtgcttgttgctcatcaagggaagtgggaagtagcagcacatccaccttcactctcataataacgctgcttaggcgcagtcaggatttaattagaaacttcttgtcaacggatattgtttctaactagttgtgcgcactggttgatttagttcatgtcgttatggttgtctttccattgctagcagattattaatgtctattatgttctcttatcatgatatctatttatattttgttgcttccccgtttatgtaattttcaaaggggatgctgtcgaaattttatatatgaatgttagatgtg

SEQ ID NO: 56594 - DNA, 350 bp, Zea Mays
caagtgatctagctcttcgagttccacgaagttgaagaccctaagcatctgtttggtgaaggcaagtgtcctttgacctattatgtctcatttactttataattcatcaacccgcataccatgatcaacctaaggattgactagctttgtatttaccttgtccttgcttatcttttgggttactatggttagcttcatgctattgctttactttaatcaatgaacatgatgtgaacacttatgatacgatgttgtcattattattatgatgttggactggtgatactttagggggctcgagtggtttctcgagtgcctctccgtaaggacctattcgttcgatgaccgcc

SEQ ID NO: 56595 - DNA, 200 bp, Zea Mays
ctcggttttggtcctactaatgctaaatccttttgactcttgagtctgacgccataactctaactttctatttactccttcctgactttcatctactagaactacatcgtcagcgaaaagcatacaccaagggatatttccttgtatatccctcgtaacctcatctatcactaaggcaaatagataatggctcaaagatg

SEQ ID NO: 56596 - DNA, 219 bp, Zea Mays
cagggaaataggattatcctagtcaaactagttttggggatgtagtcttgaacattgtaagtgcatatgcccctcaagttggtcttagtgagagcgagaagaggatgttctgggaacacttagatggcatggtcagagcagtacccatcaatgagaagcttttcataggagatctcaatggtcatgtaggttcaacaaatgcaggttatgagccggctc

SEQ ID NO: 56597 - DNA, 1090 bp, Zea Mays
gtggtatcaaagccaggttttagcattaacccaagttcttaacccaaagtacccttttccaaacggaaagaatacaacttaccattaccataatcataataaaaaaccatcatcctcatcaccacctgtaaaccaaccatctctgatcaaagttctaaatctttttcattgtgagaataccaggcataaattgtttattgcaaatcttataagccttgatcaagatgtataatgcttctccctacacgtctctaaaatgaatgcatctattcatctcattaaaattctttcatgcatatctctagggggagcctatgtctatatcttgattaagttgagactattgctttatcctagtaatcttatatagtctcttgcacgagaataagtttctcatgatgtatgctactacatttcaatccaacttgttaaaataatgtcgctcttatcaaggattgttgctttcattgctaaagtagcatacttactggattctcccgttctaaacttgtttgaaaatctaatgcctatgttgttcttttgatcgcatctgttgtttggtcattgaataacttcaattaacacttatgtttcttagtgcttcatgcaatttcaatcaatatctctcttgatgtgcactaagttaactggagaattcatgatacaattatgcaccttgtgatccattttgatatatgctaaacaatgacttacaaaggatcactagttgtagaactctctcttgtgcaaaatatttccatatattgtcttgagtataggtcataagcgactaagactaaggacaaagcacaatgaagggagcgtctctatgtgaaggtacaaaagggtaaaataacttcatttcactttaccttatacctaaatcttcctttttaaggaagagaaagcatgttcatgcattaaccctgcttcataccgagtttaacttctcaattactcattcttgcatctttgttaaaactgggtgaagtaattttattgtcaaagagcttaaagcttgaccttgtaacaaggataagctgcctttgttccaaaaggtggatggtccttaagcctctttgaaatcctt

SEQ ID NO: 56598 - DNA, 774 bp, Zea Mays
gcttaattgacatatccttttaatcatgtctctttcctttggtacatgtgcatatttcctatctatattgtgccaaggctaagactaatatgttttcatgagcatctcatgtattaagtcttagattgaaagggaaatggagtattcggcaaagacatcgcttccactcaactccattggtattatccactctttatcggtattccgccatctcaccaaatttggtataatcatcactcatattttgttcaccacaggggagagaaaataaataaggggcttatatttcactcaaagtatccgtttttggcgattcatgccaaagggagagaaaatactagcccaaagcaaaaggaccgcaccaccatgccaatttcaaaattctaaatgtttaaaggttgtttttcaattggtatcttattcttgatataatttcaaactggtatgacctctttcaaaattaatatctaaaaccctcttgaacactaagaggagaatttcattaagggggagttttgtttagtcaaaggaaaagcgtttgaaacagggggcaaaaatttcaaaatcttgaaaatgcttcttgcaatcttactcatatacctttgattattttgcaaaagactttgaaaagaatttccaaaagagtttgcaaaaacaaaacaaatggtgcaagcatggtccaaaacattaaatatgaagaaagcatccatgcatatcttatgaaatatagattggtttaattccaagctatatctgcacatatattatgcaaac

SEQ ID NO: 56599 - DNA, 590 bp, Zea Mays
cagcggagcaacggctatctgcgcgcaacggtcgactctgacggatgaacagtaccgcggcagaagtcatagcagtggttagaggggcaccagactgtccggtgtgacaccggactgtccggtgccacatgaggacaaagcctccaacggtcgaccagctcagaggcctaacgacgaggtgacgtggcggcgcaccggacactgtccggtgcacccatcgccagcagccttctccaacggctacaattaggttggtggctataaataccaccccaaccggccacttcaaggtgtgggagcccaagcaacattccaagtcatctagttgacatactcaagccctcccaaccatatatattcattgatccatcctatacacaagatttagaccaatacaaacaacacaagtgccacaaaagagaaagtaagcaagagagagctactcatttgagtttagcactagtgccttgtgagattcattgagagatagtgtgtgctacatatttgtgttcatttgtgcatggagttttgactcccattgaacttcctccgaagttttggaggccttgtaaaagctagcaacaccaaag

SEQ ID NO: 56600 - DNA, 1644 bp, Zea Mays
ccgttgaggaggccacaaaggtcgggtctattccaaccctttgcctctctcaatttatcacacagaccgatcgaggtttctcattaatcacttgggtcactaagaccccgcaaggatcaccacaagtgcaatccaaacaacaagtgcaacaaaagaacacaaatgatcctctcacaagtctctaagcaatagagttgattttggagcttggagtggattgaatgctttgatttttgtcttttgagtgtttgcctttgttcttgcaatgaatgtgaagttcagaaaacttgcatgacttgaatggaggtggttggaggtatttatagtctccaaccacttcctagcagttggctgtttttgctattgatgggtgcaccggatagtccggtagtgcaccggacatggcactgttcagtgtccggtgcgtgccacatcagctacccgttggggtttagagcggttgaccgttgaagtcctttgtcttcttgctgcactggacagcctgatgcgttctgacttcgctgctctgacttttgacttctgcattgtgaccgttgagcgcaggtgaccgttgctccattggctcatcggacagtccgatgaattatagtggagcgcctccctgagaaacccaagagtggccagttcgcgaggtgcttggcctgggcaccggacactgttcggtgcgccactgacagcatcaatgctagtctttgctccaatctttgttgaatcccaacttattttctttcttggtttatgttgaactttaagcacctgagataaatgacatctaagcaaactagttaatccacgtggtttgtgatgaacatcaaacaccaaaatcgattatagaaaatgatttacgtccatttccctttcaagaaggatagtgtattatataagacttaacaagaaaatttaatgataaaatgcaagaatggccttttatagattatcatagtttagatattcagatcaataagtataaaataaacataagcacaactgtctatttaatctatttttccataatacggtcaagataattttgtatattttcaggaaaaagttgaattgatatgagtttccattatatgtcaacaagtcaaacaataagtttctacgtagagtcgcaccagaaagaatgacgatgcccatgcccaagaaaggtgtgaattgggcttttctaaatttcttggaaaagattaaaccctaaacaagagctcaacttcacccaactacttagctgcataacaaaagttaggaattgctaaacaaaccctaagtcatcatggcaaatactaggaatgaaaatactcaaagtaaattgttcaaagtaagtgtggattgcaaagtaagggcaagaaaactcatctgaattttccttgaggtatcgaagagtctacattctccgctagtcatcgttggagcacctgcacgaaggtatagctctcccttagttctcacaaggaccaagtgatcactatgagatgatcctttgcctctccgatgcggtggatccctcaggaccgcgaacaaacttgagccgggtcaccaacaaatcctccagggtgatcaccacgctccaaatcccaccgagtcatctagatgatgccgatcatcaagagtaataagtcatag

SEQ ID NO: 56601 - DNA, 306 bp, Zea Mays
aaataatgtgtgtgcatgtcatattttaggcctttgcctaaataaagagaaggaaataattaaaataaaaaaattaaaatgatgcattcatcttggagttttacttttgattgtgcattaagatttgaaacaaagatgtgaatttgatttgcattcgtaattgaatttgaatttgggaaattgaaatagaaggaaaaaaaagaaaaaaaaacaggaaccctacatgcttgggcccattccactatcggcccagtctcctcatcgcgctgcccaacaccaccagcccacccacgccgtgacctggtt

SEQ ID NO: 56602 - DNA, 120 bp, Zea Mays
gaaaatctgcaagagatgggggtagaacatctcctcgatcctctcttcctcttcaatccatcttgctcctcctcttctcgatccttgctgcgtgtggggagatctagagggaggaggaag

SEQ ID NO: 56603 - DNA, 265 bp, Zea Mays
aaatagctggggatttactgagagatcctgtctaggtcaacattggaagcatcgacgaacttgttgcgaacaaatccatcacttaagtattctagtgaaattatgattgtttttttttcatactttgtgcttcacttttctttaggatgcggagtccttgaagtgccattgctgactcgtgtcagaatttctattgttaaatattttggaaaaagcattctttggcacctaatttctatgtgtcagcctttatctctaatatttt

SEQ ID NO: 56604 - DNA, 460 bp, Zea Mays
gaactacacttctgacatctatataaaattttggcagcatcccctttgcaaaattgcataaatggggggggggacaacagtgtataaacatatatcatgacaaaaacataccaagtattattaatcggctagcaaagggaagttaaacatacgacatgaactgaattaaccagtgcgcacgactagcaaaaaaaaataaacttcttttgacaacaagtttctaattaaatcatggctacgcctgggcagcgctattatgagagtgaaagtggacgtgctgctactcccctcattcccaacatgtatcaagtacctgcattgagtaatgcaagagtgagatgacacatctcagcaagtaaaataatatcaaactgtttaaccacataagaatattgttttaccaccacttgatttcacaaccttcttattacaaaggtgcagcacgtatacaacgtacaac

SEQ ID NO: 56605 - DNA, 395 bp, Zea Mays
gtccaatcaatgagcctcaatgtaacatcccggaatccacaaacaccccggaatgctactgaactacacttctgacatccatatataaaatttcgacaacatctcctttgcaaaatagcataaaggagggggcaacagtgtataaacatgtatcatgacaaaaaacatactaagtattattaaacggctagcaaaggaaagttaaacatacgacatgaactgaattaaccaatgcgcatgactagtaaaaaaacaaacatcctttgacatcaagtttctaattaaatcatggatgcgcttgggcagccttaatatgagagtgaaagtggacgtgctgctactcccctcattcccaacatatatcaagtacctgcattgagtaatgcaagagtgag

SEQ ID NO: 56606 - DNA, 1316 bp, Zea Mays
gtgcctcagcagcagcacctgccgcccccgcccccgatgtcgatcgagcagatgtttctgatgcagactcaggcagttcaagccatcggtcagactttggccgccattcagcagcagcagcagcaacagtagcaggccccacctcagcctcagatgcctcagatgcctagagacaagcgtactgagttcatgagaggtcatccaccaacgttcgctcactcttctgaccccatggatgctgaagactggctgcgcactgtggagcgggagttgcataccgctcagtgcgatgacagggagaaagtcctgtatggtccccgtctcttgagaggagcagctcagtcatggtgggagtcttacctcgccacccatgcccaccctgacgccatcacctaggaagagttcagaggtagctttcgtcagtaccacgtacctggaggtctgatgacagtgaagaaggaggagttcctggccctcaagcaagggccattgtctgtcagtgagtaccaggacaggtttctgcagttgtctcgctatgctcctgaagatgtcaacaccgacgccaagcggcagtaccgtttcctgagaggcttggttgaccctctgcagtaccaactgatgaatcacaccttcccgacatttcagcacctgatcgacagagcaatcatgacagagaggaagcgtaaggagatggaggatcgtaagcgcaagatcagtggaccccagcctggaagcagcagtcgtcctcgtttctcaagcaatcaatctcagcagttcaggcagaaccagcgtccacctcagcagtttcaaaggcagtatcctcaacatcagtactagaaccgtcagagcaatcagtcacgaggtcagtttcagaggcagaatcagcaagcacctcgtcttcctgccccagcaaactagcagaacaatcaggcagcaccagctcaggttggaaacagggcatgtttccactttggagagcaaggccactgggtgatgcaatgtccgaagaaggcagcccagcagcagtcatgccccaatgccccggcaaagcagaatgtgcctcagcctggagcaggcaaccgctctcagccacgttacaatcatggaagactgaaccacttggaggctgaagcagctcaggagacccccggcatgatagtaggtatgttcccagtcgactcccatattgcagaagtgttatttgatactggagcaacacattctttcattactacatcatgggtagaagcacataatcttccaattactaccatgtcaacccccattcaaattgactcagccggtggtagaattcg

SEQ ID NO: 56607 - DNA, 576 bp, Zea Mays
atttattttcgaaatataaaaacaatatccatatccaaaatattgttgcaggggcttattcacaattaaacgtatacaccagggaatagcaagaaataaatagggatatctttttaatggtttctgaactggaaaatgtctgaactaaatttacacaaatccagggactagaacgcaaagtggtcatcttctaccttgggctagtctttgcgtgcaggggaggggctcggcgagtaggagcggggcggacgcgaccgtgagggcttgggcgcggtcggggtactgtgcgggcgcggtcgacggtggacggtccgggcagggcacgggcacggccgggcgaactgtccggtagggcatgcctcgcccgaacaggatcacggcggcgaacggtgagagagaggatgagggaaagagggcaagcttgggtgaagggaggagcaggggctcgactgtccaatttatagaaggataggggaaagggaagaggcacccatggagagggaaggtcggtcgcggctcaatgaaagccaataatggcggtaggtttcattaggggagaatgaatgggggagggag

SEQ ID NO: 56608 - DNA, 976 bp, Zea Mays
cgctcatgagttgctcatttttatgaacattattctattatgtcttctattgagccatacaggattgaagatgcacttagagatccagactgggtgatggcaatgcaagaggagctcaacaacttcacgaggaatgaggtttggcatttagttccacatcctaaccaaaatgttgtaggtaccaagtgggtattttgcaacaaacatgacaagcatggtgtggtgactaggaacaaagcttgactcatggccaaggggtactcacaagtcgaaggtttggattttgatgaaacctatgcaaccgtagcttggcttgagtcaattcacaagttatatcaaatggatgcgaaaaatgccttcctcaatagccctatcaaggaagaggtgtatgttgagcaacctcccagttttgaatactatgagtatccctctcatgtttataagctctcaaaggcgctttatgggctcaagcaagccccaagagcatggtatgaatgtctgagagactttcttattgctaatgccttcaaagttggaaaagctgatcctacactctttactaaaacaattgacaaagacttatttatatgccaaatttatgttgatgatataatttttggatctactaacaagtcatcttgtgaagagttcagtagaatcatgatttagaaattcgagatgtccatgatgggggagttgaagtacttcttcggattccaaatcaagtagctccaggatggtaccttcatcagccaaacaaattacactcaagacatgctcaagaagtttggaatgaaggatgtcaagcccgtcaagactcctatggaaacaaacagacatctctaccttgacataggaggtaactctgtagatctaaagttatatcagactacgataggttcattgctttagttatgtgcttctagaccagacattatgttgtctgtatgcatgtgtgcaagattccaagctgacc

SEQ ID NO: 56609 - DNA, 2225 bp, Zea Mays
catactcctagcttttgggctttggtaccccaggggatctacctttgatcttgctgggtaatcagatgttgattatgacggatgtaaggttgacaggtagagcacattagggacttgtcagtttctgggaggtccctggtgtcttgggcttcaaagaaacaaactcagtagctctatccaccgccgaggccgagtacattgctgcagggtattgctgtgcacaactactttgaatgacgcaaactcttaggaatgatggctacaaattgagcaaagtccctctcctatgtgacaatgagagtgatattcgcatggcggagaatccgttgaatacagcagcactaagcacatagacatttagtaccacttcctgagagaccactcacataggggagatatcattatataccatgttaacacccacaaacaggtagtcgatatctttaccaagcccttggatggaaagagattctgtgagcttaggaatgaactaaatttcatagattctcgaaaccttgattgaattattgcactatgctcattttatacctttgatcacgacatgtctctttcatttggttcaaatgcatatttcttattctttttgtgccaaagctaagactaatatgctttcaactgtgtttctatacttagtcttagattgaaagggaaatggagttgaaggcaaaggcaagtcttccactgcatattcattcggtatcaaacactctttgcccaactcatgtacttacatgtgtatctttcttgttattggcctatagatttcttcgtttttggtgcataatgccaaaggggagaaattaataggcaaaagcagaaggaccgcaccactactattctttgtcttccaaattggtgttgttgcatttgcaaaaaccctcttgatagctaagatgagaaaaactacttatgctaaaggggagaacgttttcaagggagcttttatttggccaaaggaaaagcattttaaaaagagggagaatctttaaaactagaaaatgcttttcaaaaattctattcttataccttaggccacatgcaaaagaatttaaaaaagacttttccaaaagctttgcaaaaacaagctaagtggtgcaaaagtggtccaaaattttaactatatcaaagcattcatatgtacttagaactgctttaactttagtaacttatgcactcttgtcaaaattgcaaacaagttacatttctacactttatacttgctttggtttgtgttggcataaatcacaaaaaagggggagattgaaaaataaatggcctttaccattttctctaaattgattttgatgattgttgaccacaacctaatggactaactagtttgcctagttgattgattctcaggtgcataagtccaatcgtttgaattctaagttgactatctggaataccgtagattattacggacaagagagtttttttggaaaatttacgtatgcgcggaccatctgggcccttccggtggaccttccgtgacacctcggtgtgcctcagacagaaactttgcaaatcacagaacatctactatggactgctcgaaggagtgaagagtaccgtccaagactaagtgtggaccgtcttgtcctcaggcacggaccgtccttctattgaaaaccagacaaacccaaaggtgtcgggtttgataaaatttatttttagcattctcatggaccgtttggggtgcacaacctgaccgtccataattgctttatctgacattagacgatgcatttaatgcacttatagccattgatatagctgttactgctgaccattgtgtttccagcggttgatgtgcaggggcggaccgtccggcctacaggctcggaccgctcgcaagtggtagaaacttggcaacggctatgtggtggttgagggctctaaattcaaccccaaccacctccattcaacacatccaagcattccattcatcctcattcaatacaagagcaagcacttcatcccaagacacattcaaagctcccaaggtcctctaagtgccataattgtgactagtgatcattagtgattagtgccttggaaagtctagagagagtgtgatcttatgtttttcttgttgcttggctttgttgatcatgcttttgtcatctccttctaaactctcaagtgacttgtaaagctagaaagagacacctaattgtgtggtgatccttatggggtctaag

SEQ ID NO: 56610 - DNA, 248 bp, Zea Mays
cccgtccctcagatccctccctttcctcagtagcaaaaacacagcaccagacgacgaccgattcgatccaccaaacgcagctacaacagaagctgcttagctcctctcctctcctggattcttctcgggaatagtggactcctagtcgtctgctccgtcggcctcggtgagatcgaaatcgaagaatgggtgcagaagagaggccatggacgcaacgcaaccaacaatgcatagtgcaaaccatcgtt

SEQ ID NO: 56611 - DNA, 861 bp, Zea Mays
gtataagtgagattagcttgtagagctcacagtatgacaccggagccatacgtatacatatgagcatgaggaaagttatgaagaaaatatttatagggacttgaaaaatgattctgaaggtatttctcaagaggaaaatacttggagatatattggtggaatatttgggcaatatttctggaaagaacttgaaggggattactcgggaaatatctgggcagtatttctggaaagaatttgagggggatcactggagaaacatttgtaggatatttgaggagaattttggagagaatatagaccactatattttatttgctgatatcaactcgcaaacaaacaatttgaaatgaaatttgaaattcattttgaatttagagcgagtttgagaaaatttcaagatttgaatttttgggatgctacattctccatgttccaattaacaatatgatcttatcatgaacaataactaaacaacaacataattggaacatgatcataataaaacattagtttctcaaaaccaggtagagcaatagcaaatctacccaataattcatctgtttgcaaggtgggggataaacaatgcaagggaaacctattaagtcccatcaaattaacctgagcatgttacagtgattaacagtgaacattattaggtaaaaagagatgatcaagggcacaacttgccttagactcaagattcccaggtaccaacttggtcttcaagtgaatcgtaacctcgcggatatccgtagcaatacaaacaaacatgaaacatgcaaatttaacatcacaccaaacataagaacaaactgcataataatgatctacgcatcgtaacgagaacctaggtttgag

SEQ ID NO: 56612 - DNA, 630 bp, Zea Mays
acaaatgccaggccaaacactatagctaacattcatgctcctaaatggattaaagccatcagttgcaaatgctagacgaatatttcggctatctgctgcaaactctagatgttttctatcaaagtctcgccataaaggtgaatctgcaggatgccttagcaaaccatcttttatccggtgttcatcatgccatcttgctagatctgctacattaggggtcatgaatggcctttggagcattcttgttattggaatatagcggagaacctttctaggaaccttgtatatatgtttcccatctagactcttccttgttgatttccaacgtgaaaccttacattttggacatgaattcaattttgcattatccttcgaataaagaatacaatcattttcacatgaatgaatactgttgtatccaattcctatagatttcaccaatttcttagcttcataaaagctcttaggtaatgttgaaccctcggggagtgcatcattaagtagatctagcagcaggttcatagatctatcagtccatcctccaaggagtttgatgtgaagcaatctaactaggaaacacagctgtgtatatttcttgcaattaggatacaactcttttctgttttctcc

SEQ ID NO: 56613 - DNA, 1946 bp, Zea Mays
cccagccaacggtcggctgggggcaccggactatccggtgtgcaccagacagtgtccagtgcgccaacggctaaaattctgcaacggtcggctgtaccattttaggaaggagaactgcaccggacaatgaacagtggatgttcggtggtgcaccggactgtccggtgcgccacccgacacaaggcaagaattgccttccaagaatgcctccaacggctcctagctgccttggggctataaaagggacccctaggcgcatggaggagtcaaccaagcatactttgagcattctaagtcttccacactccatctccgcgcacttgattgactttcttagtgatttgagctctgttctagtggtgaacttgttgcgattcatttgagctcaagtcttggctgtgtgtgtgcgtattgctgcggatttgtgtgtattgctttcctcccttactctaagtgctttcactttgatctttgttgtaagggcgagagattccaagttgtggaaattcctcgcagacgggaaagagtataagaaagaaaacaaccgtggtattcaagtggatcattggatcacttgaaaggggttgagtgcaaccctcgtccattgggacgccacaacgtggagtaggaaagtgttatacttggccgaaccacgggataaatcatcgtgtctcttatgcttgttttctttgtgactattgtgtttcacaagagctcggttcttagccacttgattctatcgtgctaatacttaatcaagttttgtggctataagttttaagtttttacaggatcacctattcacccccctctaggtgctctcaatcacttacaacaacatgggttcgaaaacccttagtacatagtgtactttcgcaagtcttacccgacaaaggaaaaagacttctcaaggatatgctggcttgtcggattcaatgtaaagctgatcaagaatcaaagactctgtttacagaaatgattactaacagtggatccttaaaaatccagttttattatcaggttaagtcattacttgtatctagagttctttctatcgtagttcaggtacttagcctatgctagccgtcttttatcaacccttcactttactggattgctacgtgtaggacagtgaccaagtcttcatgtccaagaagtaacaacgatccgaatcgattaatacccagctggggatctccaaccacacgacatatgtagcacttaacccttgcatatgtcaactcgccaccgggtttctcaagaccagaacgagttcacgccaaccgagagcacaaatacaccaccgtccagccttttgccacagagagtacacactactctccatctctccactcctattgcgtggtggcctttctggtattggtacaaccgaggcaaagcataccatgacgagacatgtggccagttaaaaggtcctcgatcagcaagcctacatcgacacggtccttaatcgactcagacggagacactacactgagacttcattctcgtgcaagtgacccgcccagtcttgtctttatcatttacaacccaaaatttggtacctgacagaggtacatcttttcagatgttgaacccatcacagccatgatagattcaccatcaagtcttttctttggaaacttcccatcccatgtgaagcatcatttttgtttaaaacaaaacattttgttttctaaagcagagctaagcatcagaaaacttttaagtaaagcaggtatcaaggaatggtaatcagtttcaaggaagggaatgcaacaattgtttagcacacaactcctatcacctaatgcatcatctcaagtgataaagagttttaaacaacaaggaaaggggtaaatgcaccggggcttgccttgtgttgtaggaggctcagggtttgtcccacagatatcaaatagaagttgttctcgacaggtgaaatt

SEQ ID NO: 56614 - DNA, 1508 bp, Zea Mays
actaggtgtgaaatttagtctaaaacagggttgtcagatttcagatttggtgcaaattcagagtctgaatttgtatgttttgggtgcagctttggagctctttgctgctctatccatagagttatagcttatggccactataacaaagttatagatctattataggagtacaagtttgatttagtgatctgacctaaaaactatacagaactgattgtaaaccttgctcaaaactgggccatcaacttctgggtttcagacttagctaattggctaagtctgaatttcagtaaactttagccatgtttgtacctttgtagtggctaacctgtagggaattaaattaggtctcttatagcaaagcaatagagctatagtagaagaccaggtttggttgaaggccataccatgtaagctatttggaattggagaaaaaggttggctaaagttggaccgtcagactgtacataactgaattttgttattcagttctaagaattgaattacaacaggatgcctagtttggaatttatttgtgactgattcgtggggttttggattaaagtttccatagcaaatctggataccatagtaaagagagtaagttttgtaaagtgaggtggacttggttccacataaatttggaaataaaagtggccaaaaggtggactgtcaggtgttaggattcagacttagaataatatttaagtctgaatttgtgtgtttttattcagttttgggtccttgtggtaattaatccaagaagaattggggtaagaatgctatagcaaagtgaaagaccatgtaaaggagagcaagtgtcatgcaaagtgttggcttgctactgtgtagaatttggagaaaaaggagtgacaaaactctttgtcagacctagtaatgtgctgtttcagattgggaaaatggattttccgtgtgtttgctcaactttaatgcaccctaacgcttggtatgtatggttataagctaaagaccttatagaagagatttgtagttgtgttgggtgaataagtttcttacagggaaataagtttggagctgtataaaatttagagtaaaatgtgcataaatttcttctgtcagtctgtgtgagatgtctgtttcagaaaactgaaaacaagtttagtggaaggtggctgaattttggacaccttaacttgtagtacatgcagtttgggtcttagattcttgtaacaaacttgaaaagctttagttagtgaacaagtttggtatggtctgtccctagcagaaacaaggaaaaagtggggctgaacagggacatatacaattgggtattagaggtggattcagtgtctggttgattgactgaagaagatcactctctccctgtgttttgcgtgtgtatgtgggtgtagtgcagctgtggtggctgatttagtaaactagtgtctatggagtaactgaagaatctcacctcatccttgttggttgccctattatgattgagttgtgatattagaatatttagc

SEQ ID NO: 56615 - DNA, 739 bp, Zea Mays
ggatcaaagacttgtgtttgggtacccaaagttcttgtgtctaatgtcaaaggacccaaaaccatttgggtacctaaaatcaagaactaaatttgttttgttggtttatgcattcgggggctcaagttggatcatcgatagcgggtgcacaaaccacatgacaggggagaagaagatgttctcctcctatgagaaaaccaagacccccaacgagctataacattcggggatggaaatcaaggtttggtcaaaggattgggtaagattgctatatctcttgaccattctatttccaatgtttttcttgtagattctttagattacaatttgctttccgtttctcaattatgcaaaatgggctacaactgtcttttcacagatgtaggtgtcactgtctttagaaggagtgatgattcaatagcatttaagaaagtgttagagggtcagctatacttagtggattttgatagagctgaactcgacacttgcctaatttctaagactaacatgggctggctctggcatcgccgactagcacatgttggaatgaagaatcttcacaaacttctaaagggagaacacattttgggactaacaaatgttcattttgagaaagacagtatctgtagcgcatgtcaggcagggaagcaagttggagttcatcatccacataagaacatcatgacgaccgataggccactcgagctcctacacatggatctattcggcccgattgctt

SEQ ID NO: 56616 - DNA, 302 bp, Zea Mays
tctccctaccgctatccctttcggttatccgaatcggccaccgattcaactcttcactacgtgtcgcgccttccgtcactctgctgccgcgtgtccgacgtgctagcgagtgtaaatttgggaatcgactgatttcataaatctagactgcacgtgctattcgtggaaaacacacgcaaagtcgataaccaaggttggtttcatcttgcacgctatttatggcagagaaattcaagtatttggttgcgggcgaatttattcgatctcagataaatcaattgaacaataccatattgacccag

SEQ ID NO: 56617 - DNA, 195 bp, Zea Mays
cttacatatgtcaaccattcccatagatcctccacaacatgaaccggtctgcgctacccgggagcacagtactcctccgtctagcctctagccaggagggtacacgctactcccactatctcccacgcctagtgcgcggttgtattttcacgcatggaatagccaggttcaagcttaccctgtcccatatccagg

SEQ ID NO: 56618 - DNA, 315 bp, Zea Mays
gataaatacagtactgaatactgatgtataccttgcaggtgcgtggaacggtagttgggcgaccctttcttcaaaccgtggcccgccatgcgacttcggtgaagagctgcccactgcaggctgcaggtaatgggactgaaacagcgagcggccggcccccgttttgaaaacttctgctgctgcctccggttgcttcttctgccgctgcaacgccagcgcaccatgcatgcatgcatggtaaccaacaaccttcttaatttactgcagtgcgcatatgcatcgaagaagaagaatcgaacgtgacctggccggccg

SEQ ID NO: 56619 - DNA, 243 bp, Zea Mays
cagggcgcagcgatactcgtccacaccaatgagcagatccatggggaacgcttccccaagcaaggagttgtgatggctacaagggtctccacacctggtttcgccactactatctgctacatgagcaagcgatgctccccaaccaccacccagagcccgagcgatatcagcgacgagttgagggtgcggcggctctttttccttctcgattagatggtgacgaggcgctgagagataatgttg

SEQ ID NO: 56620 - DNA, 1002 bp, Zea Mays
  misc_feature (1)..(1): n is a, c, g, or t
nggattgaagcctaccgttggcatgccatttgattctctagaggcagttgaagaattctacaagacatatgctcatgaaagtggttttgcagtgcgtataggagcccaaaccaaggtgctcgatgtggttgaaaataagaggttcttgtgttcgagacaaggattatcaaagaaaaaaaaagatgaaggtgctgttacttctaaagttcatccctatgtggaacaaaagaagccaaaggtgcgcatggagacaagatgtggatgtaatgcgcatatatatgtgaagttggctccggataaaaggtacttcatcgcttccatggttgagcaacataatcatgggctggtttctcctgataaaatttcatttcttcattcaaaccgttcaattagtcaacgagtcaagactaccttgttcacgtgccataaagcaagtataggtacctcacaagcatatagacttcttcaagtaagtgatggaatcaactacattggctgcatgaagcgggatcttcagaactattatcggggacttaggcagagaatcaaggatgctgatgctgaattatttgttgcccaaatggagagaaagaaataggcaaattcaacattttctatgattttgttgtggatgagcaagaaaagttggtctacattttctgggctgatgctacaagtcaaaagaactataagcattttggtgatgtagtatattttgatgcaacatatagcacgaaccagtatgatatgaaatttgcaccttttattggtgtcaaccatcatttgcaatcagtattttttggagctgctttcatagtagatgagaagattgagtcatatgaatgggtatttcagacttttctttcagcaatgggaagaaatgccccaaggattgtcattacagatgaagatgctagtatgaaatcagcaattcggtctattttgccagatacaatacataggttttgcatgtggcatattatggagaagatgcctgagaag

SEQ ID NO: 56621 - DNA, 2040 bp, Zea Mays
tggggttcataaacgggagaagaatttgagatgcagtggaatagtatcatagttgcttatggtctgttgggcaatgaatggttggctaataagtatgcaattcgtgaatcatggattccaacattctttatggacataccccttgcaggactccttagaaccacctcaagatctgaaagttctaattcattcttcaatcactttatccatcgaaagttaagttttgttgagttttggctccgattcgatacatccttggaatgccaacgacatgaagagttaaaagctaataatattagtattcatagctcaccgctattgagtagaccatggcctttggagaagcaaggaagcatattgtacacacatactgtgttcaaaaaatttcagcaagaagtgatagctgctagagaccattgctttattgtagcaatcatgcaacaagagggtgtgaaagttgttataattaatgatgggtcaatgagagatagggttgttcagtggagcagctcaactgtatttgcaagttgttcatgcaaactatttgagacgatgggaattccgtgctggcatattattctaacattgagaggtgaaaggctatacgaacttccttcagcctatattttgaagagatgagagatacgatgcaagaggtatgttctcatcactatgatttactcaacttttcaatcagttagtatgttagctttgtcattttttttcattatgatttgagagagattatggttgacgaggaaggcaatttattggaagagaagcccaaaaagatgctaaagaggtggaaaaaaggaaaaagatcgcggcggtgagaaacaaggtcgaagatttgattcaaagatcaaagagttcaaatgaagtcatgaatttcttagtatcaggtgttatgaacctagaggcttctttcagtcaaattgttcataccaatatgcaagccccacaagaagaatatgatactttcattggttgcaaaatcccggagaaagttgacatacatcctccaaccgatgtttgttcaaagggacggaataaaataattaagaaatctaaagaactacgtaagcgaaagaatgccgataatgagactaaaaagccacagaagcagaagaatgccaacaatgaaactacggaggcacatcaatagatgattatcttgtgttatccttattttgctcatcctttatggaaaattcatgaattagttttgatacattttggtgctgcaactatatcataccatacatttttctgaaattgtttgttgtcatagtcacattcattaaggtaagttgtgctgcaacaattcattatccaagtggaggcatagcaacaattgtttgctgctatagtcgtttcatgcttgtggcagcagctagcaggcgacagacaatgaagtggtggtggcgggcaaccagtataggcgtacaaggagcttggtttttttgttaaagattcagggagcttcagggaggtggaaggtgttttctgataaaataccgaggcgggagaggcaaccgtttgattgaagattaggggctgagatattatatgtgcaccatgtgcaccaaagcttcatgtgcacagatactttgcctattacaaatcctgttcgaaacgacgtcagctattgtatccacgtcagcccacaaactttcagccgtccaatgatttattgatggtcacagaagtgtcggacttcttgtgcttttttcccttccatacggctctcgaaacttcatccccatccattgtctctcgcccaccagtccactgcgcaccaccctgccatggacgacatggacagagtccacctcgccgtggacgacatggacagcgccgcccgctctgcagcctgttcgtcccagcgtcctatgtcgccgcgacctacaggtacttctcgtccacgctccctcctctgctgtgcactacacgtagctactgatctagttcaccgtcatttttttgccgcctccttcgttttagggttcctttttttgaccggccgcgcttcgatttaaa

SEQ ID NO: 56622 - DNA, 232 bp, Zea Mays
cccctttggccgcccctcccctctctcttccactcttgcagccgccccaatccctctccttcttccccaagtgattgcagcgccacccctcaaccctagcccccccacctcttcctctccaaggtggagcctccccgcttggtgtccgtcgtgtaggtgcgagtcttccatgggagtttggagggaggaagaaggaagaaaataaggaggaaaggagaaacccaaggtgatt

SEQ ID NO: 56623 - DNA, 707 bp, Zea Mays
cgttatatgaagagttgtaggcatgacatgctcatcgcatcatccatcttgcattttgaagttatgtcatgatcttatggtccgaccgtaccggtacatttttagcatcgtacgttgcccggggaggggtacgatgcggcttcatatccttagaggtatgaaggcagaagtcatctttgcatttgcagacatttgcactcatgaggtatatatgaagtgtgacattactatgttactattgtggtttctacgtgcgaggtgtggtgactaggtgtgttgtatgttgtatacgtgctgcaccttcgtaataagaaggttgtgaaatcaagtggtggtaaaacaatgttcttatgtggttaaacattttgatattattttacttgctgagatgtgtcatctcactcttgcattactcaatgcaggtacttgatacatgttgggaatgaggggagtagcagcacgtccactttcactctcacaataacgctgcccaggcgcagccataatttaattagaaacttattgtcaaaggaagtttgttttttaactagtcgtgcgcactagttaattcacttcatgtcgtatgtttaacttctctttgctagccgattaataatacttagtatatttttgtcatgatatatgtttatacactgttgccccctcatttatgcaattttacaagggggatgctgccgaaattttat

SEQ ID NO: 56624 - DNA, 850 bp, Zea Mays
aaactaacggtcgaacgtttagacgtaatatatacatacatacacacagcacgtgacttgagaagtgccagctgcggcagacgaagacgccggccgccggcgcgcgtcagcagcgaaacggaccactcggcgtcggcgttccggtgtgggcactactgtgaaggaccagcccatgcgtagacactaaagaacacatggatggctggccgtggtggcgaccctcgaggcagcagacatgccgttattgctgacagtttcatcctgttgttccaagcagtgaaaacctgaacagcacctagcttgataccctcatctggtggggttcatatcatataccccatatagtccaaaagatgagagctagctccctgcagcaacgatgaacttgcacggcatgtgtgtgcatgcagacaatggctcgcgacaatttcacgtgaagtggttcgattctcgcggcaaggatctgatgcccatgttccaacagtgcaggctaaaaaggggggcccccctctccttcttccaaagttgcttcacatgttgagggagagagagagagagcgcgcgcgccatccatccatgcatcacgtagcaggagcaagggaggaacaccttgcgacgaaagaacagcagttccgttggcaggacctgggggcggggcggggcaggaaacaacagcttttgcttcagaagaaacccctgtgcagactgcagaagaagggcgcgcgcactagattcggcttggaatcccgcccgaacacgaagcaggagcccagtctctggagatacatgggaagataagaacgataggatatgagtggccaccgaaatgacttgcgaggccacaggcctg

SEQ ID NO: 56625 - DNA, 455 bp, Zea Mays
cgggcggcccgaatgtacacctatagttcttttctatgccatggttgatgctttaccgattttgtccactaggccatcaacttgtgctgctgtagtatcgggagttgcgtgtgcataaatttactatgcacaagtaatcaaaattagttatatacccactcgatctgtatattttctaacacaatgcccatttatggactcttctatctactccctctctctaaaaaaagaatgcaattgtcattttttagaagtcaaacacttaaaagtatggttatttcaaacaattttcataatcttgtcgattgcatttataagctcgtaatctttgcagccaaatattttgtaatcttgtaataaatatatttggctgctagataaactccaatataaaaaaaggtttaaatcttatcaagcactatacatgtggtataagatgtctatctattcaagtt

SEQ ID NO: 56626 - DNA, 1756 bp, Zea Mays
aaagacttatagatacatcataaatcgcatacaaaataagtgaataacaatttcattgcatcatatatttagttcacataatcgaatattccaatttcataatgataaagtttggtatttcggttttttgggcatttcggtttttaggtattacggttcggtgtacggtgaaaaccgattacgataccgaatattgaacttcttagatacaaaaaatgtaatcgaacccaacggttcagctcaattttcaattcatggtaaaaaaaagggcctacccctgctcgctctagctttggtattaatcgtgtgaacattaaaggttgtttgttcaaaaaattgataagcttagaacatatatttaggacgttaaatggattcaaatagaacaattttcagctataacgttgcagattgtattgacaccaaatggttttgatatagatcgatgtcaacacccaaggttgtttgaaagttttaaatttcaaaacatatggatttagaataatttgtcgggactctaagcatatagtttcgaatataaatatttcaactacagagtcaggcatcacatctagaactacaattttgatataaagtttatcatagacgaaaaaaaagatacgaactattttttcttttgttgcagctatttatagtgacggacacttgtagagacaggcgttcagaacatccgcctctgtattttcatactttgcatgataaagacgcggttttttatcatgtaactgaatacctgcatcttcatcatgccatctgtgctccctccccctcccctacgattttccaccacaatccgtaccgcacgttacatgagaaaagccagtgtatttttatttatttttttttaaaaaaagaaaggctgagcaggatgctaagataatcgggagaggtgacccgctataatactcgacaagctcgggtgtgtgtcccgcaattctgccggccatccactgattcgatcaggaaagcgggaagcggccggaagccggggccttgagaagaaggtcggccgggacccgatggggggaagaaaatgatgatgatggatgggatgggggagctgtagaagaggctgtcaatggcatgtagccccatatagagaggtggagtggggacgacactcaccatacgaccctaccctaccttgcccgttggtgtgtgacccacgtgtgctgttggcatggacgtgggcgatggcgccatcggtggaggtggacgccgcagcagcgccatcccgggcgggcgggcgttcgtgctctccttcattttcgctcggccggactgattggccgaactaggaagaagctgcctctgcctgcccccgaggccgagcggcgccggaccccgggacgccggatcggatcggtcacttgagctgctgcgaatgcgcgcccgcggcggccgtggtcctcgtcgccccccatcttttcgctgcttgtaactgacgattcctggagatcggcgaagtttctggacttgagctggcgacttccggtccggagcagggcgtgctcgtggtcgtggtcccaccggtcagtgagcacgcaccgtccgtcaaagcatgcgtggcttcgtcgtgggatccccgaacaggtcccctcggtgctagatcttttggtgtatagagcaagtgatggcgctggatccatggacggatggatgatggatcggtctgtccgtgtatgcgccggccagtggtggtgctcgatcgacgcatctcccactctaacccgtc

SEQ ID NO: 56627 - DNA, 295 bp, Zea Mays
aataacgctgcccaggcgcagccatgatttaattagaaacttatggtcaaaggaagtttttttaactagtcgtgcgcactagttaattcagatcatgtcgtatgttaaacttctctttgctagccgattaataatacttagtatgtttttgtcatgatatatgtttatacactgttgccccccttatttatgcaatttgcaaaggggatgctgccgaaattttatatatagatgtcagaagtgttgttcagtagcattccggggtgtttgtggaccccggggtgttacaagttgc

SEQ ID NO: 56628 - DNA, 362 bp, Zea Mays
atcttgagcttcaaaacatgtgggggcagcccattaggcgtcagtgtgtttaggaactcaggtgggtagtagttatggggatcatccatggcactatcgaaactatggtacaccatatgctccccttgaaaacgattgatcatcttagcatttatcatatccacccagtcattccgcgttgacagtatcgcccttgaagtaatgtaggtggaatctgacattttttcgttgagatttgggaaaacgaagtctattagattgtcaagatcattgtcactctcactataaggtaagcatacctcgtcaggaagacggatgtcgccatcactatttgtgacctcagttccaccacctacgcgcag

SEQ ID NO: 56629 - DNA, 617 bp, Zea Mays
tcaaaataaattgattctgaaacattaacacgaggcactcaatgtaattcgactttttataaatagtactccaaaggataacacgctatacaaaaaaaggctataagcatcctgtacggcgtggtcgcgtggaaagcatatgaggcggccacaccatggcgactatcttctgttaggatcgaaccaacggcagtcgttctactcagggaatcggccccaagtcaaaagtcctggcccccaaaatagaggaaaggaaatagcctaaccgttcgagattggtgaggcggatggaagggagcatgaatacctgggcttgagcgaggtatgcgcggcgaggtcgcgggacaagtacttctgggaggggccgaaaatgcgagtgcccccctgctcgttgccgcccttggccggcgcctaggtggggcacgtcgccgtcgtcatctgcaaaccctagccagcaagggaagctgtagacacgagaggagaggagaggagaggagaggatggagacgacgcgaaaggaggagagaggcgacgcggtcgggttgtcagatggcttgacttcacaggtctcctatatcctatccgagtagaaaattgtcaatttgggtcaatctaag

SEQ ID NO: 56630 - DNA, 342 bp, Zea Mays
ccccctgccatggcgcgctgctccctagcactcggccttatctcctccctcagctcgcctctctctctctgcacgcacgcagctcgtccagatcctcccagccatggcgccagccgccacgccctccgctgcttttcttgtcttcccagccggcgctctccatctccagtccgagctccttcctttcccttcccatggccacgcgcccctagtttttccctgcgtgcagccgcgtgctccaccgtgtcgtgctccctagagctcgcccagctccctctactcgctcgcgtctagtcgttggacctcgcctccaatccatggcgctcggcacccatatttcat

SEQ ID NO: 56631 - DNA, 523 bp, Zea Mays
gtttacccaaaaatcgcagcgtgtgccagtcgcccatggcgccgatccgcgctcgcccatgtcgccatcgtcgtgtcgtcgcttgtgatagcttcgcgtgccgtcgagctagtggttttcctcgtccagtgcttgcttggccttatccgaaccacgctatcgttgacacaacgaggggttggctctctactctgcccagctcatcgagtcccaggaatctgcacgcacatcgtagtcggtgtccaacatctttgtgtcacccttcgtgtgctgtgacacccccttgctcttcgtcgtcaatccacgtcgcatccgcgacgtgcctgtcgatcccgccgatctatctgtcagttgcgcgccacttgcgttgagctccgaagtcctatgtcgtgctcgaccctagaagcctccaagtcgtcaacatcccttgcgtcatcgaaaaatcctgagagtttgaatagtacaacaaatcccatgtggtgcttgccgggaactcgaacaggaggtatgaacaagaataagc

SEQ ID NO: 56632 - DNA, 303 bp, Zea Mays
ttgtggtgcggcgacggatcgagaggcgacttcccgaaccggtccggacggcgccgccgtccttccggatcccgtcgtgtcgtcgtcaaccttgctgtggcgcgccgcgcacgcacccaccgatggagaggaggaagaggataacgggtggcatgggtggcgaacccatcgactcacccagcgatgcaaacgctcgggagcacgccaaactgccgagttggatcggagtaactgttgaataattagacaaattctagattaaatttcgaatagaaatcatgacaaaatgagaagtactaaaat

SEQ ID NO: 56633 - DNA, 1401 bp, Zea Mays
gtacttgtcgtgtctgctcccatcgtcgcgtgcctctgcccatggccgttgccttctccctactcgtggtcgtgctcgcaagttctctctgggcgcgccgctgtggaatccccatcgatgtccctcctgtcctaactagaccgtcccagcctgcgtacgtcgtcgtttcactacgtccggcgtcgtgccttttgtgccggtcgtcgatctccaattcgccacggcgtcgagctctttcgacattgtcctagcccgttgtcgttgtcctagccttggaagctgtcggtttcagcacttctctgaccgtgcccttattcgtggagctcgccggcttcccggtgtgctgtcgcggatgccattgctcagctcttatgctttgtcgaactcatctgcctctcttccaactcgccccaaccacgccattaaatcgcttattctgtcttagacgtgatcgccctttcactacagcttggactggtcgcgaggtcgtgctcctcgttcgacctcgccatcggttggtcactcctgttgccgtgcaagctgccaggtcgtcggacgctgctctcagctcaccataggactcgctgaacccgccccatagcgtctcgatcctcccctgcgccagcacgccaagtctttgtcacgagaattcgcctcgtagcactgctgtgagccacatggtcgacctccctgcttgctgcgctcatgatgcagtttggagagaaaatccaaagtttatttgatggagaaagaagcgaagtcgcacgacacccgtcagatattcaacgacaagctcgagccaggatttatcagcattcgtacgagtattgcatcgcgtttgatgctggtgagccgatttataatttttataagtttatctgatgattgaattaactagaattattagtcgtaataatcctcgtatttagcgcaggcgtgttatggtagtgttaaatatgtgtcaaatacgatggagttagtaatgcaaaaggtagattaaattatacgatatttgggcgagctgatgacatagaaaaataggcttagtattcctatcagctagttgatagattttctagtgtcgttatgtcaatttggttaatggatgtagtcgatgctctgctgtgatatcaatggtgcttaatgcttgattttaaatgtttcattctttttagtgtagattatctatattatactcgttatactcgtgctcattcatgtgcatcgtgcatctcatgaggtacgataaataatcgtgtgatgcggaagtcgaccccaagcgcgggctaatccacatgatgacgctgatggacaaaccagaagatcgataatctgaacgagtgccaagccaaaggatactcgccaagtcgtcacctaacaaacactaacctagtgttattc

SEQ ID NO: 56634 - DNA, 135 bp, Zea Mays
ctttcatggattcccacgtactaaaacaataggggaacttgtacatatagtatatgcagttcatcacaagtcagaagcatgcaaaacttcatgactccaaccataactagttggaagtgacaattcattactgat

SEQ ID NO: 56635 - DNA, 211 bp, Zea Mays
tttttttttgccttgcgtgcgtgcgtgccacgtgctattccagacgcgaagttgccgtttgcctcttggaccgcatccgatgatgtgacgctgacgcgcagggagttccccactttttttggtaccacattattattctgtgcttgcattcgtccacatcgtcgacgtcgaccagcaatttttggcacgtcgtcgctgtcaaggagaaacg

SEQ ID NO: 56636 - DNA, 267 bp, Zea Mays
ggagatactgcgctgccgtccgaaagctagaagataaattcgaaggtctggagtttcatcatatagaaagagatcggaacacggcggctgatatactgtcaaagctcggatctggtcgagctcaagtcccgcccggggtcttcgtgcaagaaatccttcagccgagcatctcgatggatcaaagggaagagtgcaacatcatagaccaacccgagccagactctgatgactggaggcaaccgattattaagtatataaagaatgaag

SEQ ID NO: 56637 - DNA, 692 bp, Zea Mays
atcaaatgtccaatcagtcacagagcaaataaattacactacctagcgagatatggatggattgcgaactcggctgcaaaagacagaaaacatgctgacctctgaagcataaaaactgatgacatagcgcggatgacatcatgccaattttttacaagcagaatggataattctcagcaaaaggacacagaaggaagaccttcgagtggattatcctcaaaaatccacttgaaggtcgggggctacacccattgggtgcaccttcggtgcaccccatggattatcattctaaatcaatatagtgccgacctctaaggcatagaacaagattggaaaggtcaatcctcaactgagatacaggaacgcgaatggagataatctttggagaagacctttgagtagattatcttgtaaaatctactcaaaggtcgggggctacacccattgggtgcacctccggtgcacccaatgaagtctagagtcttacaatccaaaatgccgacctctaaggcacaagcacaaaaccaaactttggtcgaacgagtgatcagagtcagagaaaacagcaggaagtcattttccggaccttggatctttgagttgattacctctaaattaactcaaagatcgggggcttgtgggggatagatatcccctgggtccactaaagaagtaaaaggcctcacgaaaag

SEQ ID NO: 56638 - DNA, 912 bp, Zea Mays
gtcggcttcgccaaagaaggaaagaaatccgcaccggacagtgtacggtggtgcaccggactgtccggtgcgccaggcgacagaaggcaagaattgccttcttgaaatgctctcaacggctcctagctgccttggggctataaaagggacccctaggcgcatggaggagaatatcaagcaacctttgagcattgttgatcattcacacttcattcttgcacacttgttcgacattcttagtgatttgagctccgttctagtgagaaccttgtgatactcttttgagctcaagtcttggtcttgtgtgtgcgtatttgttgtggatttaagtgtgttgcttccctcccttactctagtgcttcattgtgattcttattgtaagggcgagagactccaagttgtggagattcctcgcaaacgggaaagagcaaagtaaagaagaacaccgtggtattcaagctgatcattggatcacttgagaagagttgagtgcaactctcgtccgttgggacgccacaacgtggagtaggcaagttttgtacttggccgaaccacgagataaatcctcgtgtctcttgtgcttgtctttattgtgtttattgtgcttcacaagagctctcctctctactcacttgatttcattggtctaactcttaatcaagtttgtggtgctaagttttaagttttacaggatcacctattcacccccctctaggtgctctcaattggtatcagaggagttctcttcaaagaagggactaatcacccgaagagatggatcctaggggcaaggggatggtggtcaatgataaggagaaggagtccttcgtcaatgatccaaaggatgacaagcctaccgactcgggctctgatagtcgcctagagggggggtgaatagggcgaaactgaaat

SEQ ID NO: 56639 - DNA, 340 bp, Zea Mays
ctgactttggggctgcctgcccccatatataattgccctagggctaattctagtgaagtctcctccctgccttgagctctaacccagggaccactacagaggtgttgggatccttgtgttcctgctgaggttaactctcctcagcccctgggtttgtcttgttccagaaccctgcatgccatcccctgggtggtgaccaccggcagcagtttgtccacctcgccgtgaccaggtaacttcaagggtttcctcaggcgagttgtgcatatattgtgttctgtataagataaagaaactcatatgatggtaaaccattttccttaagtaggtttggtttggg

SEQ ID NO: 56640 - DNA, 1951 bp, Zea Mays
aagtttctttctttgaatcaatgtagtaatcactctgatcatgtacgaagtaaaatttttgtaacttgtaaaatttggtaataagatttccgctgcaaaatattggtgtgtgtgatttgtattacttaatcccgcggttctggttgtgagtggtttatccggggtccctgggacactcggacagatcctgttaagttatctggtgcacatgcatagtcgtctgaggtctttgagacaaggacaggtgcatgtgggcccaataacttgggaggttctgccacagctggtatcggagcgtagcccttctttgcagatattatgaggcatcttcaaaaggattttctaaaattcttacctagaaacttccttcctttcttacctaagtattctgaagagtttatcttaaaagaccagataggaagagtgcaacgtatagaaggatgaatcaactaaggttgattctgtatttacacatgcatcatgtcatacaaactttaaattaaaccccctatgtagctaccttgttcatacatttttagtaagtagagtgttccgttgctcttctctgaagatgaatcaacaagaagcccctaccggagttggagagtttctacgagattttggtgttccagtggtcctgtggcgactacttcaagaagtcggatatatcgaaacacccaagtaccagtggtcgcgcactgttcttagaggacaaccatggtatgaggtggtagtgcgtattccagaacgtgctagaaagccatcttggccacattggatgttccatgctgaaggaatgactccttgggaaggtgctcaagtagctgccttagaggcgctaacaaccatttgttaccagaaatgggaagaaatacaagccacatctatgaggttgttccctgcagttgccttaagtgacccatttgtgtatcatcaccaggcccgattaatggaaagcattcctattgggcaggattctgttgaatcggcatctgctcgagttttgatggccgtgctagagttgcaacttactcgagggcacagtcgtcaaaagtggcagcagttgtacactggaagttatgcagcatttaagatgatggaaatggccaagaatagggcttgtacccaggcacaagaacgacttgaggaaacaaaggttcaagcagaacaggttattggactaaagcatcaggtgacagaacttcagacgcaacaccaagctgatcagaatcgcattaaggcgcttgagcatcagctagctaatgctcattctaaatcaaaagttctgagtcagcaacaagaagaaattcgcttggatgctattgctgttagcgaagaccttaaggaaaccctaagcttcataagccatcaggatcaggcgatctaggaattgaatcgtgctcatccaatggaatttcaagtagcacaacggcttgtcaaccatctgctgcaaacagtgcataggctcaatgttgccttttatcctactcctgcatcagcggactaagggttacttggaagaatggcaacaagcatctggcagatggtgtagccagagaagatatagtaggcaactgggagcgtagtgaagtagatcaaggtagtaaggtaggtgtaagatagaccagcttggtaataaaaacaggttaaactttattggaaagagtttttcctgtttcccctgggtcatgtaacatatgagcttttctatgactatggtgtaagaaacgactgccggtttcagaggcagcttttaatatctatagtagtttgtcaaaattccaagagttaaaatggctattcctttggatattccctgtggatgcacgtgtgtggataaataacttgccacacgctggtgccataatttctggttgtgtttcgtgatgaaatggtaccaccgtgatttcccatatgcatctgttgaacgagaaatggacgaatggctagg

SEQ ID NO: 56641 - DNA, 451 bp, Zea Mays
aaagatgacaacacaacaccacgccgtgcacagacagtgctcccccgaaacgcgccagggtttgggtttctactgctgctgctgctcatccatccgcacagggcccgtccctccgcagttggaggaacgtgtttcccgcgtccgggtgggtcgggggcccgccggccctgtctgggtttgaaacacgactgccacgggggtccaatccaaatgaagcgtaaaaatgactggagcgaaaaatgccgtgagcacggcgcgtccgcagcactccagagagcgaaagcgcaaaaaaaaaaaaaaaagagccaagaggccgccggagaaacacgagcgagtatatagcgtgcgcttcgtcatcacccacgaccacgagcaaaacgaggccttgcctctcctcctccctctcccctctccgcctcttcggccgcgcggggacggacggacgcctact

SEQ ID NO: 56642 - DNA, 1591 bp, Zea Mays
gaacaatttcttgtatagataaaatttaccaattgcttgacgcattcatgttgaggcataatttttgtttgctaatgaattgtaaatattttatttattttattttatattctcttttattgcataaaatttatttattggatatattattattataattttcgaaatattttaaaacatatatttatctatatataacttacgttaaaaatgaaaataaaagaaagagaaaggaaaaaggaaatttagaaacaaaaagaaaaaaaaacaaaaccaatcttacgcccaagactttggcttcggatctagcccatcccgtacgccacctgcttttctatttctctccttgacacacgtcctcactccctctctctccctctcactctatggcaagtgggccctgcttgtaggattttcattccaagaaactagatcgcacgcagcagccgccgccctagcctcctgctcccttggccgccgccgccactctccctctcccagccgtttctttctccctccccctttctctctcttctcccctgctctttctcccaggcacccgcgcgccaggacgccgaagctgcgcgagccgcgcgcccagccccgtgccgcgcgaccccgctgccgagcgcgcctagctcgcagcgcgcgcgcgatttcgccgagcacccgccccgagccgcctctgcacgccaaccgagccgacgccgcgaccaagctcaagcatcgacgcgcagccacggaagccgaccgcgcccgcgtgctggacgcccgagctcctgcgccccgcgcgcagcgccctgttccgaccgagcgagcccgcgcgaccgaccgcgccaacaaccgagcagccgaaaccgcccgcgatcgtttccgcgttaatggtgattcaatgcgtttgtttctccccgttactccctctcctctatgaacgacattcatggtgccttgaagtcatggccggccacctccccgagcgtctcttactcttccctctctctataaaatggatgcccgagccctctcccttccctgtccaagcttttccccatcgctacctcgcccggacgtgttcgtcggccgccgtacgtcgttcgtcggagctcgtgccccgtcatccgctctcaaccccagccacctcgccccttcctccttctcgcagtggagcacgttccgtcgtccgcgccgtcgccgattcgctggaccatccactgccctgcagtgctcggaccgcccgtggagcctcgccggagcgtacctcgccgtccacgcagcacctctgccgagaccaccctgcccttcctcctgtacctgagcaaactcaagattgaagacaacccaagattgttgatgtattttctaaatcctgttttaaattactttatggatcttgtgatttatcgtggtattatcgatgcgattcacatgtatgattttagaggttcgatatatacgtgtaactaaaatcgaaccccgtgacaatattttgaaaatgcgtatgattttataattttaaaaatgagtacggtcactatttactaacttagtgattttcatactagaaatgtttacggatttgtttttactttag

SEQ ID NO: 56643 - DNA, 2106 bp, Zea Mays
caaaaaaatgttgccaaaggttgatcttcggtgcgtggatgtgggaaaagggttgtgggccgttggatgctaagtcggagtcatctgtggcgtcgcttcttttctcccgcaaagaaaaccctagtggtggccttttcccccttttgcccctgcttggccgccaaccctttcccccctccaacacttggccgcccctctctccttttcccttgggctggctgccctctcctcccatggtagcccctctccacggcttcctcctccctctagatcccccccgcgcagcaaggatcgagaagaggaggagcacattgagttgaaggggaagagaggatcaaggagatgttcttccccatctcttcttgcagaattttttggggaaaccctaggtatggatgagatccttgttcctccctgtaattatgtgcttttggaggttgtggatcatgggaattaagggattagaggttggattagatgtggggttaggttttgatctcgaatttagttttctgcaaaatggcagattcgacagtttctgttaatcccagttttccgtggtcttagaggcctccaaaaaataaaaagtctatatataagtcgtagataatttgtagatctttccgtggccacgaagaacacctcaatcggacatcagatcagagagttattgcagtttgattatagcagtttttcagtctcttaattctatacagaatctgttctcttaagatttaggcaattttatcaacagaattaaaccttaggtttgtaagaaaagatgtagataatttcataagctttccagattgttaaatagtgcattcatatgaattatgaaactccagttatgtttgttttactgtggctgtttctgttagcctgacagaaatgagcgggtctgttcactggtaggtttcatcaagtaaatggccgaattagctctcccagctatggagacttttgtagagggataaaagttcttactttcagcagaatttcatgatttttggttgagtagtttgtgagatatcgaattttgaaagttaactatgctgctgtctaaaacagagtcagtcagttatcttgttagatgttttagaacttatagatggcagaatttaattatccatcgaataccgaagttgtagaatattttgtgtagatactcatagagtatttgtttgatatcaccactgttataattttaaagatacaaaattaacaaacaacattgctgttgtatggcatgtggttcagagtgggaggttttccaccaggtcttggtttcaggtgtaggatcgatttgttgattgttggcaaatgtttgtgaaatatttgtactaagttttatgcccgctagcaggtggctacactccagatcatgcctagtacatttttcttcttcgatgaaggcaagtgaatgtagcgatggctgcttccgttctgacctgttatttctattgcctacactctaatattcagaagtattggattctttcataattggactctatggtgatgctttacttgcttgcgttatactgatgctcaatcatatattgatgattatgattcgagtatgactcatgatattaattcacacccctgaaggtaaatgaagtattatttgaggttggtattgtatctgaaggtaaatgaagtattatttgaggttgtattgtatgtgaaggaagtgaagtatattgataaatgcagcatgccatatacattgcatgattcacttgcatctgaagttgggtcgtgacctatggtccgaccgtaccggtacaacttagcatcgtacgttgcccgaggagggggtacaatgcggcttcatacccttagaggtacgaggcagaggacatattgtcggtgttttgggtccgaccgcacacccggggttgcccctcaaggtgtttttagtaggacggtgtcgacaacggtagcaaaatggttcgtgccgattgcacgaggaatagtggacaaggtttacaggttcgggccgcttagagatgcgtaacaccctacgtcctggtgagtatgcttggtgaatgtggttacaagagagctctctggattgagaatgcagagagttgatgtggg

SEQ ID NO: 56644 - DNA, 1674 bp, Zea Mays
gttaccactctatcaaggattggagcagcctcaatttgggacccgtgccgagcagctatgtcgaaagctgtgtcttcgtcgtctgacgattcttgctcggcgtagtctgctgctgtccactgtcccttcagcttgcacctagtcacacccgaataccaaatcaaatacctccggaagttgtagtttgtgtgcgcctggtcattctcatagttcagatccccctgctggtcccattcatcaatgtaatcacgatggtgcgtctcgaagtccgtgaccttcttctgtctctgtctgtcgaacctgcaaaagttagaaccatatattagcgactaactgatatttcaattattagttagaataacaagtgcatgtagtaactcacttatgaagttgtattgaagtcgagaatggctccaccggaaactcctggcgcaatccgaactgtcgagcaactctgtgggggcaagtggtactcaacagcataaaaacatatgaggggacacctcatgaggtagaggttctcgtctattgagcacatgctgctcaactgtatgctggcgaaatatggatcaagatacggttgccaagtcacctgcaaaagttttagaaagcccatgtaagcacgctggtgtcgtgtgataaaagtagaaaggacatgtaaaaagaaaaaaggagacaactgaccatcgaaggagtaagtgcgtcgagctcgtttgagtactccacgtaagcacgctggtgtcgtgtgaatggctcctcgacctggtcccagcggtaagcagccgtgggcttaagccgatgtccggctaccacgaaccactcacgaggaggaaactctctgggtcgcccgactggtatgtgtgcccacatccacagctgtagtaggtagacacatccacctaagctggccgtcctcgacgaacgacgacaagcctcgcaaagttgcctgtacaggaaggccaacactgctgaagcccagctgtaacctccggtcgtatcccagtcagtcaggcagggcagaaacatccatgacgcgctgtcgcctgttgagtctggaaaaagaactgaaccaaagagatggagaatccaagctcgacaatggtatccaaccgtctgctcatctgcaccaggtggacactgcccaaagctctgcctaagccaggtcagtgggactccggtgttgtggctacctcgtagctcatccggaagcagtctcccaagaaaggcctccaccctctgcctccaaccgcctggtgatgcctaaccggtcactggacgacccataatgctgagaccaagaatcttctggcaatcttcaagcgtcacagtcatctcaccgcagggaaggtggaaagtgtgagtctctggccgccacctattggaagacaaaagaatacaaaaatcattagtatgcaaagtagatttgataattgtaaatattaaacaactagagaagtctatacctgtcgaccagagccgtcaacgccgctgggttgaaagtgggcagcccacggcggacctggtacgataagacgtccaagccagccctctgtaggagaggagtgtacctctcatcgtacctcatctcctccagaaaccggtcgtgggtccggacccgcagaacgggcaacacctagcaatcaaaagatttttcattagtcaaatataggtcgc

SEQ ID NO: 56645 - DNA, 277 bp, Zea Mays
ttccctcagttgggtgtgcttaatgaactgttgggctccgggcaaccctaatttgttgggcctcggccaaccccacatgggctgggtgtatcatctggtatcagagctagggcccattttaagaaggtgggaatgatgaggacatcctccactattacccgttggcaaagacgcaattggcccagttggcccaattgtagtcggacgacgaccgtgtgaccctcagaattatcccacctcgcttaacttgggaggaggaagccactttaaaagggag

SEQ ID NO: 56646 - DNA, 472 bp, Zea Mays
aaattgaacaattttgcatagataaaattttatgaagtgtttgttatttacgtgcatttggaatgatttttgatttctcattattgattttagatattgaatagcattttctcttaaatgaaaattcacataactaatataataattattagtctaaaaataaatattttatttataaataattttggtttaattattatagattttagggttatttaaatatgtatttcgaaattagaaaagaaaatagaaaaaaaagaaaaagaaaaaaaagaaaaacctaaccctaaccgcctcagcccattaggcccattatccctaaccctaaacctgccgccgcccctggcttcccagccaccagccgcctttctctccctctctctcccctttcgtttctctctcctccctttcttcccagcagtacgcacgcgccaggagattccagccagccgccgagcgcgcccagtccgag

SEQ ID NO: 56647 - DNA, 396 bp, Zea Mays
attaattgtcagtaaaaaaatatttattttcaaatagttaaaatggagatataaataaattgaacaattttgcatagataaaattttatgaagtgtttgttatttacgtgcatttggaatgttttttgatttctcattattgattttagatattgaaaattcacataactaatataataattattagtctaaaaataaatattttatttataaataattttggtttaattattatagattttagggttatttaaatatgtatttcgaaattagaaaagaaaatagaaaaaaaagaaaaagaaaaaaaagaaaaacctaaccctaaccgcctcggcccattaggctcattatccctaaccctaaacctgccgccgcccctagcttcccagccaccag

SEQ ID NO: 56648 - DNA, 468 bp, Zea Mays
aaggattagaataaaacatgattttcagcaaggttgtaacaccccggggtccaccaacaccccggaatgctactaaacaacacttctgacatctatatataaaatttcggcagcatcccccttgcaaaattgcataaatgagggggcaacagtgtataaacatatgtcatgacaaaaacatactaagtattattaatcggctagcaaagagaagttaaacatacgacatgaagtgaattaactagtgcgcacgactagttaaaaaacaaacttcctttgacaataagtttctaattaaatcatggctgcgcctgggcaacgttattgtgagagtgaaagtggacgtgctgctactcccctcattcccaatatgtatcaagtacctgcattgagtaatgcaagagtgagatgacacatctcagcaagtaaaataatatcaaactgtttaaccacataagaacattgttt

SEQ ID NO: 56649 - DNA, 836 bp, Zea Mays
cacttcaatgaatgcatatgaatgcaatgcatatgtcctctgccttcatacctctaagggtatgaagccgcatcgtaccccttctcgggcaacgtacgatgctaagttgtaccggtacggtcggaccataggtcacgacaaaacttcatatgcaaatgagtcatgcaatgtatatggcatgctatatttatcaataaacttcacttccttcagatacaacacaaacctcaaataatacttcatttaccttcagatacaataccaacctcaaataatacttcatttaccttcaggggtgtgaattaatctcatgagtcatactcaaatcataatcatcatcaatatatgattgagcatcagtataatgcaagcaagtaaagcatctccatagagtccaattatgaaagaatctgatacttctgaatattagagtgtaggcgatagaaataacaggtcagaacggaagcaaccaccgctacattcacttgccttcatcgaagaagaagaaatgtactagacatgatctagagtgtagccacctgctagtgggcataaaacttagtacaaatatttcacaaacatttgccatcaatcaacaaaacactcctacacttgaaaccaagacccagtggaaagactcccaccctgaaccacatgctatacagcagcaacgctgtttgttaattttgtatctttaaaattaaaacagtggtgatatcaaacaaatactctaggagtatctacacaaaatactctacaacttcagtattcaatagataattaaattctgccatctacaagttctaaaacatctgacaagataactgactgaatct

SEQ ID NO: 56650 - DNA, 252 bp, Zea Mays
tttccctttctctttttttttcttttttttatccagcaagagaagccatggccagaccgacctggcaccccggaaggcccttaagacggcaccggactgcgcggccagcgccgcctcgggtcttgtcgttcagctgacccttccgcagggtgttccgctgcagggggctcgggtgtcgcccgtctctggggagcgggctcccaaggctggctcttctgccgaggcggccatcgtgataggagaggcggccga

SEQ ID NO: 56651 - DNA, 500 bp, Zea Mays
cgcttgggagagagcaaacgggcggtcggcgtcttcaaacgcccatcaacggcgtcggctcatggaggatagtaatggggagggaaaaacggacgcattgaatcaccaataacgcagaggaagacgaacggctgggcacgggcgtttctgtcgcgggcttcgggcgaggtcgcggctactgcgcagcgcgggtcggggcgtgggcgcggggcggtcggtcgggtcgggctcggcgcgcaggttcctggcacgggcgtgtcgaggccttgggcgggtggctcggtaggggcgacgcggctggggcgctgtcggcctggtcgagctcggacgctgcagggcgctcgaccgcggggtcgcgcggtcgcttggctcctgtcgcggcgagcgctgggagagagcaagggaggagagagaggaatgagtggaggacgcggggaggctgcaggggcttcggcacgcggggtacagggctggagtcctcggcgatttccttggcggcg

SEQ ID NO: 56652 - DNA, 1717 bp, Zea Mays
ccgagcttcgtcaccagccatttttcgcccgccgtttatccaaatatgggtcataaacctgttccctatgcttcgagctaagctagggatgtcaatcaaatctgctggcgacaaactgaagtttggtctattaacaattttcccgtgcgtgcagccagccttcaagaaagcagtagtcgtgcctcgagaagctagcagggcgcagaaatcggcatgcccagcgataacttcgtcaagtgcatcaacttcgccctcaatgtattcaaaggtgcctggcaggttttcagctgaaggtgtaaacttatcagagctggctccaattgagtaaaacacatccttcagccgctgcacgcatcggttgccgaaatctaaacatttttcctgaagctccttcaatgatttctgcaaatttgaattcttctcaatttcggtcttgagacttatttcaagattcttcttttcctgctcagatttttctgattttatgcgtaattcgctgtttaatttgtcaacttcggtttgagcttcagcctgtgaaccttccatagagtgaataacgaaatccttcttctccaaggcagcttcgtgatctttaactttattttcaaggtcttgaatgacgaagtcctttttcttcaaagcagcttcgtaactttcaactttactttctagatctttgatggtagcttcatttttctcgtcttcaagatcttgttccatccttagcactttacttagtaatagactctcgcaaaacaaccttcgtcagaaaaacaccttaattcaaaaaacaataaaaagttgagagtttttaccttgaaattagcatagagcaagctaccagcgatgtgctgtcgctggtacctgcagaggtccgcttcaatcttcggcaggccaacgttctttgaaaaagtcctaacaaccttggcctcggttcgattccgaaggcatcttagtttcccttcattgactctgccaaacagcagagcccctagtttgtacccacaggatacaacatatttctttagctcttctttttcagtctctgataactcttgtccgagtatatcttgaaaattgaagtttttctcttccaaagtatcttcaatttgctcttttcctttctcaattgtcgtgtccaccgcggccgcaacagctttttcctcagccatttttagaagtatgttatcaatatcaccaagtgtggtttctagattaggatcttcggcggtctcggtttcggctccgatggcttcggcttcggtggctgctctggtggcttcggctccggtggcttcggtttcggaagtgccagcactttcaataaatggtattttcgatgccgatgtcggtggtggtgtctgatgaatgacatcggccacttggataattctccgttttttcggcttagcaggactttctgttgccgaaggttctttttccttctgaaaaaacttcatcagttctggtgccagcggacttagcttgataggcaaaggttcagtcattacctttagaatctcttccacttcgacagcagaaggtgtcgcatgagcttcttcctcttggcccgaaatctttggttttggggatgcagcttttcttttctttggagcagctatcttcggctcagggctcggttttcttttctcagaaatttctttatcctttttagccaatttggtaccctctttgtcaaggacgctggcaatccttt

SEQ ID NO: 56653 - DNA, 468 bp, Zea Mays
caattgtgtccaaccactcttggcagggtgctttaaaatgttttttaaacttgtagtgataaggcaatcgaataagttctcccttcttcttttctccctctagcttcggcatctcccactccctcagcgttgggaacattctaaaagccaaaaattcctgcactaagtctctagtgccaatatgatctgaaatcactcgaaattcagccaaagcaatctgactcgggctccccattaccatgttgcatcgggcctcgtctctccgaaggtcaattctagcggactctggaccaatttatcttcatcttcatcaactttaacataaaaccattcaaacttccatccggctggccatttgcttcggtagcttatcactggaaacttcatagtcttgcgataagcaaagttgtagtagccaaaattctcgtgcagaccatctcctctggctttagtctggtagtgtaattc

SEQ ID NO: 56654 - DNA, 300 bp, Zea Mays
gcacaccctagcaatgagctgaagatgccaaatgagcccttaatttaattgcatttcagttagaagggattgattatggagagaccacgactatttttgtttctccttaacttatacctagtattaaggaggcaaaatttctctctagacattccattcttttcattcaccactatgtaactatccgcgaagtagagagtttacttttcaaactacactactcacgcccttctagtgtctcgtatgtgatcctgattcgtgatccatactcatacgaattggaataacttatatctaccg

SEQ ID NO: 56655 - DNA, 6812 bp, Zea Mays
ccccctcccacacttggccgcccctccctcctttccccttgggctggccgtcctctcctcccatggcagcccctctccacgtcttcctccctctagatctcccccctgcgcagcaaggatcaagaagaggaggagcatgttgaattgaaggggaagagaggatcaaggagatgttcttccccatctcttcttgcagaatttcttggtgaaaccctaggtatggatgagatccttgttcctccctgtaattatgtgcttttggaggttgtggatcatgggaattaaaggattagaggttggattagatgtggggttaggttttgatctcgaatttagttttctgcagattggcagattcgacagtttctgttcatgccagttttccgtggtcttagtggcctcaaaaaaataaaatgtctatatatgagtcgtagataatttgtagatctttcggtggccgcgaagaacacctcaatcgaacatcagatcagagagttattgcagtttgattatagcagtttttcagtctcttaattctgtgcagaatctgttctcttaaggtttaggcaattttatcaacagaattaaaccttaggtttgtaagagaagctgtagataattttataagctttccagattgttaaagagtgcattcatatgaattatgaaactccagttatgtttgttttactgtggctgtttctgttggcctgacagaaatgagcgggtctgttcactggtaggtttcattaggtaaatggccgaattggctctcccagctatggagacttttgtagagggataaaagttcttacttcaagcagaatttcatgatttttggttgagtagtttgtgagatatcgaattttgaaagttaactatgctgctgtctaaaacagattcagtcagttatcttgtcagatgttttagaacttatagatggcagaatttaattatccatcgaatgccgaagttgtagagtattttgtgtagatactcctagaatatttgtttgatatcaccactgttataattttaaagatacaaaattaacaaacagcgttgctgttgtatggcatgtggttcggagtgggaggttttccaccaggtctttgtttcaggtgtaggagcgatttgttgattgttggcaaatgtttgtgaaatatttgtactaagttttatgcttgctagcatgtggttacactccagatcatgcctagtatatttttcttcttcgataaaggcaagtgaatgtagcggtggttgctaccgttttgacttattatttttaacgcctacactctaagattcagaattattgaaattctttcataattgaactctatgttgatgttgtacttgattgtattatattgatgctcaatcatatattgaggatgattatggttcgagtatgacccatgagattaattcacgtatctgaaggcagatgaagtattatttgaggtttgtatagtatctgaaggaaggtaaaatattatttgaggtttgtattgtatctgaaggaagatgaagtattgtttgaggtttgtattgtatgtgaaggaagtgaagtatattgataaatgcagcatgccatatgcattgcatgattcatttgcatctgaagttttgtcgtgacttatggtccgaccgtaccggtacaacttagcatcgtacgttgcccgaggaggggtacgatgcggcttcatacccttagaggtatgaaggcagaggacatatgcattgcattcatatgcattcattgaagtgatatttgcagatgatgtggttttataccctcagagttgtgaagacagagtacctacactttgcactcctatgcatacatagaagtgatatttgtaggttttgttgacgcagggaagtgttatagaacctatcatggttgttcgaggaaatcagatggtattggttatattgggactactgagttctttatctacaagtatttctgatcttaattgtgattcttttaaaatgttgattaattcaatttgtggcttaaatatctcgtcaaaacaattcgcttgctgagatgtttcatctcactcttgcattactcaatgcaggtgcttgttgctcatccagggaagtgggaagtagcagcacatccaccttcactctcataataacgctgcttaggcgcagtcatgatttaattagaagcttcttgtcaaaggatgtttgtttctaactagttgtgcgtactagttaatttagttcatgccgttatggttgttttctcattgctagcagattattaatgtcgattacgttttcttatcatgatatctattcatactttgttgcttccctgtttatacaattttcaaaggagatgctgtcgaaattttatatacgaatgttagaagtgtagtttagtagcattctggggtgtttgtggatcccggggtgttacagttggtatcaaagcataggctttagattcttggcaatttgaagataaatttgacacacttgcacatataggaagggtatgggttcaaatatctttgatatatattaatgtctttgaagtgcagatgacaataacatcacccctccctattcctttacggtgatgtggtaagttgtttatggctttgcttgatataatttatttctgaaattttgatattgttttattaatgctgtagatatcactagtcatttgtgagaatgaagttgttattatgcttgtgatatacaagtatgcctatgttgttttcaccatgtttttcatggttgagttttattacaataatattgttatatatgcttgattgaggatgtttctaagaggagtgtgaattgcgtgttttggggtacaaggtaatcatcaatttgaatttaagttgttgagcagttggtggatagctccaactatatttgcaaagaatgattgtttatgttgagaaaccagttctgaaagaaatgaatattggtacttttatatggatttttgggggaagtctttacatagccaaaatggcttacatgtctctcttctatcgtgtgttttagtagccacaaagcctagatatggtttaaagtggttgcatgttagtcatgctaattgtagaataaatctttgatttttcttgatccattgattatgtattaatacattgaggatttgatggttctcttcccgatgcatgtttgtgaagccattgtcagaacacttatctattggtttgaatgaagttattgcctagcctaaagtttgttgtgtgtggttagtcacctattcctaaatgatgtggtttttacatcagcttgggatgtttgccaaatgtatgaaggattatggggttagtattgaccctttatgtttggtactctgaatgcatcatatgatagagtgaaatgtaagtttctgaactacaatagatgaagacttatattatgtgtaggttaaccttactagttggatatttttcttagttgagatgttgaatgaagtatagtgacatgggttaagcatgtattgtgttgttgttgggctgtcaatgctatatgtagagtttttggcatttcttcgatgaattgtgccgcacaagtttttgttggcttcttgtcggctttattgctccattagttctctagattttctcccttttggtggggtgcaaagtaagttagattacatgattatcttttcattatggcaagaacaaagtttaggaagattaggagttttgtttcaatagaactacttgtttcgtggtgctgtgagttgaggtgtttgatcttcttatacattcatctggtgtggatgtttcaccattgaattaaaatgaattgttgaagttggtaaaggttgtacttagtgcatattatgccttcataaaagagtgtcgttttaagacattgatgttgttgtatggctgcatccaatttcgatgttgtgaaatcatagtgttgattgcatctatgacttggtttgagcatcattacatgttggtgcatgcttgatgtcaggttgtgtagtttccttagacaattagtccaaggtagaagttcatgtgttaattaagaccaaaaatagacccatgttttggaatggtggtgctatatggggtaccttggatgttttgtttggagtggacgaattcgaggacgaattctttttaaggggggtagagtgtaatatcccaaaaaaattgttgccaaaggttgatcttcggtgcgtggatgtgggaaaagggttgtgggccgttggatgctaaatcggagtcatctgtggtgtcgcttcttttctcccacaaagaaaaccctagtagtggccttttcccccttttgcccctacttggccgccacccctttccccccccccctcccacacttggccgcccctccctcctttccccttgggctggccgtcctctccttcccatgccagcccctctccacggcttcctccctctagatctccccccctgcgcagcaaggatcgagaagaggaggagcacgttgaattgaaggggaagagaggatcaaggagatgtcttccccatctcttcttgcagaatttcttggagaaaccctaggtatggatgagatccttgttcctccctgtaattatgtgcttttggaggttgtggatcatgggaattaaaggattagaggttggattagatgtggggttaggttttgatctcgaatttagttttctgcagattggcagattcgacagtttctgttcatgccagttttccgtggtcttagtggcctcaaaaaaataaaatgtctatatatgagtcgtagataatttgtagatctttccgtggccgcgaagaacacctcaatcggacatcagatcagagagttattacagtttgattatagcagtttttcagtctcttaattctgtgcagaatttgttctcttaaggtttaggcaattttatcaatagaattaaaccttgggtttgtaagagaagctgtagataattttataagctttccagattgttaaagagtgcattcatatgaattatgaaactccagttatgtttgttttactgtggctgtttctgttggcctgacagaaatgagcgggtctgttcactggtaggtttcattaggtaaatggccgaattggctctcccagctatggagacttttgttgagggataaaagttcttacttccagcagaatttcatgatttttggttgagtagtttgtgagatatcgaattttgaaagttaattatgctgctgtctaaaacagatttagtcagttatcttgtcagatgttttagaacttatagatggcagaatttaattatccatcgaatgccgaagttgtagagtattttgtgtagatactcctagagtatttatttgatatcaccactgttataattttaaagatacaaaattaacaaacagcgttgctgttgtatggcatgtggttcggagtgggaggttttccaccaggtctttgtttcaggtgtaggagcgatttgttgattgttggcaaatgtttgtgaaatatttgtactaagttttatgcttgctagcatgtggctatactccagatcatgcctagtatatttttcttcttcgataaaggcaagtgaatgtagcggtggttgctaccgttttgacttgttatttttaacgcctacactctaagattcagaattattgaaattctttcataattgaactctatgttgatgttgtacttgattgtattatattgatgctcaatcatatattgaggatgattatggttcgagtatgacccatgagattaattcacgtatctgaaggcagatgaagtattatttgaggtttgtatagtatctgaaggaaggtaaaatattatttgaggtttgtattgtatctgaaggaagatgaagtattgtttgaggtttgtattgtatgtgaaggaagtgaagtatattgataaatgcagcatgccatatgcattgcatgattcatttgcatctgaagttttgtcgtgacttatggtccgaccgtaccggtacaacttagcatcgtacgttgcccgaggaggggtacgatgcggcttcatacccttagaggtatgaaggcagaggacatatgcattgcattcatatgcattcattgaagtgatatttgcagatgatgtggttttataccctcagagttgtgaagacagagtacctacactttgcactcctatgcatacatagaagtgatatttgtaggttttgttgacgcagggaagtgttatagaacctatcatggttgttcgaggaaatcagatggtattggttatattgggactactgagttctttatctacaagtatttctgatcttaattgtgattcttttaaaatgttgattaattcaatttgtggcttaaatatctcgtcaaaacaattcgcttgttgagatgtttcatctcactcttgcattactcaatgcaggtgcttgttgctcatccagggaagtgggaagtagcagcacatccaccttcactctcataataacgctgcttaggcgcagtcatgatttaattagaagcttcttgtcaaaggatgtttgtttctaactagttgtgcgtactagttaatttagttcatgccgttatggttgttttctcattgctagcagattattaatgtcgattatgttttcttatcatgatatctattcatactttgttgcttccctatttatgcaattttcaaaggagatgctgtcgaaattttatatacgaatgttagaagtgtagtttagtagcattctggggtgtttgtggatcccggggtgttacagaatgact

SEQ ID NO: 56656 - DNA, 407 bp, Zea Mays
cgcagagagagatgtaattattagagaagagatgatggcacaagggacacgcatccgatgacacgaacaataaaccggcctgcctgcctcgtccactgcacgcacacgcaccatgtgactggcctccggccgcgctgtcgcctgtcgcgttgccatcgctgacatggcggcaataatgcacgcccgtgctgacatggcagcaataatgcatgtcatgccatggcacgccgagtcagtcgctggcctcaagttgcagcgttggatatacgtaccagccagccagccaggcaggtcgtcaggagaacggataaaatgacgggcggtgggtggtggatccatcacaggctcacacctcacagcaaaagggtagccggccagctggcctctaacctcaagcaaactaaagc

SEQ ID NO: 56657 - DNA, 154 bp, Zea Mays
ccccaagcatgatgacactattaactcccttctttttgtctttgtggaccttagaacacaccccagcccaccaatcagcaaaggaggactccgtcgatcttggaatgagatgaccaaacctaaagggagacaaaatgttgtaccaaaattggtg

SEQ ID NO: 56658 - DNA, 339 bp, Zea Mays
cgatgtgtgatggcgcggtcacggtgccgaggttggcgacgtcgtccttgagtgaggcgttgaactcgatgagcgcagcggcgtaggcggagtcgatggccgacgttcgaactccgacatgcagtgagcctaggcgatttggcaaggtggaggtctggtcggcaagatggaggtctggccttccacggacagtgatgagctcaatggtgcagcagatatgaagaggcaattttctttttccttttcatccttccatgggagcatcggccatgggaaaaatagaaaaaaatagaaagtaacatatgcattttaagtacaatataaaaaatttatattcta

SEQ ID NO: 56659 - DNA, 381 bp, Zea Mays
cttgaccgggcgcgatgcagggaagcttcagggcgctgcaagcagaggggaggaacgccggcgagctcggcgagctgcgcgcaggggagttgggcgccgagcagagggcagtgagatgggaactcgaccgtgggagagagagagcgagctgcagataggagcggccatggcaggaaggggaagagcgcgcgtgggacagggaaaggggcgcgctgccatgggcgatctggagagagctccagccatggagtgagatggggcgagcatagggaggaacggctggtgtctggtgagcgagctgggggaggaagagcagggaacggacatggagaggcaagctgcacggctgggagaagcgctcggctggagaaatgggaagcc

SEQ ID NO: 56660 - DNA, 617 bp, Zea Mays
ttttctgtttctagcacttagacaaaatatgttagtactcaaaacaatgtactaagtctagaaacatacctcatgtcttgatttgcacttttctcttcatttagcacataagaacttaattaaatgtgttgggcacttaatcaccaaaacataatagaaattgcccaagggcacatttcccttttaatctccccctttttggtgatttatgccaacacatacaaaagcaaccaaaagaagtgcaacatcaatgcaattgagaacaaaattgtctttgcacaagttttgacatatttggatcattctttgccaccacttggtttgtttttgcaaatcaaattcattttcctatctctaattcaaactcacttgtttgggcataaagagagataatccaagaatgaaattgatcaagagccaaaaactccccctttttcccataatcaaaattttcccccttaagagaccaaattttgcaattatagagtattttgacaaatcaaaagttctaactctattgttttcaaaattcacaagtggtagctgatccatttgctttggccttaatttctccccctttggcattaatcaccaaaacgggatcattcttggccttt

SEQ ID NO: 56661 - DNA, 249 bp, Zea Mays
cacaaaaaggtcaccatcacaagtcttagtgaaaatagtgggatcggctttcccaaccttgagagcattagcaattaagaaatctctaaggcattcataccatgctcttggggcttgcttaagtccatagagcgccttagagagcttgaacacatggttgaggtacctgtcatcctcaaagcccaggtggttgttccacgtacacctcctccttgattagcccgttcaggaaagcgctcttcacatcca

SEQ ID NO: 56662 - DNA, 2151 bp, Zea Mays
aaattgcataaatgagggggggggggcaacggtgtataaacatatatcatgacaaaaacatactaaatattattaatcggctagcaaagagaagttaaacatacgacatgaactgaattaactagtgcgcacgactagttaaaagaaacaaacttcctttgacaataaatttttaattaaatcatggctgcgcctgggctgtgttattgtgagagtgaaagtggacatgctgctactcccctcattcccaacatgtatcaagtacctgcattgagtaatgcaagagtgagatgacacatctcagcaagtaaaataatatcaaactgtttaaccacataagaacattgttttaccaccacttgattccacaactttcttattacgacggtgcaacacgtatacaacgtacaacgtacaacacacctagtcaccacacctcgcaggtagaaaccacaataggaatatagtaatgtcacacttcatatatacctcatgagtgcaaatgtctgcaaatgcaaggatgacttctgccttcatacctctaaggatatgaagccgcatcgtacccctcctcgggcaacgtacgatgctaaaaatgtaccggtacggtcggaccatgttgggggccttcggcttacgaaggtcctcaaaaacaggatttaacagtatttctggagtataatgtgtgaacaggtatcttcggactcaagtcggaatcgcagcggatcagaataatacgaaggttgatacagcgccgaaggtgtaagcaggaaagcttcggcatggtggcaaagaaaaaatgaaaccgacttaaagatgaaaaggctattcagacctcgatagattactatagaattattatcaaatgtaaagggcataaatgtaattttgtataggctgtgtgctatgcctataaataggtgaacaatacccttgtactgttcacgctgattaggcattcgcttttgcgtcacgcttgtactttcatctccttcaagttgaaggtacatttgtaatccaacgttatttctgtttatacataataataatatataattgtctatgttgtcctttatattccttacgattcaaccttcgttattgtatgatgtatttatgaaggtacgcccttcataaccttcatccgaaaaccattatatcctgagggaaataatgcttcgaaggacgaaggattaacattttctatgttgccttgttcttaactcatagcatttgagagcaagtcaccaacattggcgcccacctccggtgaactcacttccactctttgagttttttgaacaccttcggcgatcataaaccttcgctatggcgccgaagaaagcttcagcgactgggactgcagctctgcaaccgctggaccacaatcaggagacagtctcccttcgggaagcacgaagccagaaaaggaaggctgtcagcccgacaccacccgaggacgagatagatcaagaaatcagagacatggagatgcttcatcaacaggtgcagaggaagaaagaaaagatggccaggctagctgaactgcaaaggcagatagacgaagcctctgaagaagttcgtcatcttgctcagaatgagcagcaccgaaggcctcagcaccaagaccttcatcaggagggtttcctcaacgaagatgactggtatgataatttccatcatgggaattttgttttcgatgatgcttctcctctgtccgctgagttgcaggctacaccttggcctccatcctacaagccgcctcagcttcccgtattcgatggccactcagacccgaagcagtttttgatgagctacgaagcaacagtatcttcgtatggtggcaatgctgcagtcatggccaaaatgcaagatgtgagatggatgatgcgatgtgcatgtcatgcctacaacacttcatataacgtgattcaaaaaagatacttcaacttcatccaagatgggaatcaaccacatatatcataatcaaattatgatcatccacaatattagacaattgagaattaatacttccaaacaaataaacttcatcatagaattcaatgattaacataattaaaacttatgcatactcaatgacagggaataggatgcaaaccaaacggtagcaaccaccactatatttacttg

SEQ ID NO: 56663 - DNA, 1206 bp, Zea Mays
ctcccactgatccccactaatttcccacgaaaaattcccagaaatccctagaactactgctgttcgccctcgcacaaaaattctggacaacacctctaccgattcgcatagataaacatataatcaattgaattttagcgcaaaaacatagataacttcaagatcaccttgagttccacctttttcctccttccttcctcccaccaattctccaattgaaacttgcacccacacgaagaagatccgacgaggaagaacgacacttggagaagaggagatggggggtggcggctagggttgaggagatggctgctgcaaaaaaacttgagaatggagagggggcggctgcagcacttggggaagagagaagagggaagaggggggagggtgacggccaaaggagggaaggggggcggctgcccacaaggggccttaagagagggggcggctagggttttggggggaaaagtgggcttcccaccgccggatcgcgatcaacggcccaaaaccattcctacgacagagctctcgacccccgcgcacacatcaaacataaatttactgttttacagatgtttacctcctaaaattccaaaccccccatagcacgggtcccgcaagagaaaacaaagaaaaaaagagtaaacttcaatttctcttctttttgaaaattgggtatcacactctaccccccttaaaaagaattcgacctcgaattccgatgcttctaacggaacgacaaaggaaagattaatgaaccaacaaaactcacacataaagaaaagttcgggtacttctaccgcatcagctcctcaagctcctaggattctaagatatgcagcagacgacactctagagtttggtcttgctacacaggaatcggctctagctcgatttgatggtccggattctgcaaatacttcctccacataaagacatggaatacatggtgtactctaatcatagatttcgacaattgcatatgctaatcccaactgccaactcggctaaaatagtagacggtcctatatacctcggacaaagctttcctgacaccaaatcaatcattgacatatgcaagtacttcaaggaatgtatatatgaatgcactgcatatagtattcctatagcctaaaccaaacttagccaaacaagagcaacttcaagagagtaacttaatgcttgcatatttctggatagcagcac

SEQ ID NO: 56664 - DNA, 291 bp, Zea Mays
caaaaacatactaagtattattaatcggctagcaaagagaagttaaacatacgacatgaactgaattaactagtgcgcacgactagttaaaagaaacaaacttcctttgacaataaatttttaattaaatcatggctgcgcctgggctgcgttattgtgagagtgaaagtggacgtgctgctactcccctcattcccaacatgtatcaagtacctgtattgagtaatgcaagagtgagatgacacatctcagcaagtaaaataatatcaaactgtttaaccacataagaac

SEQ ID NO: 56665 - DNA, 92 bp, Zea Mays
ctatcgtcttttgtttaggcagtataccgatgcctgatgctggtggttatgatctgccctcattgtacccagatggcttcaaaggcgtccat

SEQ ID NO: 56666 - DNA, 556 bp, Zea Mays
ctccgacctccctccctggctttcctcgaactcgcgcacaacctgctcgccggcgttcggaccgcgtgaatggatcctctgctcggctccctgcgcgcgttctccttccccaacgccgctctctcccccagcgcgtctctctgatgcccagcgacggccacaactttttttttgtcaagctccctcccatagcagccactcgtccgtctccctgatgctcgccacgcctagccgagttcacccctgcgtgcagccgtgggtttcgctgcgcaacgttcctgctccccggcctccgtcgtgctcggcagcaagtaatttatgtcgaagcagcagctgcggtcccttgcgtcgtgctcgccagatcaagtctcacgtcgtcaatctgcatagtttctgtttggctatcggttccgcctacgtcgatcacctaattgctatggatagtgtatcgacgccccattacaacagccccgtcgtaaaactctagtgcttgtcgttgatatccggtcgtctccaacctttgtcttgtcgtcgttgttcggtcaccccgtctcga

SEQ ID NO: 56667 - DNA, 50 bp, Zea Mays
gcatatatctactcggctagctcatctgctagctgctgctttcctctttg

SEQ ID NO: 56668 - DNA, 202 bp, Zea Mays
gacgagtagagcctccgtgttgctgcgcgcgcgcggttgacgggcctgtgggccgagtgggccagaaatggcccattacttggtgaggttgttttttctgttcttttccttttctttcttttttttctcttcttttctttttctcttcttttttcactttgtctttcatatttcaaattcaatttaggtaagggtgttaaat

SEQ ID NO: 56669 - DNA, 437 bp, Zea Mays
aaaatttcggcagcatcccccttgcaaaattgcataaatgagggggcgacagtgtataaacatatatcatgacaaaaatatactaagtattattaatcggctagcaaagagaagttaaacatacgacatgaagtgaattaactagtgcgcacgactagttaaaaaaacaaacttcctttgacaataagtttctaattaaatcatggctgcgcctgggcagcattattgtgagagtgaaagtgaacgtgctgctactcccctcattcccaacatgtatcaagtacctgcattgagtaatgcaagagtgagatgacacatctcagcaagtaaaataatatcaaactgtttaaccacataagaacattgttttaccaccacttgattccacaaccttcttattacgaaggtgcagcacgtatacaacatacaacacacct

SEQ ID NO: 56670 - DNA, 538 bp, Zea Mays
aactgctaatactactgctgttcacccacctgaaaaatctgttttttggacagcaacataaccggattcaaacaacgatatctcctaaattataactccaaatcgagcgcataagtactcgttggaaaggtatgacaaagctctacatgattctcctactgatctctactaattgcccacgaaaaattcccagaaatccctagaactactgctgttcgtccacccactaaatttctggacagcacctctaccaaatcgcataggtaaacatgtaaccaattggattgcagcacaaatacaacaaaatgatcacaaaaatcaccttgggttcctcctttcctccttcttttcttccttcttcctccctccaatctcccatggaagactcgcacctacacgacggacaccaagcggggaggctccaccttggagaggaagaggggggggggctagggttgaggggtggcgctgcaatcacatggggaagaaggagagggattggggcggctgcaagagtggaagagagatgggaggggcg

SEQ ID NO: 56671 - DNA, 3544 bp, Zea Mays
gtcgaattgtgtggcagaacctcccaagttattgggcccacatgcacctgtccttgtatcaaagacctcagactactatgcatgtgcaccatataaattaacaggatccgtccgagtgccccaaggaccccggataaaccacgaacaaccaggatcgcaagattaagtaacacaaatcacacaccaacatttttggagcggaaaatcttattaccaaattttacaagttacaacaagtttacattgtatttatcggagtgattacaaaagtggttcaaaggaataactttgagatgttataaattatttgtaagtttgaaatatatgctagcttaagtgaccatcctcaataagaagtatagaagaattacttagacttataagaaggccgagcccaccggcactttacaccatcaacagcagcagaaagttagaacctgaaaaacaacaaggaataaaaccctgagtatggaattactcagcaagacttacccgactaaagaaaagactctcaagggtatgctggctagagggattcaaggtatggcttatcaagaatcaaagactctgttttgcagaaaagcttactatgagtggatccatagaaatccaattttactagtaatgttaagtaaaattacctgcatctagagttctttctaccctagttcaatcacttgacctatactagccaatttcttatcaacccttcatcttcactggattgctacgtgtaagtcagtgaccaagtcttcatatccgcgaagttacggcgatccgaatcgattatactcagctgaggatctccgatcacacgacatatgtagcacttaacccttgcatatgtcaactcgccaccggggttcttaagaccagatcaggttcacgccaaccgagatcacagatacaccactgtctagcctcttgccacggagggtacacgctactctcgctatctctccactcccattgcgtgttatcatattctggtattagtctgcccgaggcaaagcttacccatgacgaggcatgtgaccagttaaagggtcctcggtcagcaggcccacatcgacacggtccttaatcgactcagatgaagacactacaccgagactcccttcttgtgcaagtcaaccgcccggtctcagctttattattttcaacccaaagtttggtacctggcagaggtacatcttttccgatgttgaacccatcaaggcctttgacagatccaccatcaagttttatttttgaaaacattcccacccactgaagcatcacctttgttttaaaacaaaacatttttgtatgctaaagcaaggctaagcatcataaaattcttttgggtatcaaggaagggaaatcaattttcaaggaaggaaatgcatcaacggtttagcacacaactcctatcacctaatgcatcaaacaaggtgataaagattttaaaacatcaaggaggtggcgaatgcaccggggcttgcctgaataacactaggttagtgttgttaggtgacatccacttgacgaccatcctttgtcctagcacttgatcaggttatccatcttccggttcgtccatcagcatcaccatgcggattagcccgcgcttggggtcgacttggcttgtcttccgcatcacgcgattaattatcgtacctaattgaaatgcattatgcacatgaatgcaaataaggaacaataacaccagatattacgatgctacgcaaaagagaaataacctacttaatgacgagacattgtggacactaattatcgatatattgttacttacggcaatcatgctcttacaacctagctaaacagtcgaggtagcaatcaacatacattccaattatgaaagtgactaacacacatagaatattatacctagtttagagagcacactaaacgacttataactttaacttcacaagtcttggacacctaatacttataaaatttgataaaagaacttttattaactttctaaactaatttaccggttaacttgtgtatcatatatattagtaaaacttcccatttttaacatctacagtcccgcaaacactgagacctattgagatctcattcatcctacaacatcgaccaaattaccaaaacgactcaggcaatctaataaatattatacctagtcagaccatccatcaatccactaacacgaataacaaatttacttaccctgactaattcgacgcgatagtcggaagttcgatgacggttttcggttgacgtcattgaccacacacgtctcgcgagcgatgtacacaatttctattcttgacctgatacccatgggatttctttttgtcgagctggtgacgcgtggccagcaccagagtgtcttcatggcttggggcttggcgtagacgaggatgacgctcgacgacttgttcgagcttttgttgagtacttggtgaatatcaccctgctagcttcatcttcacctaattcttaggatttttttgatgacacgtggaacgacgacgaccttcgattgaagtctggagcgggctggtgaggtgggggtcgagcaggggatgacgggttcaatgactcgactgtgaacgacgcaacgacgagctggggcaggatccgagctaataggcacagtatgggacagcgaccagcacaatggatgaactaagtcgcggcgaggtcgacgatgtgatagggattaaggccgagcgagccgacatggcgcgctggcgagcaggaaaccacgcgagcactgaacaggaaaaacgacgataccgtcgcacaccgtgcgaagacgaacgacgtgtcgacgaggacctaggatgtgcgacacacgacacgcagtcagcctgtcgcacgaccgagcgatgacgacgaacagccgagtgcggtaaggagctggagaacgacgacgggccaagcagaggagctcgcgcgcgcacagtgaagaactcacggccactagaacgaggtgtgatattcggacttgacgacaacagcgagctagagcattggcgagcttgagagattaatggcgggaatcggcggcagccaacgccaaagcgcacggcaagggaacttcgacgacgagcagagagcttcgcgcgcacaacagaggagctcgacaacacgcagcaggggcaaacgcagtccgagcaggggcgcgagctgcgcgcaggcacgcgcgcaggggacttcggctgggcgcgcgcagggaaaaacaccagagagacgcggctgcgctccatgggaacaggaagctcgcgacccgcgtgaggagcttgcaggggacctgttgacgcctttttggagcgccaaatactcaagaagaaccggcggcggtgctctctggtcaggcgtggacggtccgtggcctagggccggacggtccgcgacctggcgcagggctcgggtcctctacctgacgaccggacggtccgcgccatggggccggacggcccgcgcatgcgcaggggcggcggaagtcgtcgtcggcgacctgaatctcgctctcgggagggaccccgtcggggaagagagatcc

SEQ ID NO: 56672 - DNA, 671 bp, Zea Mays
caacggcttcagtccatttggtgaaatagtcagtggcaactaacacaaatcgatgcccctttgatgatgaaggatgaatttctccaataaagtctaatccccatcctctgaacggccaaggcttgatgataggatgtaattcggctgcagggaccaactgtaggtcgccgaatttttgacacacttggcaacccttgtagtacttgaaacaatcagctatcatactagggcaataaaaaccagaccttcgcaacaaccacttcatctttggagctgattgatgagtaccacaaattccttcatgttcttcggccatggctaatatagcatcatctgggcccaagcacttaagcaggacgccattgactgttcggcggtaaagttcatcactcatcaaaacatacttgaaagctgttcgccgaatgttcttatctgtcctgatattgggattccgtaaataattaagtataggtgtcctccaatcacttgcatcgacttcattgtcagccgaatcaattaagagaacatttctggtaaccccggacggtccggcgtcatcacgcggacggtccgcgacctgggaatttggctctgcactagttatcagattttcagttttgtgaaatttccctctctttatccgataacctgatgcatcttgtgccaaatcg

SEQ ID NO: 56673 - DNA, 428 bp, Zea Mays
gcttaatccaggcatctcagtgtaattctaagcaaagcaatctgaatattccttcaatagaccgatcatctcatctctaggatcggtctctagggtcttgtttacaaaagtcggccttggagttttaccatctcctacgtcaatctcctccaaaggatcggccgacgtaaacccctatcctagtttatcaagatctctgaattcctctatcatgttccccacagaggaattagaagatctttgtgtgacggcggactttccggtctcggggatcggatcatccgtaatactgtccttttgctgtgatatatgttcggtcttaaagtccgaacccttttgtgaaagaccagaccatccggccttggaagtcgaactgtccgtgaccagagactcatgaactttgtgtgtattcattatttaaactttat

SEQ ID NO: 56674 - DNA, 296 bp, Zea Mays
ctgattcatcatctgagctactttggtcgcattctactatatgtacgttgtgacggcttgttttagcagtttctttgctccggctttcgcaagccaaagctctctggtgtaactgtgctagtgtaaaaaattggatgtcttctaatctttattttaaataatatcgtaaaccattaaagcctaatcctactagctgtttttctgctaaatgaatttgaaagcatcggtttcttgtatctcggaatctccggatgtaatcattaacccattcatctttcgtctgtcgcaatgatact

SEQ ID NO: 56675 - DNA, 136 bp, Zea Mays
atgcaaacgcggttcctgttagcgataatgaaaataaacgcacatgaaatgcctctgtgtcggccaattctcccaattgtgctaagaactggctgtgggggatagatatcccccgggtccactaaaggagtaaaag

SEQ ID NO: 56676 - DNA, 953 bp, Zea Mays
gctaaatccatgcttccaagtgacgtttatccagcaacgaaagccattaccatttccctccacacaaatgttgcttaaggccaaggccaatccttcaccaactgcccctactgtctgttcctcttggtgatgtgcgttccctaatcattctccttttgtgtgtgtctaccagctgcccacgtataccaccatccatttcttttctttttttttttactctgctgtgcctttcagtacctaggcactatgcgttcttgctccttttttttctttgttctctcttctagtgtaacgacttaactgccactgcgtttaggtgaacatttatgcagcgtacaagttgctactactcttactacttaggctcggtttgttttagtttttttttagcttctggccactataatctgtcgcggacttcttaacgttcggtcttttttggcccttttttttaaactcgcttttatgaaaaccattcaaaatcaacgtgaacatacaatcgatccagtggtcgtgatagtctgttttctagatcctaaaccttatgcaccacttcatattcctccttcacggtatctagattcttccaacagccgatttttttttaaaaaaaactggttagaaaaaaaaactgaaataaacaaagtgtgtccaacgaccacatcgagaacgtccagaggaacaaggggggaaaagtgagatctgtctgttgccgcaacaaaaaaaaataagaacaacatccagtgcttgacaattgacatccccatctgatatgatgcatgacctacgattgctagcgacactttgcttaaaaacctttaaatcttgatgcatactcctacatgattccaaaaaataaaaaaaataaaaatccccgtggcatgtatgtgatgtgcgtcgtctagccattgcatcgatgaacagaccaaacaaagcaccccccgacacatgac

SEQ ID NO: 56677 - DNA, 253 bp, Zea Mays
gaggggagagagaggaacggaagggagagaggaagcggcggtggtcagagagggaggaaccaggcggcggcggtggctgggagatagagcagggtgggcgcggcttagggttaggcgcggccggcttcatgggcctaatgggccgcttcggctgggtagattaggattaggttttgtttttttctttttttttctaatttcgaaatacctattcaaataatcataacatttataataatcaagccgaaattat

SEQ ID NO: 56678 - DNA, 1458 bp, Zea Mays
ccggttccctttccccaagctccacggctggccgcgcccagtgtcctcctctcagctccccacgcgcaccggcttgctccctgctcggttccgtgaccgcgccgtgtgtccatctcctgtgcgcgcgtgctccctccctgttcctccaaaccagtcgagctcctccctgtgtccgtaccgagctccttccttacgccggtctgaaatctctggtgctcgcccagtctggcgcgacaaacagggaaagggaaagaaacagccgagttcctctgcgcgcagccacatcttctcgctcggcctgctccggatccgaagctggtcaccctgtgtgctcgactttgccttgtcgcaaaaccccgacgccgtcgagcctcgctgcccatcgtgaagttccctgttgtcagcctccgcacctgtcctaggtcgtcgtagccagtttgactccgtcccgtggtggtgttgcgttgccatcgagtcccgatatcaatctggtggtcgtcgaagtgaagctctgaacggattcggccacatccagcactacccatgtcgttatcgttcgtcttcgtgctgtgagcgacaacatcgtcatttccttcatgtgctcatcctcgatctccgtctcaccatcacccttaatcacagcactgtgtcgacgacttgcgatcctcactctcgtgctcacgcttcatcgaatgccactccagtactcgttagaagaagagcttcatcagttgattattgaagaaaagaagaaccctaggtgacatctacttagtactcgatagaaagtctaaagtagaatttatcgtcgtgtccatggaagtggagcaacttaatattggtaagcgaactcgttacttcggatagttggaatggtaatttgattggctagatttattaatcgtaataatcctcgtgttggcacaggcgcgttgtggtagtgttaaatatgtgtgaaatacgatggagttagtaatgcgaaaggtaggttaaattatacgatattcaggcgagctgatgacgtaaaagataggcttagtattcctatcagctagttgatagattttctagtgtcattatgtcaatttggttaattgatatagtcgatgccctgcttaattagttagtttattctaggtttggtatttagttcgatgtcatgagggatatgcaaattacctcgtgcaattaacagtgaatggcatcgacctatctaattagcgtggaattcaagataattgagaaacacaatttagaaagttagttaatatgccctcttactctaagttgtcggtattcgaaaatagtgaataaaaatgtgacgagtaatttgatattgggtgttttaacaaaagacttgtgcttagcttattattacttgatgtttgaagtagatgcgattacgctagaaaagtgtaataattgggcgtagtcgtatatcagtaactagtgtttccg

SEQ ID NO: 56679 - DNA, 1643 bp, Zea Mays
ttctggccgagtgcccatctccctccgccgtgccctgggtagcgtgctccaccgcaccggtcgctgctttccccaacctccacggcgctcccttcctgcctcagctcggaccgcgcctagccgagcggctcctcccacatgcgctcctctgtctcccatggcgcacgcgtgccccctggtcggctgctgctccctgcgctcgccgtggctccctgctgtagctcgcccccagctcgccgcacggctcccatggcgtgctcctctctgccaagccgtcgaatcccgtcttcctctgctcgcgcgggccgcgcccctgcttcccctccctagctgagctcgccggttccctttccccaagctccacggctggccgtgcccagcgtcctcctctcagctccccacgcgcaccggcttgctccctgctcggttccgtgaccgcaccgtgtgcccatctcctgtgcgcgcgtgctccctccctgttcctccaaaccagttgagctcctccccatggccgtactgagctccttccctacgccagttggatctctctggtgctcgcccagtctggcgcggcaaacggggaaagaaacagccgagttcctctgcgcgcagccacgtcttctcgctcggcctgctccggatccgaagctggtcaccctgtgtgctcggctttgccttgtcgcaaaaccccgacgccgtcgagcctcgctgcccatcgcgaagttccctgctgtcagcctccgcacctgtcctaggccgtcgtagccagtttgcctccgtcccgtggtggtgttgtgctgccgttaagtcccgatatcgatccggtggtcgtcgaagtgaagctctgaacggattcggccacatccagcactacccatgtcgttgttgttcgccttcgtgctgtgagcgacaacatcgtcatttccttcatgtgctcatcctcgatctccgcctcaccatcacccttgatcacagcactgtgtcgacgacttgcgatcctcactctcgcgctcacgcttcgtcgaatgccactccagtactcgtcagaagaagagcttcaacagttgattactgaagaaaagaagaaccctgggtgacatctacttagtactcgacgaaaagtctgaagtagaatttatcgtcgtgtccatggaagtggagcgacctaatattggtaagcgaactcgttacttcggatagttggaatgttaatttgattggctagatttattaatcgtaataatcctcgtgttggcacatgcgcgttgtggtaatgttaaatatgtgtgaaatacgatggagttagtaatgcgaaaggtagattaaattatacgatattcaggcgagctgatgacctaaaagataggcttagtattcctatcagctagttgatagattttctagtgtcattatgttaatttggttaattgatatagtcgatgccctacttaattagttagtttattctaggtttggtatttagttcgatgtcatgagggatgtgcaaattacctcgtgcaattaacagtgaatggcatcgacctatctaattagcgtggaattcaagataattgagaaacacaatttagaaagttagttaatatgcccccttactctaagttgccggtattcgaaaatagtga

SEQ ID NO: 56680 - DNA, 223 bp, Zea Mays
ctgaaataacagtctcccatcgtactccttcctcaatttatttttggttatggccatgccttgttcatttcatcgggctctctacttgtaaccattctgacaggtagagtctctttatatattgtcccccctactcattctattggtgtggcgagatttctcattggttacatctggtaatggcgttatgactaaaattgatgatgtcgtgacgaaaccgagg

SEQ ID NO: 56681 - DNA, 297 bp, Zea Mays
gtttgaaataagagaagggaagaactaagaaaaaaatactacataaaataaaataaaataaaaatcaaaataaacatccttcacacttatattaataaattatacctttcaaactgaggacaagttattcacaaagtttaaactcaaacttgaattcaaattgaatttgaaattggagaaaagaaaaaaaaaagaaaaaggagaaaaacttaactgggccaccaacctggtatttggcccacttcagcttttacctcgcgcggcccaagcaccagagaaccggcgccgacatggagg

SEQ ID NO: 56682 - DNA, 131 bp, Zea Mays
gtttctgaacatcgcagcagttcgaacttttgctcgatcacacgaatccattcatctgcttctaacgggtcttcggctttgacaaacagcgggggtcgcgtctctgagaagtccaagtaagaggtttcacg

SEQ ID NO: 56683 - DNA, 464 bp, Zea Mays
atgaaaaattcaaggaaattaaggcacatattaatttgggaaaaaaactcatatttcatcgaggatgaacaagtcattgtatggtttaaaaagagaatctgtgtaccagacattgagcacctacgccaacttatcttaagagaaactcatgattcggcttattctattcacctgcaaaattatactcttaatttgaggaggatttatcacagagttaaatttgaattttgaattcaaatgaaaagaaaacaaaaaaagaaaagaaataaaaacaaaaaataaaataaaaaggaaaaaacgtccagctgggccaacatcatgccattcggcccatttacttgatcactcgcgtgcggcccgggaacgctttcccttctgcgcacttcagtctgacggatggggcccctgcgttagactgatccgcgttggcgcgctctcgctgacatccgggggcccacgagtca

SEQ ID NO: 56684 - DNA, 288 bp, Zea Mays
cttctctcacctttctcaaccccatctctctcgcctctgtttgttccttggagccgcccccgccgcccacgccaccggtcgcccctgccccgaccccttccgccgcggtcgcgaccgcccccgaccccagccctgcccgacgcttccgtttccttggataaccacaacgctcgcccgcccgccggcaagcgaaagcaaagcgagccaacctagccatggagaaggcgatctatcggtagcgggtcctcctggcgcaccttctcccctcctcctctaccatctccttgt

SEQ ID NO: 56685 - DNA, 787 bp, Zea Mays
atgaaacattaggctttttaccggttaggagttcatatgatatcttcttgaggattcggtgaaggtagagctggatgatagagtagcaggtggtgttaatcgcctcagcctaaaactggtccggagtcttgtactcatcaagcatggtcctcgccatatctaatagagttctattcttcctctccactataccattttgctgaggtgtgtagggagaagagaattcatgcttgatgccctcctcctcaagaaagccttcaatttgagagttcttgaactccgttccgttgttgcttcttattttcttgattcttaatccgaactcattttgagcccgtctcaagaatccctttaaggtctcttgggtttgtgatttttcctgcaaaaagaatacccaagtgaagcgagaataatcatctacaattacaagacaatacttactcccgccgatgcttatgtaagcgatcgggctgaataaatccatgtggagtagctcaagcggcctgtcggtcgtcatgatgttcttgtgtggatggtgggaaccaacttgcttccctgcttgacatgctttacaaagcctgtctttctcaaaatgaacatttgttagtcccaaaatgtgttctctctttagaagcttgtgaagattcttcatcccaacatgagctagtcggcgatgccagagccaactcatattagtcttagcaattaagcaagtattgagttcagctctattaaaatcaactaagtatagctgaccctctaatactcccttaaatgctatagaatc

SEQ ID NO: 56686 - DNA, 656 bp, Zea Mays
cttgggtgacgtggcggctcatcggacaatgaacaggacctgtccggtggcgcaccagattgtccggtgcgcccatcgacagcagcctccctaacggctaccttggtggttgagggctataaataccccccaaccaccaccactctaagcatccaagatttttgagtatcacattcaatacaagagctctagcattcactcctagacacaattcaaaagatcaaagcctctccaagtcccaaattcatctcaaatacttagtgacttgtgagagagtgatttcgtgttcttttgagctcttgcctcttggattgtctttcttctttctcattcttgttctcaagtgacttgtaatcaaagcaagagacacctaagagtgtggtggtccttgtggggtcttagtgacccgattgattaagggaaaggctcactcggtctaagtgaccgtttgggagagggaaatagttgaaatagacccggtctttgtgacctcctcaacgaggactaggttctttggaaccaaacctcagtaaaacaaatcacagtgttctttcgctggttttccatttgatttgtttttctcctctctcccggacttgatttaagttctaacactaaccccggcttgtagtgtgtgtttaaagttgtaaatttca

SEQ ID NO: 56687 - DNA, 965 bp, Zea Mays
gttatgctttatatgtttcttgctctagttgattgtgatataggagttccgtagttagtaatgcctatgtcgtagttaagtttatgttgtcttggttggacttgtgtggttggtgatgcttttgtgtgattaatagaagaactaatgaaaaatcgtagcaaattaaataaatgttcatacttgtgatgtcgtagttgtgttgcgtaaataaataaaatgttgtggtcctttcaatggtgttaatgttgaacgccgataatgtatagataactaatgctaacgtgtggttgttcacggtgtcttacaatttagtgtttagttcgctactgtgtcttcaatatcttgtgctatttttcatcatattcatacatatgcatcctgcatctcatttaggaccgagaggtggtgatcgtgcaagtgatgtggtgccaaccacaagatgcagttggtggacgacccaaggaaggatggacttaaccagtggatgctcgccaagagagtaccccccagcaaacactatctaagtgttaaattaaaggcaagccccggttttatgcataaccgttatatatgctattttacaacacttaatatttgtaggcttgtaccgtgcacttaagtgtaggagttgtctgaaaccctagttgcatgaactcaggattccttttgagatggatactagtatgctaggtcgagtagctgctatgctaaatcaggatctcggtagaagtcaagtgatttttctagcactcgcgcgaggtcaggaattggttgtatccattttgataattgaatgatgatggtctgtggacacggatccatggggatgcgttgtctatgagacgaaattggaataaggattaacgtgcggatacatgtgtcaagcttttgaacgtactaagcacatgtcgggaaaaatggtaaccggtaaacctagtacctgagtgaagccgggcgcggacttt

SEQ ID NO: 56688 - DNA, 279 bp, Zea Mays
ctccaatccccatccataggcggtccaatccttggcagcggtgctcagctctccttatgtggccgcccaacacctgcccccatcttaaagccgagcctgtagatatggcactcgtgctgcgcctgcgcctgcttgtctcttctactatcgtcgtcagtcggctcttgtttgtgctgtgtgagtgccctagtgccgacgccgaactcaaggcccgtgtgttgcgaggatgttggctgattatacattgtcaggttgatgttcttatatgtaactcgtttt

SEQ ID NO: 56689 - DNA, 392 bp, Zea Mays
caacgttagaagaaaacaaagttagatggaggacagacataggaatagacggggtaacatgccgagggtagacgccaagggtagacgacggggtagacgcgaccaacacgacgtttgtgaggagagatgttttaacgaccccgcgaaaaggacatgagatctagaacagactcgacgagaggaaaaatatataaacatatattattgagtttccagaattttatagttttttcgcaaatgctaaattttaggcatttaaataatatttagaaagaaaaactgaaattcatatttaatactcgaagaaacatttcgagggttcccgaaagttttccggaaacataaacaaaataatccgataaagtttgaaaatatttgcacttataaacact

SEQ ID NO: 56690 - DNA, 585 bp, Zea Mays
ggaaccgaagtccagccttgaagaagcttcggtagattacgacttcattttcttcgggaacaggaacaaccctgtctccgttgtcatccctcacaatagacatatctcgaaaataccttcctctcatattattaagatgactctgtttgatagtcgatttcccgaaaactgcatggcttggtcgccagggccgatctttggagtcttcgcccccactttctacatcatagctgtcgctatcatcagtatcttcatataagccttctagaatttcttttttaattttctctgtatttgtttttgcaattgactcaatgaatccaacagtcttttcctcaaggagcttctcctcttcgcccagctttatctcagcaacaactttttttttatcttgagacatcttaacttcggaaatcacgaaaatgtgtccttaaatccgaagcttagaaaatctaacaaactaagcaactgttggcaagcaagagctaagaaattaagcaaagcaaagcaggcgtaccaaatgtgctcggggtgagttcttatttatacgcccaacgcgctccaagttggagggccccgtctgtc

SEQ ID NO: 56691 - DNA, 254 bp, Zea Mays
agaaaagggtgtaagagaagaggtaaaggtatagaagaaccaagggtatgagtacaacagagaatggtgttaaggcaagatttgcacgtggaaaagatgagaaaggtaaaggtactacccaaccggagcacaacaaaggatgaagttaaaaactcgcaagcgaccaggaagaggatacgaccaagggaaaagtaggtaaaattcaactctcagattgagatggaagagaggggattttaaaggaccaacataag

SEQ ID NO: 56692 - DNA, 251 bp, Zea Mays
cacatacacggcgattacataaatgactcatcatagcacaatgcttcgaataacaataaagagtaagtaataatatgaaagactagagtcatttatataatataatcaaagtacacagaatagaaatgtagccaacgtaaattaacccaccacaagcagctgactgggggaggtcgctagcctaatcctcgaactcgtcgaagtcctggaacccctggagattcgcctcgacaccttcttctttacctgag

SEQ ID NO: 56693 - DNA, 358 bp, Zea Mays
gtcaacgacaagacaaaggagtccatcgtcaacgagccaagagatgataagccctcggactctggctcgagtcataagaaaagagacgggaagaagaagaggcacattaaaaagatcgtctactaaaacagcgacgagtcttcttcttccccaagagacgacgacgacgagaaaaagaaaccggttaactcaaacttttcatttgattattctcgcattccggttaactccaatgcccatttactttcaattccacttgggaaacctccgcattttgatggagaagactactcattttggagtcacaaaatgcgtagtcacctattctctctccatccatgtatttgggagatcattg

SEQ ID NO: 56694 - DNA, 984 bp, Zea Mays
aaaatagatagagaaagcataacttaacaaaatagggattgtggccaagctagtgtaaacactgcccaggactcttgagtccttgacttgaaatgcaactcacaggagttgctcataaaatataatggtgaaaagaaaagcatggttgtagctgttggtgattagtaaaagtgaaaaataactgagaccagtaatttcagaaggccttttgctttgatcgatgtacatgtctacacgattcttgaagcagcttgttgcaagagcaagggcttactttggaaatttctgcaaaacaggttgtcaaaagagcaagggtttactttggaaatttctgcaaaacagcttgtcgaaagagcaagggtttattttggaaacttctgcaattcattttatgctatctatacctcaaacagttgtcagtttcgccagatgcaaaaaaaatatggttattaaagcggtaaaacgttatgaaccacatttttaacatttaaacgttgaaagaaacgtctttttagacttcacataaaatgacaagatataatatgttcatacataagttgagtacttgagatcacaaaacaaatagcataaaacaaaacagatcaagttcaactacataagtctatgtaactatgcaacatgtaagttacaacttgtatctatgatcagtaaccatcatccaacatgcaagttacaacctgaaacttgatgactgaaagtctgaaacttgatgactgagcatcgccacaccgactacttgaggatggaggagggagggttggcttggcggcgctggactgctggaggagggaggaggggggcagaggagaggatggaggtcgtcggcgttggacactggaacaggtgcagggcagcatgcgacactggagatggatgcgggcgggcggcggcgctgctggaggagaggagtcggcgacggtgatgtagggagtcggggcggtgctagcgagacctggaggagag

SEQ ID NO: 56695 - DNA, 3365 bp, Zea Mays
atgatgaggttgtcgtcgtccgttcctgtaacaccccgggatccacaaacaccccagaatgctactaaactacacatctaacattcgtatataaaatttcgagagcatctcctttgaaaattgcataaacggggaagcaacaaagtataaatagatatcatgataagcaaacataatagacattaatagtctgctagcaatgggaagacaaccataacggcatgagctaaattaaccagtgcgcacaactagttagaaacaaacattctttgacaagaagcttctaattaaatcatgactgcgcctaagcagcgttattataagagtgaaggtggatgtgttgctacttcccacttcccttgatgagcaacaagcacctgcattgcgtaatgcaagagtgagatgaaacatctcagcaagcgaattattttgacgagatatttaaaccacaaattgaattcatcaacattttaaaagagtcacaattaaaatcagaaatacttgtagatatagaactcagtagtcccactataaccaataccatctcatttcctcgaacaaccacaataggttctataacacttccctgcgtcaacaatacctgcaaatatcacttcaatgtatgcataggaatgcaatgtgtaggtactctatcttcatacctctgagggtataaaaccacatcatctgcaaatatcacttcaatgaatgcatatgaatgcaatgcatatgtcctctgccttcatacctctaagggtatgaagctgcatcgtacccctcctcgggcaacgtacgatgctaaattgtaccggtacggtcggaccataggtcacgacaaaacttcagatgcaaatgagtcatgcaatgtatatggcatgttgcatttatcaataaacttcacttccttcagatacaatacaaacctcaaataatactttatttaccttcagatacaataccaacctcaaataatacttcatttaccttcaggggtgtgaattaatctcatgaatcatactcgaatcataatcatcatcaatatatgattgagcatcagtataatgcaagcaagtaaagcatcaccatagagtccaattatgaaagaatccaatacttctgaatattagagtgtaggcgatagaaataacaggtcagaacaaaatcaaccaccgctacattcacttgccttcatcgaagaagaagaaatgtactagacatgatctggagtgtagccacctgctagcgggcataaaacttagtacaaatatttcacaaacatttgccatcaatcaacaaaacactcctacacttgaaaccaagacccagtggaaagactcccaccctgaaccacatgccatacagcagcaacgctgtttgttaattttgtatctttaaaattaaaacagtggtgatatcaaacaaatactctaggagtatctacacaaaatactctacaacttcagtattcaatagataattaaattctgccatctacaagttttaaaacatctgacaagataactgactgaatttgttttagacagcagttagattaactttaaaattcgatatctcccaaactactgaaccaaaaattatgaaattctgctggaagtaagaaattttatccctctacaaaagtctccatagttggaagagccaattcggccatttactagatgaaatccaccagtgaacagacccactcatttctgtcaggtaaacaggaacagccacagtaaaacaaacataagtggagtttcacaaatcatatgaatgcactctttaacaatctggaaagcttatgaaattatgtacaacttcttttaccaactcacagtttaattgtgttgataaaattgcctaactcttaagagaacagattctgcacagaattatgagactgaaaaactgctataatcaaactgccataactttctgttctgatgtccgattgaggtgttcttcgcggccacggaaagatctacaaattatctacgactcatatatagactttttatttttttgaggccactaagaccacggaaaactggcatgaacagaaactgtcgaatctgccattctgcagaaaactaaattcgagatcaaaacctaaccccacatctaatccaacctctaatcctttaattcccatgatccacaacctccaaaagcacataattacagggaggaacaaggatctcatccatacctagggtttccccaagaaattctgcaagaagagatggggaagaacatctccttgatcctctcttccccttcaattcaacgtgctcctcctcttctcgatccttgctgcgcggggagagatctagagggaggaggaagccgtggagaggggctaccatgggaggagaggacggccagcccaaggggaaaggagggaggggcggccaagtgtgggaggggggggaaaggggtggcggccaagtaggggcaaaagggggaaaaggccaccactagggttttcttttcgggagaaaagaagcgacaccacagatgactccgacttagcatccaacggcccacaacccttttcccacatccacgcaccgaagatcaacctttggcaacttttttttgggatattacactctaccccccttaaaaagaattcgtcctcgaattcgtccactccaaacaaaacatccaaggtaccccatatagcaccaccattccaaaacatgggtcattattggtcttaattaacacaataacttctacctcggactaaatgtctatgaaaactacaccacctgacatcaagcatggaccaacatgtaatgaagctcaaaccaagtcatagatgcaatcaacactacgatttaacaacatcgaatttggatgcagccatacatccgcatcaatgtcttaaaacgacactcttttatgaaggggtaatatgcactaagcacaacctttaccaacttcaacaattcattttaatttaatgatgaaacatccacaccagatgaatgtataagaagatcaaacacctcacctcacagcaccacgaaacaagtagttctattgaaacaaaactcctaatcttcctaaaccttgttcttgccataatgaaaagataatcatgtaatctaacattctttgcaccacacaaaagggagaaaatctatagaactaatggagcaataaagccaacaagaagccaataacattctgcgcggcacatttcatcgaagaaataccaaaagctccacaaagagcactgacagcacaacaacacaatacttggttaaccaatgtcactatactccatccaacaactcaactcggggaaaatatctaaactagtaaggttaacctacacataacataagtcttca

SEQ ID NO: 56696 - DNA, 274 bp, Zea Mays
ctgggtccggccggtcctggcggcctggtgcggatgtgaagcaaggggagagaggagagagagaatgggaggggagagtgcaggatggcggcggctaagggaggaggagggagtgcggcggctcggaagggagctaggttagggttaggtgttgggcctaatgggccttacgttagttagggtttttttcttttttttttgaatttctcctttctaatttaaaatacacttttaaataattctaaaatttatagtaatgaaaccaaaagtattt

SEQ ID NO: 56697 - DNA, 210 bp, Zea Mays
attcattcgagctcaagtcttggctgtgtgtgtgcgtattgttgtggatttgtgtgtgttgcttccctcccttactctagtgctttcactttgatctttgttgtaagggcgagagactctaagttgtggagattcctcgcaaacgggaaagagtataagaaagaaaacaaccgtggtattcaagtggatcattggatcacttgaaagggg

SEQ ID NO: 56698 - DNA, 1815 bp, Zea Mays
ctatttatatgcctagcgccccacggtttggtggggcctgcacgttagtgtcattcgctattctagcgaagggaaggtgttttttcggacctttggctaaaggccttcgttcacgttgcagtctaaatttgttacaaagaaacaaattaatactgcgagggggctactgttgggggccttctccttccaaaggtccttaaaaacataattaaccatttgtttttaggaaaagctattacaggaatcttcgtctccaagtgttgggggccttcttcttccgaaggtcctcaaaaacataattaaccattttttagcaaaagctattacaggaagcttcgtctcgaggagataaacctctttcttatggcaagggacacacaggatgaagatggattcaaagaaaataagagtaaacgccgaagctattgccagacgagaaagcttcggctcgcaacgaagcagaggaatgttgataatggctgaaggagaaaaagactacttagtcctttataatctgtattacgatcatgtgtaaacgttaaggatataaatgtacttttgctcgggctgcgtcccgtgcctataaatagatgaacagtaacattgtattgttcacgctggattgtattcactctctcgcatcctcgccttcaagcaagccgaaggtactaatgtaatattaacattgttgatattcatacatgctttatggaatgaaggagtaaatgaattattaagatatgactatcatatttattcttttgtattcctatccctgtattgatatgatgaaggcgtgcccttcttggccttcgtccgagaggcattatatccgtaaggagttaatgcttcgggggatgaatgtccttaacgtttaacaattgtgttgccttgttcttgactcacagcatttgagaacaagtgaccaacaacgcccttagctgactaattagaaaagctagtggaggactaacttacccgaaaggggcaagggcagtaggggagtggtcagtgtagggaggtccttgggttgattttgctgcgatgttggtcaggcgagggatccctgcattggagcttcctagaaagtgtagcgggttttctaaagctagtggaactttgtaaaggcatcatagtattaccctgcctcgcttccttggtaaaggtgtatggtggtcgcggtcacttggtagatgggtaacatgacttgtgggtaaagatgtgcaacctctgcagagtgtaaaactggtatatcagtcgtgctcacggccatgagcggctcggacacgtactcacatgattaatttatggaactaaattcaatttgtcatatgcattgcatcgcgggtgttgttatcaattttgatctactacttatttgggatggaatctacttatacttagtaactgctaataaaaatttgaccaactttaaaagcaatgctcagctttaaccatcctctttggtaagccttacacttcacatgagctcccacctttggtgagttcatgcacattattccccacaacttgttgagcgatgaacgtatgtgagctcactcttgctgtctcacaccccccacgggtcaagaacaggtaccgcaagatgaggcacatggaggatgctgtgacaagtttgtgagaggtctaggccgtcgtctcccagtcaactttgggttgctggatcattgtctccttatgatgtaattatttatttattttgtacagaactcctattatatagtaaagatgtgacattcatttctataccactattcatcatatgtgtgagacttggtcctagcacacctggtg

SEQ ID NO: 56699 - DNA, 731 bp, Zea Mays
cttaatcacacgggtcactaagaccctgcaaggatcacaacacaattaggtgtctcttgctagctttacaaagcacttggaaatattagagtgagaataagaaagcaaccaagcaacaagagcaacaaaataaacacaaatcatcctctctcaagtcactaagcacatttgatcacttgacttgattttggagcttggagaggatttgatcctttgattgtgtctttggagtctattcttttgctctagtattgaatgaggaagttggaatgcttggatgatttgaatggaggtggttggggttgtatttatagcctccaaccacttcttagtcgttgcttcaattctgccgaccgcggacggtccgcgctcctggtccagacggtccgcccctgcacattaatggctgaaatcgcaacggtcagcagtaacggctatatcaacggctatagtgcatttaatgcgtcgtcagatgtcagataaagcagtcgcggacggtccggtcgtgcaccccagacggtccgcgaggacgctaaaaatgcattttaccgaacccgtcaccatctcggacggtgctcgcttctcctttggacggaccgtagtgttgacgtatgtttttgcagagttcatgtccgaggctcaccctagtgtcgtggatggtccgccgcaagggcccggatggtccgcgcataggtgtttttccaaaaagcttatcctgtccggaataatct

SEQ ID NO: 56700 - DNA, 913 bp, Zea Mays
aaagtgtgcacacttggacaatcgatccactaccataagaatggtgttgtaagatgcagacccaggcaagccatctatgaagtcaagagaaatgctttgccaggctagagttggcacacaaagaggctgcaaaagtccaggataatgacctctatctggtttagcttgatgacaaactgtacatgtgtacacatactctttgatcaaccttttcatatgaggccaataaaatagatgcttcacacgtttgtatgtaactggaaatctagagtgcccccaaagcactagaatgtagtgcagctagcaccttggtctgtagtgttgaattactgcccaaccatagtctccctttgtatctgatcagcccatcttgaagacactaaggtgaacatttagccatggcaagtgaagtgagcaatttggacgcttctagatcatcctggtatccagacgcgacttcctgtaaccaagcaggaacaatagaagacaatgcaaataggtggccttcagggtgtggcctgcgagacaatgcgtcattaacattgttctccacccctttcttataaatgataggatattggagccctaaaagcttagtaaaaaccttctgttgccagggagtgtgcagcctgtgtgcatctaaatgagagaggctacgatgatcagtgtaaatataaaatttagcatgtaacaagtaagctctccaatgttcaactgcaaacaatattgccatgtattccttctcatacgctgacagtcccaaaattttaacgccaatggccttgctcacaaaggctaaagggtgaccctcttgttgcaagtctgctccaattcccaaacctgaagcatcaatctctatagaaaaaggtttgtggaaatcaggaagagcaagcacaggtgcagtggacaatgc

SEQ ID NO: 56701 - DNA, 511 bp, Zea Mays
ccttgaaaggtggctagagcacatgtgagaccaaatgccatcaccgtgaattcaaactgaccgtgatgcgtttgaaaaccaattttatgttgatcttgaggagccattctaatttggtggaaacccgcacacaagtctaatgtagaaaaccatgctgatccatgtaattcatcgagaaattaatcaataatcgggactggaaacctggtcttgacagtaagagcattgagatgcttgtagtccacatagaaacgatatgtattgtcctttttctttatcagaatcactgatgaagaatattcactgtgactgtgctggataatactagaagccagcatctcatccacttggcgctcaatttatgtcttaagggcaggtgcataacgatatggtctcatatgaaaaggttgtgctcctggtaataagtcaatatgatgatcacaatccctagaaggaggcaaactagcaggcaattcaaatacagactgaaatctgcatgactgcatatcag

SEQ ID NO: 56702 - DNA, 366 bp, Zea Mays
aaaactccgagcaaatcccgcgattttcgccaacaaacgcagcgaaaaactcggaaccctaatctgttctgcgtgtgcgcggaccgtccggcctcagggccggactgtccgcacctcaatttggcgcccaacatatgcccctgccttttggtggagctgagcaaaccaaaagcaaataactcgatgtgattacatcggttctcttaggcatcttgccacatactaggatggtactgcttaaggaaacactcattcaaggctttgggtaaatctttgccttgtaatgtttgcaataaataggcgttaccagacattacctgttttactttatatggacccttccagcttggcgaccatttaccaaac

SEQ ID NO: 56703 - DNA, 1964 bp, Zea Mays
gttgcattgtgtttgttgtttgtgcacaaatatgcttctcttgcccttattctaataattggtggttgtaaacgaatatgcttttctcatctttatttcgataataaataattggaaaatgtttgaagtatgactgtcctataagcaaatttctagctttatttgaggtgtcctttagacatgtgtttatgtggtctgtggttcttcttagtttgaccgatagtgcaacttatgtttatttttgtgcctgtgtgccgatagaatgttggtggtatgtttgcataaactcaaaattaggccatgtcctcatctaggagccatgacccaaatcgatgtaaattctttgaaatttttccccagtttccaaacgtggacgagtctgaatttttttcgtcgttactttgtgatcaagctcatataaaagatgtttaggtaattcccttattggacctatgatgcattcaaacttaaaaaaatatctcgagtccctgatcttaacagccaacttgtagctcttatggtcatattttcatcctaaaacatacctttgttcggttggtgcaagctgatatctctatgtcagtttgcatctccatcaggatcaccttgttgctttctcagtccaacctaggaaaggagtgcccaattattttcttgaatttaatgccttcgatttctcatatctctctaaggcttctcaatttagtcttatgattgtgtcccctctatatctaatctgacattaatcatcgaccttgtaatctttgcgatgggcatagaaatatgcttggggctgaattaacagtctcttatcgtactcccttcatcaaccgatttaggtcttgaccatgtcttgttcgtttcatcggtccatgatctatttggctctctacttgtaaccattcttaatggagtctattttgtatattgtcaccctggctcagtctatttgtgccgcatgagatttcttattggttacgtctggtaatggcgttatgactaaaattgatggtgccgcgacgaaaccgagggcctcctgtgggtgatcagcacatggttgcgctacttggcacgagctggtatcacagttagtagttgtaatccattattagactatatcgatatgtcatctctgcatacttttgttcttacgccgtgagattcattattggtgcgacttcggtaatggtgtcacgattaatgatttttggtgccgcgacgaaactgagagccccttgtgaatgtacacgcaaggttatgctgcttggcgcatgctggtatcgaggtctttggtcatgatccattgtggaactacactaatgtgtgatcttccgttgactcctcccttgaaacgatttttgtgttgttttctacaacaatcaagcaacatatgccatcactgttggatcaaaagagtgtataactctaatgtattccttggtaaattttctacccattcagaaatctccaacaaaaatcaaaacctatttgtgtctaaccgtgtgttaaaaaaaattcacccctttcatgtgtggtctcttttctcttgattttggtggtgactacacatacaagtttcctttacgtcctttgtgtaaaggtgaagccttgaagctttttagtgttgaaagacagctaattagttttcaaaatggggaattgattttccctgctgctgagatgtaggagtatgttcattcactctcttatttaatctatgtattcccaaaccatgtcatttcatctcacatgaagaaacagatgaacaacatgaccaaatggatttctacccaaatgcgtgatctcttgtttaagaatgtgatattggattcatcccaaagtagttgtatgctatcgctgatatggacaagggtcacatgcttctctactcttaaaagtctttcgttccgaatctcgggacgagattcttttaagggggagggttgtaacaccccaggtgttta

SEQ ID NO: 56704 - DNA, 97 bp, Zea Mays
tgtcaactcgcccatgggtttctcaagaccagaacgggttcacgcgacctgagagcacagcactccaccgtccagtcattggcctggttggtacacg

SEQ ID NO: 56705 - DNA, 1204 bp, Zea Mays
ggcctcctagtgcgtcggcggctgcagtgggtgcgccggcagatgctcgaggcaatcttggtggcggttgacctcggcacacaggagcgcgacctcgccctgtcggacggccatcagcaaccgtgtcagcctgctgtctccaagtgcgagcatggtgcgtgtcccgcgggcgacgaacttcaactctacggtagatgcggtaggaaaggtgctcccctcgtcatcggcaagggtgcactgcaaagcgccaccatattccgctaccagccgccacgagggcgcctccgctggtcattgttgtgacctactccaggtggccatccatgtgctcccctttcgtccatatggcgtccatgggatacaggtggctggctgcacacatgcaagcccaatgcgcgtatgtaacaccacgtccactcccgaaccgacagtacttactcctagcggccctctaggatcatagaccatccccacaaaccaacacgagtcttttgagcacactttgtccttactcatgcgcacgcgagaagacttcctagtcggtcacccatccctaaattgctccaagctaagcgtgcttaacttggaggttcattggagaggagcttccgaaaaagaagatgcaccttattggtatgagtactctattaattctattaagccttggacctgaatatcaccatccaccagggccaggatatcacagcggagggtgtctgccttatcttaaggggtcaaaaaataaagagtcgcaatcacatttagattcggaataataaaataagtcgagatgtaaaaggcttatttttaggtgattaggtttgtgtctagatgagtcgtcattaggttgtagctcgaggacgacctgcttgtccaaaaggggtgtagtgtcagggcccaagagattagaagttggcattgtagcacgcccctcaggttgtttagataaagatagactagtttgggataagatttgaattagagataagattagatctagtgcttaggggtcaaggaaccctctctatataaggagagggattgtatcaattgaaggtaagcacgagattagaaggaaatcccttctctcttgccggtcgtgggcaaagccctgcggctggcctccccaacgtgtcctaaccctagccgcaagttctctctctagatcagccacgcacgccctgcgccgtgcacagcctcctcg

SEQ ID NO: 56706 - DNA, 469 bp, Zea Mays
gtgtactcagcccacggcaaccagcgcagccattggcgggggcgatctccagtgaagcagtgcaggtacatcactatgactcggttggtggcttccgtctggccgtccgactggggatgaaaagcggatgtcatgtgaagcttagtacccataagcctcatgagctcctgccagaacgtcgaggtgaacacggggtcgcggtcggagacgatggactgcggaacgtcgtggaggcgcacaatgtcggtgaagaatgcctgtgccactgtctctgccgtgtacgggtgcgcgagtggaatgaagtggcagtacttgctgaagcggtcaaccacggacaggatcaccgtcttcccattcacgcggggtagcgcctccacaaagtccagcgcgatgtcggcccagaccgccgagggcacgggtagaggcaagagcaaccctgctggatggagatgctcggacttgtaccgct

SEQ ID NO: 56707 - DNA, 423 bp, Zea Mays
cacttgcctacttccacgttgtggcgtcccaatggacgagggttgcactcaacccctttcaagtgatccgatgatcaacttgaatatcacggtcttttcttttagagtcttttcccatgtgcgaggaatctccacagtttggagtctctcgcccttacaatagagatcacaaagaaagcacagagtaaggttggggagagcaacacacgcaagactcaaatctgcagcacaaccacgcacacaagtcacgacttgagctcgaaacacaacacacggagttcgcaactcaaatggagctcaaatcactaacacagagaatcaaatgcgtggagtcggagtctgggagtcttagaatgtttctttaaagcttggtgttctcctctatgcgcctaggggtcccttttaaagcccccaaggcagcta

SEQ ID NO: 56708 - DNA, 290 bp, Zea Mays
aaaagaagtgcaacatcaatgcaattgaagaccaaattgtttttgcttataatttggcatatttggatcactctttgccaccactaggtttgtttttgcaatttaaattctttttcctatttctaagtcaaacacacttgtttgggcaaatagagatatatcccaagagtaaaattggtcaagtgccaaaaactcccccttttccgataatcaaaattctcccctcaagagaccaaattttgcaataagagtattttgagcaaatcacaaattcttactctattattttc

SEQ ID NO: 56709 - DNA, 618 bp, Zea Mays
cggtggttggaggaggagggatggagaaaccctagctcaataccatgttggagatcgaaacccctaaccctaattgggtaggtcttgtattataaatagataagtatatgggtcagatcaaggcctgttagtggtaatacagaaacaacacgctaacaagtccttagtgagtcataagtatgtgcattcatctttgtacttacctttttccaccatgtaatccttaataggtttatgtaaatctcaaaggtgatcgtgctcacgctatgaatactgcttgggtaatgcttgctttaatttatgatggataggtacagaccattcagtaattttacatgttaacaagaacatacaatttatcaatctgttcacacacctcttctctaatactagtttgaacgagatccaacaccattacatcatgctgcaaaagaattgatcaatatgcaattggagacagcagagtttccacaacaagttacattcttttttgatagtaatacattatattgacaagtgaaaacttgttttgttcctctaagtttgttctgaaaattggtggaatggtgttgagaaacacacacaaaacctatcatataccatggcatattagtatat

SEQ ID NO: 56710 - DNA, 381 bp, Zea Mays
cttggttatcactcaaatccaagggcatatagagtcttcaataagtccactggattagttgaagtttcttgtgacattttgtttgatgagactaatggctcccaagtggagcaagttgatattgatgaattagatgatgaagaggctccatgtgtcgcgctaaggaacatgtccattcgggatgtgtgtccaaaagaatccgaagagcctccacaagcacaagatcaaccatcatcttctatacaagcatctccaccaacttaagatgagggaatgactcacgaagaataggatgaagatcaagacgatgagccacctcaagaggaggacattgatcaagggggagatgaatatgatcaagacaaggaagatgatcaagag

SEQ ID NO: 56711 - DNA, 504 bp, Zea Mays
cggatattatgctttatgtatgtatgtgggcaaggttccaggcaaatcctaaggaagttcaccttagggcatgaaaagaatcatgagatatttagtttacactcctaagtttgggctatggtaccccaagggatctacctttcatctaattaggtattcagacaccgattatgccggatgtaaaattgacaggaagagcacaccacggaattgttagtttctgggaagatccctggtgtcttgagctttaaagaaacaaaactccgtagctctatccaccaccgaagccgagtatattgttgcaggacattgttatgcacaattactctggatgaggcaaaccctcagggactatggctacaagttgagcaaagtccctctcatatgtgataatgagtgtgctatccgcatggtgtataatcctgttgaacacagccgcactaaacacacagacatccgatatcattttttgagacatcaccaacaaaagggggatatcgaaat

SEQ ID NO: 56712 - DNA, 283 bp, Zea Mays
actagttacatttctactctttatatttgctttggtttgtgttagcatcaatcaccaaaaagggggagattgaaagggaaatgggcttaaacatttcctataatcgattttggtgtttgacatccaccacaaaccacgtggactaattagtttgcctaggtgtcatttatctcaggtgcataaagttcaacataaactaacaaagaaaatgagttggggaactctacaaagtttggagcaaagacaagtatagatgcagccagtggcgcaccggacactgtcc

SEQ ID NO: 56713 - DNA, 378 bp, Zea Mays
ctcgctttgattcttgcttgatttgtttgccctctttcctctctctaacatttccttgctagtattgatttgagtttgctcccatacgtcattcgcatcctttgagcaactcttagcaagagaaacaatctttcggacttgaatttaattctaacgctaaccccggccttagtgtgcgtttcagtttataaatttcaggtttcgcctattcacccccctctaggcaactttcaattggtatcagagccagtgcttcattaagagtctaaccaactcaaagtgatgtctggagatcacgccaagagggagatcgtgaccgacgacaagcccgcaggcttggggaagactctctcaagggagtccggcaacaagtataag

SEQ ID NO: 56714 - DNA, 366 bp, Zea Mays
caaagcatctacatctacttttgaaaatgttgttagttgtactacatgtagagacattaatgttgaagctattgatgatcaccttgctatgattaaacaacaaaatgatcacatagctacattaaatactaaaattgccgaacatgagctagaaaatgaaaaaattaaatttgctaaaagcatgctctataatgggagacgccccgacattaaagatggatattgtttccaacaagggaaccaaaacaagactaaacttaatgcccctaagaaattgtctaattttgttaaggcaaaggctcccatggttcaggatagagaagggtacattttatatcctgcaaactatcctaagcacaaaatcat

SEQ ID NO: 56715 - DNA, 392 bp, Zea Mays
aagagggtaaccactagatctcgagttgctcatttttatgaacattactcttttgtgtcctctattaagccatacaggatagaggatgcattaagagatccggattgagtggtgtgtggcggaactgcccgaattattccaacttaagtgcctaagccctgccttagaggctagaccacacttaaatgggaataacccgtcaatccctcagatctagtccgacatggccactgacaggatcaagtaccacaatctcactcgatggtgagtcacagagcaaatacaatagagcataaaaccatgcaggtaagagtattaaattattacatcatcatcatcgaagtttttgcaaaagtaaccatcattgttcgaagtgcagtggaataaaacta

SEQ ID NO: 56716 - DNA, 974 bp, Zea Mays
agggcaccttcatcagccaaactaagtacattcaagacatacttaagaagtttggaatgaagaatggcaagccatcaagacacccatgggaaccaatgggcatctcgaccttgacacgggaggtaagtccgtggatcaaaaggtataatggtcgataataggttctttaccttacttatgtgcatctcgaccagatattatgctttcagtatgcatgtgtgcaaggttctaggcaaatcctaaggaagttcaccttagggccgtgaaaagaatcgtgagatatttagtttacactcctaagtttgggctttggtaccccaagggatctacctttgatctaattgggtattccgatgctgattatgctggatgtaaaattgatagaaagagcacatcagggacttgtcagtttctaggaagattcctggtgtcttgggcttcaaagaaacaaaactccgtagctctttccaccgttgaagccaagtatattgctacaggacattgttgtgcacaattactttggatgaggcaaacccttaggtactatggctacaaattaagcaaagtccctctcctatgtgataatgagagtgcaattcgcatggcggacaatcccgttgaacacagccgcactaagcacatagacatccggtaccactttttgagagatcaccaacaaatgggggatatcgaaattgcttatgtgagcacccacaaccaattagccaatatctttaccaagccactagatgagaagacctttagcaaactcaggaatgagctaaatctacttgattctcggaactttgattgaaacattgcacacatagctaatttatatacctttgatcatgtctttttcatttggtacaaaatgcatatttcttattcttcttgtgccaaggctaagactaatgtgctttcgagtatatatctataattagtcttagattgaaatggaaatgaagtattcg

SEQ ID NO: 56717 - DNA, 9578 bp, Zea Mays
ttggttcccaaatccagcatatccttgagagtcttttctttagtcgggtaagtcttgctgagtaattctatactcagggttttattccctgttgtttttcataatataactttgtgctgctgtgatggtgttaagtgccggtgggctcggccttcttatataagtataccccgtctttatcttcttactgaggatggtcatttgagctagcatatatttcaaacttatactcttgtaatcactccgataaaatattgtaaaatttttgtaacctgtaaaatttggtaataaaatttccgctgctaaaatgttgtgtgtgtgattttttgttacttaatcccgcggttctggttgtaagtggtttatccgatgtccttggggcaatcggatggatcctgttaagttatctggtgcacatgcatgccgtctgaggtctttgagatgaggacaggtgcatgtgggcccgataccttgggaggttctgccacacctaacttgtcaatacattcaaatatgcttaggagacccaaatttgactcttgtgctagaaaggtgatgagttcaccacattctaggaccaaggctatttgggtgcctaagtccttattggctaaccttgatggacctatcatgagatgggtaccaaaatgtacttaataagttttgcaggtacccagagatgatatgaatctttggggtgcttgagcggttcaactcaattcttatctcaagctatcaatcttacattatctatcctttaagattaacccaaagatgaattgagttgttatttcactaacttcatattcatctctagcaagaacttgtgttgtagggaataaggattaacctttgtgggaatcaagcaaaaggcctacaaccaagtgatatccaaaggatggtaacaattaattcttaagtgcacattgcttttaattggtatattcctttgtgtcttttgtagccacataggaaaaatgaagcacttgagaatgaacttaaaagattttaccttgctttggaaaggatctaattatatggtagattgcaagttcatattttatattgtgacaatctacatgctttaaattgattgtatgtatcttgtggcatatttcaagttaatcatcatattattgccatgacctagacataaagagtgttatcccatgttcttaaatgaatagagtgctaagtaagaaattcaaattcttatagcacttaccaaatggggaattctctatatgactagagttgtgagactaatgtttctatctaagtgtttatgtagtctcacaacatgagaatgtgtttcccaaatgaagtgtgccattcaacattcaaagaagatcgaaccaatactatgtgatgtattcattcttgtttaaattggttttgagtcttctccattaatcactcaccatgctatgaattaaacttgccatataaacttaattaaataatcatgctactttcatcttttttacaattgatgttatgcatgatgcttgtaagggtaatttagttcatatcatgaggtttccttgttttagtaaccttcttatcattcatatactagaggttgctaaataggaaactattgcttgtgttactaatacaatctcttttaagatatttcatggaaattcataagtagagattgtgctctttcaatttgtcggcgttttgaccccggggggtccctagaccgacgagtaaattgtcgctgcgtgccccaacccagatgggtcgacgcgagacggaacacaaggaggggaaaaccgcgacttcgtgttgtcctgctcccagggtggatgcgcttgtagtagggggttacaagcgttcacgagggagagagagagagcctatccgtcagcccgtcctcccgcgcggccacctcttcgtacgagggtcctggaccttccttttatagatgtaaggagagggtccaggtgtacaatggggggtgtagcaatatgctaacgtgtccggcagagaggagccagagccctatgtacatgctgacgtggctgtcggagaggtgttagtgccctgtgcatgtgatgtcgtggccgtcggaggagcgcttgagccctgtagaagcacagatgtcggggctgttgggaccttgctgacgtctccttgcttccatagggggctgagaaccgccgtcgtcatgggagcacgtggggggccatcattacttgtttaccggggcgagccagatgggacaccggtcttcttccccgtagcctgagctagctaggggtagggtaatgatttacccccctgtagcgtggtcggtccaagcccaaggtcgggcgaggcggtgactcctccgaggtcgaggttgaggccgagccctagggtcgggcgaggcggagaccgtcttccgaggtcgaggcgggggccgagtcctggggtcgggcgaggcggagaccgtcttccgaggtcgaggcgggggccgagccctagggttgggcaaggcggaacttcctatggcacctgaggctggacttggctgctgtcagcctcaccctggcgggtggcacagcagtcggagcagggcaggcatcgctgttttcctgtcaggtcagtcagtggaggggcgaagtgactgcagtcacttcggccctgccgactgaggaacgcgcgtcaggataaggtgtcaggcgatccttgcattgaatgctcctgcgatacgatcggttggcgaggcgatctggccaaggttgcttcactacgaagcctgcccgagctgggcctcgggcgagtcgagggtgcgcccgttgcttgaggaggccctcgggcgaggcgtgaatccgcttgggtctactgttcctgcccgaggctgggctcgagcgaggcgagatcgtgtcccttgagtggacggagccttgacctgaattgcgcccatcaggcttttgtagcttgtgctgatggtgattaccagccgagtttaggagtcttgggggtacccctaattatggtccccgacagtagcccccgagcctcaaagggagtgttggcactcgcttggaggctttgtcgcacttttttgcaaggggaccggcctttctcggttacattttgttccggtgggcgcgcgcgagcgcacccgccgggtgtagcccccgaggccttggaggagtggtttgactcctccgaggtcttaatgccttttgtgacgcctcgaccggtctggttgttccctcatgcgatctgatcgtagcccgggtgcatggtcaggttccaagttctcgggctagtatgttgacgctgtcaacggtttggccggagtcgggtttgtgagagcagcccccgagcctctgcacagagtgagaggacggtcaaggactgacttggcttttatcatacgccccttcgtcgcctttccgcaaggaggagggggggaaagcaccatgtttcccttggagggcgccgaacatggtgtctgcagtgagttgctaacgggtgatccgagtggacgcatgtgccccgttcgataagggtcggctagtggcccagaggcgcgctccaaaagtacctgcagatgatttgccggacccgatcccgtttgatagggttcgagggctcgatgcctccctctgatgggattccgttacataatcgctcctgctggtctcagaaatgtcctagggtacctcgggagcgtagcccgagcctcggccatgtatcggacgtacctagagtcatccctcgctctgcgtgttctggggcggctttcgaacccttcagggggccagccttcgaacccctgatcagtagtgggcgcggagcccgagtgctctgaggcggctatcgaacccttccgaggggccagccttcgaacctctgatcagtaatgagcctgaagtccgagtgctctggggcagctgtcgaacccttccgaggggccagccttcgaacccctgatcagtaggagggctcggggcccgcttccttcgcggagaaggatcccttccggagtatcccctttcccgatcactgtagcaagagagagaaaggggaaggagaaaatgatacgaatttaaatgatatggcgcaccttttttgacgcggtcatcatggcggaggtgaaatgtcgcccgcttcacctgccaaaggtgtcgcctgccctgccgcgaagttaatgcgacgggacggttggttcgcggggcagccattgtgcatgcgtgagttgttcgagggacggaacacgggcgcgtcgtcttcacgccgtgggagagggctcccctgctgttccaggaggggacgtgagcctgcggacaatttgactgctgcttccgcccgcctgctgccgccattactgccggcccacttttggcaatattgaccgtcgcgccttctcccgcggctgactgacccgtgaccgatgcgcttggttggcacttgttgggccatgcgcggggttgcctcgagtcgcggcaccggttccgtagtcgagaaggcacgacattggcgtaagtggcggtgcagtttttcgcacgtagtaaccggcgcgccgattacatgacgtgtgggcctgggcctccatgctggatgcgtcgaagtcgaaagggtgcgtctccatggtgcagttgcatgccacctgcatggcggtccgccctttcacccgctggtttaagcgaagatggaggagtgcttgtaaccgctgggcggttacacgctccgcgcgcgacgatttggcttctcctgtcccgggccagcttgcatgacgtgtgggacccagcccccgtgtcatagggggaggaccctggagcgcgttggtgaagacttagtccgcgacgcctgaggacgcgagtggggagagtcgcctttaaaaagggatcgacccccctgggtggtagccacgccttcgcactcccctcatgcattgcgcccttccaccttccgagcccccggatggggagcgcccgcgttgctttcgtcttgctgctgttggaggagcacaacttcgtggaggttggcacctttcagccattgctcggcttcaaggattttcatcaggcagcccggctgcattccctcaccaatggtcacgtaggatggtgaccatcggtttgatggtggagagaagcaagccgggctgtggcctctgccccgccctcagcttcaaggatcttcatcatccttgctggggcggggagcgaggcgaggcggggcctaccttcgcgtgggctggcgtcccgcttcttcctctggcatctgggggtggaaaccatcctctagctctgcggaggaggcgtcctccagccatgcgggggaaggcgaactgctgctgcccggccagggtgcagcattccgtcctctacccgggcgactgtggccggctgtaccggagggtctcacaacacgtcgtacgccgcgagggcggtactcgtgttctgggacggtcccattctcgttttcgtggcgaggacgggagtgaggacctaccggtgcgctttggggcggcctgcgctcgttggtgcggtgttggtcggtaggtggacgccgccgtcagtgctgaggtggtggcagccggagaaggtttctctgccaacgagatcgtcggcgccatctacgctccgggcctccggctctttggctttaatgtctggttctcgtcctccacgaggggaagcgaacgagagccttccagcggtagcgttcgccttgggaccatcgctgctgctgcagaggtcgccggcgagtcacccggagtttgtcgtcccgcaggccctctgatgtgggggttgttcatacccgcgggagtggaaccaaagttctatttgtaatggcaccttgagtgccggtgtctgttcattgtggctgtcggggcctgaacatctaggtatttgagtgcaataccgtgtttcttccttatttcgagcgccaggacttgcctgtcggctagctgaaccgcttaaccaagtgtgagttgccctgtgcggaaggtgacgagtgaggtatccgtatcccggaggcataggagtccctcggctcggtcggccttgccacccaaggcttctcttgctcagttaaagaaaccctcggccgctctgcgatgagccggagccagaggcagcggtgtcagcgtggacagaggcagagtcggctcaagaagaaacttcgtcggcccaggagcaggtgacttcccaggccgaggaggcatagcagcggcggctggaacctggccaggtcatccactggcgagaccaaccccggagttgggctgccgagggcatgagccgggctgatgtcctcgggggacagctggctgcggctacggagcggccagccgagccatctgctcgggccgggttcctggaggagaccttggcggcgatggcccaggcgcagtgctgacatcttccttcgaggtggagatcctccgcctgtgtcgccgtccgaggccgggccagattccgtcgaaggtggagacgacgccgagggtgctgctgctccctctgttgatgtctgaacctgcaggaacagtttgtctgtagtacgtgtatgttttttgcggccgccgaggcccaaacatatcattgtcgtgttataaagctgtgtttcttttcctcttgtttcgagtatcaggacttgtttgttggtagcagaatcgcttatccgagcgagagttacttatcgtggaaggtgatgagtgaggtatccatatctcggaggcgtaggagtccctcggctcggtcggcctcgccgcttacgtgtactcttatttgtccgtaggattctgttatcgatatagtcgagaaggcacgaaaaatcattttggcagaaaagttttcgagcgttaagacttgttcggtcagcagaatcgcttatccgagcacgagttacttatcgcagaaggtgatgagtgaggtatccgtatcccggaggcgtaggagtccctcggctcggtcggctgtgccgcttacgtgtactccgtcgttttcaggatcccactatcgaagtagtcgaaaagcgcgaaagatgttctggcagaaagactttttccgaggaaaattttgacgcagagggggttccccccttctagcccccgagggagggtcgggctttgccgaggcaaggcggacccttccttaatggttagactctatttgtgtatgtaaagaggacgaggtatatgaacgacttgaaaacatcttaagggtaaaagcgacgtagctgtcggatgttccaagcgttgctgtagacctcgccctgactgttggccagcttgtatgttccgggcttcgaaatcttggcgatgatgaacggcccttcccagggaggagtgagcttgtggcgcctgaaagtcgcctagagggggggtgaatagggcgaatctgaaatttacaaacttaagtacaactacaagccgggttagcgttagaaataagaacgagtctgagagagagggcgcaaaacaaatcgtgagcaaataaagagtgagacacgaagatttgttttaccgaggttcggttcttgtaaacctactccccgttgaggtggtcacgaagaccgggtctctttcaaccctttccctctctcaaacggtcacttagaccgagtgagcttctcttctcaatcaaacgggacacaaagtccccgcaaggatcaccacacaattggtgtctcttgccttggttacaattgagttgatcgcaagaagaatgagaaagaaaagaagcaatccaagcgcaagagctcaaatgaacacaacaaatctctctctctaatcactaaagctttgtgtggagttgggagaggatttgatctctttggtgtgtcttgtaatgaatgctatacctcttgtaaggtgtagaagtgtagaaacttggatgccattgaatgtggggtggttaaggtatttatagccccaaccaccaaaaatggccgttggaagtgtgctgtcgcatggcgcaccggacagtccggtgcgccaccggacactatccggtgcgccagccacgtcaccagatcgttggggtttgaccattggagctctgacttgtggggcctctgggctgtccggtggtgcaccggacaggtcctgtagattgtccagtgcgccaactgcgcgtgctctgactctggcgcgcactgtagcgcattgaatgcggttgcagacgaccgttgcgcgcgaagtagccgttgctccgctggcacaccggacagtccggtgaattatagcggagcgccctctgagtttcccgaaggtagcgagttcagtttcaagtgccctggtgcaccggacactgttcggtggcacaccggacagtccggtgtgccataccagggtgcctttgggttgtcctttgctctctttgtttgaacccttttcttggtctttttattggctaattgtgaacctttggcacctgtaaaacttatagactagagcaaactagttagttcaattatttgtgttgggtaattcaaccaccaaaatcaattaggaaataggtgtaagcctaattccctttcaatctccccctttttggtgattgatgccaacacaaaccaaagcaagtatagaagtgcataattgaactagtttgcataatgtaagtgcaaaggtttcttagaattgaaccaatataaattctcataggatatgcatggattgtttctttatttttaacattttggaccacgcttgcaccacacattttgtttttgcaaattctttttaaagtccttttgcaaatagtcaaggtaaatgagtaagatttttagaagcattttcaagatttgaaattttctccccctgtttcaaatgcttttcttttgactaaaacaaaactcccccttaataaaatcctcctcttagtgttcaagagggttttaagatacattttgaaaatactactttctttcccttttgaacataataagataccaatttgaaaaactctttttaaaataaggtggtggtggtgcggtccttttgctttgggctattactttctccccctttggcatgaatcgccaaaaacggatacttgagtgaaatataagccctttttgcctactttctccccctttggtaaataacatatgagtgaagattataccaaagacgaagagttgctcgaagcgacgacgaaggatgagttatggagtggagtggaagcctttgtcttcgccgaagactccaattccctttcaatacacctatgacttggtttgaaatttacttgaaaacacattagtcatagcatataaaagagatatgatcaaaggtatattaatgagctatgtatgcaagatatcaaaagaaattccgagaatcaagaatatttagctcatgccaaagtttgttaaaggtttgttcatctagtggcttggtaaagatatcagctaattggtctttagtgttaatataagcaatctcgatatcccccttttgttggtgatccctaagaaaatgataccgaatggctatgtgtttagtgcggctatgttcaacaggattatccgccatgcggattgcactctcattatcacatagaagaggaactttggttaatttgtaaccatagccctaagggtttgcctcatccaaagca

SEQ ID NO: 56718 - DNA, 1698 bp, Zea Mays
  misc_feature (1)..(1): n is a, c, g, or t
nagtaaagaacctatcatcgaccggtataccgtttgatcgacgaatttacctcccgtgttgaggtcaggatgcccattggttcccatgggtgtcttgatgggcttggcatccttcatcccaaacttgtttagaatgtcttgaatgtacttcgtttggctaatgaaggtgcccccttggagttgcttcacttgaaatcctaagaagtacttcaactcccccatcatagacatctcgaatttctgtgtcatgatcctactaaattcctcacatgtagattcgttagtagacccaaatataatatcatcaacataaatttggcatacaaacaaatcattgtcaagagttttagtgaataaagtaggatcaacctttccgactttgaagccattagtgataagaaaatctcttaggcattcataccatgctcttggggcttgcttgagcccataaagcgccttagagagtttatatacatggttagggtactcactatcttcaaagccaggaggtttctcaacatagacctcctccttgattggtccattgaggaaggcacttttcatgtccatttgataaagcttcaagccatggtaagtagcataggcaagtaaaatgcgaattgactcaagcctagctacgggtgcataggtttcaccgaaatccaaacctttgacttgtgaataccccttggccacaagtcgggctttgttccttgtcaccacaccatgctcatcttgcttgttgcggaagacccacttggttcctacaatattttgattaggacgtggaactaaatgccatacctcgttcctagtgaaattgttgagctcctcttgcatcgccacaacctaattcgaatcttgtaatgcttcctctaccctatgtggctcaatagaggaaacaaaagagtaatgttcacaaaaatgtgcaacacgagatctagtggttatccccttatgaatgtcgccgaggatggtgtcgacggggtgatctcgttggattgcttggtggactcttgggtgtggtggttttgaaacttgttcatcttcctcatcttgatcatggggcatctcccccttgatcattgctcctcctctggaggtggctcaacattttgattttctccttcatcattttgagctccatccttgttggggggccttcggcttccgaaggtcctcaaaaacatgatttgacaatgttttccaagtatgcgagcaggcatcttcagaatcaggttacgggtatacaagagcatggtcaagacgaagcttgactgggatggaaggcgatcatgacgaaggatgagatgatcacgaagctatatgcagaaaagcttcggcatgacagcagaaaaaggaaaccgacttaaagatgaaaagccaaattagacctcgaagaattactagagttattgataaatgtaaagggcattaatgtaattttacacgggctgcgtcccgtgcctataaatagatgaacagtattcctgtactgttcacgctgactgggcattcgctttagcatcacacttgtacccttactttccttcaagtcgaaggtacatttgtaatttgtcgttgtttatacaagtaatataataaaaggaattaataataatgttcaaattaatcatgttattttccgtgttttgtgtataaatctctctcatcttttattatgattatgaaggtgtg

SEQ ID NO: 56719 - DNA, 357 bp, Zea Mays
caaacattggagaagctgctccagaagatggacgagtatattcgagctgacaatgacttccgccaaagaagggaggaagcattcaggttctctgaaatgaccaggggcttcggaggaagatttcatctgaggcacgtcaggtcaattcataattctactcaaagtgatgatagagggagccaacagtaaaggccacaatactcctcgcaagcttcggggcagcagcaaagctctttccggccgccagccccaaggggcagaggcgtcaggggcttcgagggaagatttggggatcaaccaagaaaaatttactgcctattctatggtgaagacaagggccataccaccaggatgtgc

SEQ ID NO: 56720 - DNA, 590 bp, Zea Mays
atatccttagaggtatgaaggcagaagtcatccttgcatttgcagacatttgcattcatgaggaatatatgaagtgtgacattactatgttactattgtggtttctacctgcgaggtgtggtaactaggtgtgttgtacgttgtatacgtgctgcatcttggtaataagaaggttgtggaatcaggtggtggtaaaacaatgttcttatgtggttgaatagtttgatattattttacttgctgagatgtgtcatctcactcttgcattactcaatgcaggtacttgatacatgttgggaatgaggggagtagcagcacgtccacttacactctcacaataacgctgcccaggcgcagccatgatttaattagaaacttattgtcaaaggaagtttgtttttttatatagtcgtgcgcactggttaattcagttcaggtcgtacgtatatcttcccttgctagccgattaataatacttagtatgtttttgtcatgatatatgtttataccctgttgcccccttatttatgcaatcttgcaaaggggatgctgccgaaattttatatatggatgtcagaagtgtagttcag

SEQ ID NO: 56721 - DNA, 381 bp, Zea Mays
aatccatatcgggtcgagaaagccgtcttgggaatatccgatggcctaatcttcatttgatggtatcccgatctgagatcaatcttcgagaatacccttgtgcctctcatctgattaaataaatccttaatgcagggtaatggtcacttgttcttcccagtgacgtcgttaaaagacctataatccacgcacatcccttgcaatccatctttcttctgtacaaaaaaacaaaaaaaaaatcggtgctctccaaggtgaagactcggacgaatgtacccagcctcttgcaactccgttaactgcttcttcagttcctttagttcttcaaccggcatcctgtatggccatttgggagtaggagtagtcttaggtaagagatca

SEQ ID NO: 56722 - DNA, 64 bp, Zea Mays
gtagcaaacatgaagggggaaccaagtgcaactgaccatgctaaagcaacatgagttgcccttc

SEQ ID NO: 56723 - DNA, 284 bp, Zea Mays
aatcttccgaccgtttcccgagtcggtcgttttttttttttggcacttgtgcagatgtgcatggtgactcagattacgtgcgcaaagagtacagaggttttttttgttttttgtttttgaaggcgaaacattaaggagagagagagagagacggtcaaacatggaactgtaccgtgtgcacttgcgcacagatcatcggatagatatcctctcgaggagtccagtcaagtgtgagccatccgttgcttatccagagttgcacaccgatcaacccttggatcccc

SEQ ID NO: 56724 - DNA, 441 bp, Zea Mays
ccaaactttggcagtggtggcgataggagtctttgcgaatgacgatcaaatatgagacttgagggttgctagtgtcatccatatcatactcatagctttgttacctggtttcatcgagttagattcattattcaaataactgttgaatgagtcaatattgtaatagttgtacgcaataaacggtaaaagtcggaactattgtttttattattaaattttttttattttttttatttgttatattttagtttaaaaataaataagcgaacaacaaatatttgataactctgagaacgaagttagtatacacttaattgcgtagtacgtacgtacggcgcacatgcatgcttccacgcatcatctgtctttaaatatttcggagagacccgtgtgttcaagttgggcatcgtcacgtggcgtgtccgcgtgtgacggtcaagc

SEQ ID NO: 56725 - DNA, 615 bp, Zea Mays
gtcatagccacccgttaggtttctctagtttgataaacacagtacctctccccacaggaagggtgactaacaaaagcaacacgaaagaacctctacacccagcctcggcagagcaagtactgtgcccggaccccattgacggcacgatggcgaagccgactacatatcaagttcctctaattaatcagctaagggtgtcccatgccaccctcatggttgtactatttttccgggtggtcatccaacgaacaggtccttacaaagagatactcgagtaatagcccgagtccactaaagtggtacaatcataatcaagatatcgtcattgtatcataaatattctcaacatgttcattgattaaagtaaagcaataacatgatactaatcataggagccaattcccaagggataaccaagttcaggaaaaatagaacaccagtcaatccttaggttgatcatggtatgcgggacaatgaattataaagtaagtaggatataatgggtcaaaggacacttgccttcaccaggttgctgctcagggaaatctcctgcaagacactcaaaaaccacggactgctcgttgtctatgcaaagcaatcattcattcaacacac

SEQ ID NO: 56726 - DNA, 2478 bp, Zea Mays
cttattctggtattagtctgcccgaggcaaagcttacctatgatgaggcatgtgaccagttaaatggtcctcgatcagcaagcctacatcggcacggtccttaatcgactcagacggagacactacaccgagactcctttctcgtgcaagtcaaccgcccggtctcagctttattattttcaacccaaagtctggtacctagcagaggtacatcttttccgatgttgaacccatcaaggcctttgacagatccaccatcaagttttatttttgaaaacattcccacccactgaagcatcacctttgttttaaaacaaaacatttttgtatgctaaagcaaggctaagcatcataaaattattttcaaaacggatatcaaggaagggaaatcaattttcaaggaaggaaatacatcaacgttttagcacacaactcctatcagctaatgcatcaaacaaggtgataaagattttaaaacatcaaggaggtggcgaatgcaccggggcttaactgaataacactaggttagtgtttgttaggcgatgtccacttgacgagtatccctcgaccgagcacttgcttgatttaaccatcttcaggttggtccatcagcatcaccatgcggagtagcccgcgcttggggtcgacttggctcttcttccgcatcacgcgattatttatcgtacctcatgagatgcacgatgaacatgtatgagcacgagtataatgagtataatatagataatctacactaaaaaggatgaaacacttaaaaccaagcattaagcatcatggatatcacagcagggcatcgactacatccattaaccaaattgacataacaacactagaacatctatttttattcctagctttttattaacactttaaactgtgtatcttaattacttgatttacctttttatctaaatcgaacatcacaatatgtgtatgctaaattaatacatttattgcaatcaacaattctatttaatctatttatagaactaattgactggaatacgaattaacttacccctattatagggtgagtgctgcgtcgaaacgcgcttcttctttgcccacatcaagaattctccggtcgcgtactgattgattttcttctgcgcctaatcttctcagggcttggcgtagacgaggatgacgatcgacgacttgttcgagctgttgttgagcactttgtgaatctcacactactagcttcgtcttcacccgacacttggaatttcttgacgacgcgcagaacgacgacgagatcgtttttggagcaagctggtgaggtgggggtcgagcaggggatgacgggtttgacgactcgacggcaaacgcgagcacgcgcaaaaccagatagatgagggcgagtgcgtcgcagtgacaacgagcagacgcgcaagcgttaacgcgagccagcggcaagcacgagtgctgaggtacaaccgacaacactcggccagcatgcagcgaggcacacaaccgcgacgacagtcgaattggcaacagagtgttggcgaactcgacgaacatgaccacagtcgtgtgctgacgtggataggataacgacaactaacgagttggagcaccagcgagtagccgacgcggtgagcaaagcaggcaggacaccgggcgtcgcgacatgctagaaaaagattcggcgcgggagcttgatgtggcgtggcgagtagagaacttcgcgcacacaaaagaggtactcgacacgtgtagcaggagcgagtaacaggcgccgagctacgtgcaggcacgcgcgtagggaagaacggatcgcgcgcgcaggggcgagctaaagcaggagcaccgagcaaaggaggaaaaagcatggctgggcagagaaacttcacgacgctcggcacggcgaggacgcaagcgcagcaacaggggttagactcgacgatggaactcgacagcggcgatctggacgagtgcagctgaaagccgggaggagaccacgaccgagcgagtcgagacgacttgaacaagtgctgacgagctgggagaccacgacgcgagcaggcacgacgtgagcaggcactcaacgcggtgaccagggccgatcagagaggaactgggatgagcagggagggtgtcgagctaagtccgagcccgggtgcggcatgcgcagtgagaaaggagctcaaaaccacgctgagggaggaacagaggatatgggcgccgtcgagcaggaagaattgccttgggaaggaggccggacacggtctggcaaagtgacggcaagcaccatggcgcgcacgactcaggaagattgggcgcgcgcagggagagcaggcagccaccaggggcagcgcccaggcgcgcgatggtggaggagcaggtctcgggcgcaggaacgctcggaccaggggcgcgcgagctgagggagcagctgctaggcgcgcggccaggggggctagggagggagacccgcgagccggaagccgagca

SEQ ID NO: 56727 - DNA, 242 bp, Zea Mays
tcttaatatacattgtgtgagcataattggtgtattcaaaatcatttttcatagatatggtaaaataaaataaataaaattatgtatttgcattcatgctgagttcttctgtttgttcattaaaacttgagtgcaaattcaaaactaaatttgaattgaatttgaaacttagaaattagaaaagaaaagaaaataaaataaaaaaaagaaaagctattcctcggtttgctaggccaatttcc

SEQ ID NO: 56728 - DNA, 137 bp, Zea Mays
tccatcattgtatagcataagatatgaaatggtactggctattacaataaggtcatcacatcattaaaatgtttgtggctctaggccatcaccacatgcatcacaatagtcaggcgaataaaattattacagaccag

SEQ ID NO: 56729 - DNA, 160 bp, Zea Mays
gcgcaccctctcctctcccctctatttctccagccactagtacccgacgcctccaaaaccagtgcgcggtccgttcacagtcgtcgttcgtcggacccacgccgtcactgctcgtccaccaagaccagcgccctctcgttgctcctcacctggtatgtcc

SEQ ID NO: 56730 - DNA, 466 bp, Zea Mays
attatgttcttatttgaatggtgtaatgttcttatgcatatatatgtttgtttgtgcctgttttattcgctgtgcgtcgcgaatagattgcgatccgtttctgagcttcgagggatcaaagatcgagcgttggcgaccaagtgatccagttcttcgagttccacaaggttgaagatcctgagcatctgtttggtgaaggcaagtgtcctctgacctattatgtctcatttactttataatgcactgtcccgcatactatgaacaacctaaggatttactagctttctatttaccttgtccttgatttaccttttgggttactatggttagctacatgctagccctttactttaatcaatgaacatgatgagatacaatgataatactatgattttattctggatatgatgatatacttgtggcatttaaggggactcgggctgtttctcgagtacctcttcgtaag

SEQ ID NO: 56731 - DNA, 1154 bp, Zea Mays
cgcgtgtcgatcacatgtgtcgtgcggagtccgcacgtgataataaattgttttcgcttataaacactcatgttaataaggttaattcgtcatgtcatatattttagataatcaacttaaggtttgcgtgactaatatttattagattaatatctcggttagattaaatgtgtaatatttaatttgcgcttttcaaaataaacattaatatggcaaatgttaatctaactactttttatttacttaatatttgtttaatataaacgcgacatctatttagtttttctcgcctgtcaggcatgctgttccgcacgtggtgcgttctcgttcacgttggtcgcgcacgctgtttcgtgtgtcgtcagcgtgctatgtcgcacgtgccgcgcttggtgcgagcgctagggcgcgtggtgcggtcgtgttgtttcacgtgttacgtatttcgtcttgctccgctaattcgtcccgcttagagtcgctaatgttatttaaattacttatttaactaagaattgttggtgtggtcagctaattaaaattgtgcgatagctctagttttattttaaataaatatcgattaacataatcagatcaaactaaatgttatgattagtactcgtttagtttagacacgataacttcttgaacgtagctccgcctgtcgcgtttctttttcctcgagtggccgtagtaacacgctctatttcgttttgcatattttattatgttcttatttgaatggtgtaatgttcttatgcatatatatgtttgtttgtgcctgttttattcgctgtgcgtcgcgaatagattgcgatccgtttccgagcttcgagggatcaaagatcgagcgttggcgaccaagtgatccagttcttcgagttccacaaggttgaagaccctgagcatctgtttggtgaaggcaagtgtcctctaacctattatgtcccatttactttataatacactgtcccgcatactatgaacaacctaaggatttactagctttctatttaccttgtccttgatttaccttttgggttactatggttagctacatgctagccctttactttaatcaatgaacatgatgagatacaatgataatactatgattttattctggatatgatgatatacttgtggcatttaag

SEQ ID NO: 56732 - DNA, 232 bp, Zea Mays
cgacctctgcagagggtaatgaaactgatatatcagtcgtgctcacggttaagagcagccttgggatcctctttgattagagatacatatgatcgagatacaatggttctatttatggttttggtctgatgatgataatgatgcttcctcgatgaggaaatggttcacaggttggttatatgataaaacttggcttccactaataataaacacctggccaactaaaagcaac

SEQ ID NO: 56733 - DNA, 297 bp, Zea Mays
agaaacaactacaaagggaggacactcacatgaaagagaaagacattaagtgaaacaacacctacttggacaataagtttgtcaaaaacatcaatggtgtggttgtgagtattctaaatctttttcattgtgagaatacaaggcttaagttgtttattgcagatcttataagccttgatcaaagataaatagtgcttctccctatttgcctttaaaaatgagtgcatccacccaattctttcattcttgatgcatatctttaggaggagcctatttctatatctttgttatattgag

SEQ ID NO: 56734 - DNA, 265 bp, Zea Mays
ctgcatttgagcatggctgtggataaaaaacaaaaatcagcatggctcgacagtagagtgtggctgtgaccggtcaaaaaaatctgtgcgcgcagcagctgttgaccggaagcgacttgggcaaaaaaaaagaatcgctggctcccctgcagagttgaagcgaccggacagaggaaaaaaaaataaaagaatcgctggctcccctgcagagttgaagcgaccggacagaggaaaaaaaataaaagaatcactggctcccctgcag

SEQ ID NO: 56735 - DNA, 350 bp, Zea Mays
gtcctctatcattttccaaccctaatcctcccttagtcgaccacaaatgtcaaggtaaaaactgtctcaatctttctcaatgagcaggtgatacaaacttcttggggatatgacaaggaaaacaaaaaataaaaaggaaaatgaaaatgaaaatgaaaaaagaaaaaaaactagtgctatatgggctgattctctctccccgctggtctaaatcccatttcatagcaccgacacatgaggcccatccattagccgaacgctcgcctctgctggatggcatgtgggctccaccacttagctttccgcacatgctccgtgtcactggttgtggggccaacatgacatattcg

SEQ ID NO: 56736 - DNA, 854 bp, Zea Mays
ctacacataaataaaggtagactaggaggggtagctaatatatttacatttttgtatacatgtcattataaataattatctcttgttttctttattacaaaacataaggctataaatctttttaatttcttaatttcaaaactacacgttacaacaaacacaatacaaattaatttataaaaacatataaattattcaaactataaattcaactgatcagcgcgcgcactagtacatagctatgtaaatactatttaatttatttggatattgaatacgtattttatgaataaatcaatgtcgcaagaattaatacattattaaccatagcttctaggaggtagattagaaatatgacatttttctacctttggcggacgcgaggaagatgagcgcaacagcaacaaggcaacagcgagggcacgacaccgtacgacgcagggggctctggcgaggttgccgcaggtcgacgacgtcacagcgcagggtgaattcacgatgctggcgagtggttcggtgggcagggaacgagcgcgaacgtcgtgctgcgtggacggagctccgatggggttccacggacagcggggcggatggcgaggaacgacaagctccggtgagtctctacggactctggtgatgacagggacgaactagagagtggggagcgtgtgagagagagagctcggggaggaaggagaagagaggagctcggcggattttatagggagagggcgctggggagaagagaaagggcggccatggcttaaaggcaccattgatgaagagagggattaatgggaggagaaacggcgccaataactcatagaaacggtcgggttgacgctccattaact

SEQ ID NO: 56737 - DNA, 363 bp, Zea Mays
gtggcgacggcctgctcgtatctctgctgcgtaagcgtgtgctcggcatggtcctcggtctccagctcagcctccaccggcgcgacgaggcctttcagcacgtccagctcctcgacgcgcgctggcctacatcttggaggcctccgcgagcatcatttcccagatggcctcctccgtcgtgttctgctttctggcggctggtggttgtgagttcgtgcgtgactgcgtaagatgagagagagactagggtttggttcctgggtgattgaataaatgatattgggccggccggtttctggtgggctgaaaatgaaaactaaaaatttcggatatccaccaagacccgcgtttaaaatattaaac

SEQ ID NO: 56738 - DNA, 141 bp, Zea Mays
ctccaaccataccctattaccttacccgttgccttatcatttttcactattattttgaatcaaacttatatgttttgtaaatggtgagattcgaactcgcaacctctctctcgcgcataccctcctataccactacactac

SEQ ID NO: 56739 - DNA, 76 bp, Zea Mays
aagtttgatttattcattcccagattgaacatgtggtgtgtttgatctagatttatactaatacaatcttccattt

SEQ ID NO: 56740 - DNA, 311 bp, Zea Mays
attggtatcagagccgttctcttcaagaaagggactaatcgcccgaagagatggatcctaagggcaaggggatggtggtcaacgataaggaggagtccttcgtcaatgatccaaaggatgacaagcctactgactcaggctcggggcacaaaagaaaagacgggaggaagaagaaaacaaggcgcatcaaggagatagtctactacgacagcgatgaatcttcctcttcccaaaaggacaactacagcgactacgagaaaaagaagacgattaattcaaacttttcctttgattattctcgtattccgcaa

SEQ ID NO: 56741 - DNA, 1384 bp, Zea Mays
gtttgatatcaccgctgttttaattttaaagatacaaaattaacaaacagcgctgctgctgtatggcatgtggttcagggtgggagtctttccactgggtcttggtttcaagtgtaggagtgttttgttgattgatggcaaatgtttgtgaaatatttgtactaagttttatgcccgctagcaggtggctacactccagatcatgtctagtacatttcttcttcttcgatgaaggcaagtgaatgtagcggtggttgcttccgttctgacctgttatttctattgcctacactctaatattcagaagtattggattctttcataattggactctatggcgatgctttacttgcttgcattatactgatgctcaatcatatattgatgatgattatgtttcgagtatgattcatgagattaattcacacccctgaaggtaaatgaagtattatttgaggttggtattgtatctgaaggtaaatgaagtattatttgaggttggtattgtatctgaaggtaaataaagtattatttgaggtttgtattgtatctgaaggaagtgaaggttattgataaatgcagcatgccatatacattgcatgactcatttgcatctgaagttttgtcgtgacctatggtccgactgtatcggtacaatttagcatcgtacgttacccgaggaggggtacgatgcggcttcatacccttagaggtatgaaggcagaggacatatgcattgcattcatatgcattcattgaagtgatatttgcagatgatgtggttttatactctcaggggtatgaagatagagtacctacacattgcattcctatgcatacattgaagtgatatttgcaggtattgttgacgcagggaagtgctatagaacctattgtggttgttcgaggaaatgagatggtattggttatagtgggactactgagttccatatctacaagtatttctgatcttaattgtgactcttttaaaatgttgatgaattcaatttgtggtttaaatatcttgtcaaaattattcgcttgctgagatgtttcatctcactcttgcattactcaatgcaggtgcttgttgctcatcaagggaagtgggaagtagcagcacatccaccttcactcttataataacgctgcttaggcgcagtcatgatttaattagaatcttcttgtcaaaggatgtttgtttctaactagttgtgcgcactagataatttagctcatgccgttacggttgtcttcccattgctagcagactattaatgtctattatgttttcttatcatgatatctatttatactttgttgcttccccgtttatgccattttcaaaggagatgctgtcgaaattttatatacgaatgttaga

SEQ ID NO: 56742 - DNA, 1562 bp, Zea Mays
caacgaagtataaatagatatcatgataagaaaacataatcgacattaataatctgctagcaatgggaagacaaccataacagcatgaactaaattaactagtgcgcacaactagttagaaacaaacatcctttgacaagaagcttctaattaaatcatgactgcgcctaagcagcgttattatgagagtgaaggtggatgtgctgctacttcccacttccctggatgagcaacaagcacctgcatagagtaatgcaagagtgagatgaaacatctcagcaagcgaattgttttgacgagatatttaaaccacaaattgaattaatcaacattttaaaagaatcacaattaagatcagaaatacttatagatatagaactcagtagtcccaatataaccaataccatctcatttcctcgaacaacaacaataggttctataacacttccctgcgtcaacaaaacctgcaaatatcacttcaatgtatgcataggagtgcaaagtgtaggtactctgtcttcatatctctgagggtataaaaccacatcatctgcaaatatcacttcaatgaatgcatatgaatgaaatgcatatgtcctctgccttcatacctctaagggtatgaagccgcatcgtacccctcctcgggcaacgtacgatgctaagttgtaccggtacggtcggaccataggtcacgacccaacttcatatgcaagtgaatcatgcaatgtatatggcatgctgcatttatcaatatacttcacttccttcacatacaatacaacctcaaataatacttcatttaccttcagatacaataccaacctcaaataatacttcatttaccttcagatacaataccaacctcaaataatacttcatttaccttcaggggtgtgaattaatctcatgagtcatactcgaatcataatcatcatcaatatatgattgagcatcagtataatgcaagcaagtaaagcatcaccatagagtccaattatgaaagaatccaatacttctgaatattagagtgtaggcaatagaaataacaggtcagaccggaaacaaccaccgctacattcacttgccttcatcgaagaagaaaaatgtactaggcatgatctggagtgtagtcacctgatagtgggcataaaacttactacaaatatttcacaaacatttgccaacgatcaacaaaacactcctacacttgaaaccaagacccagtggaaagactcccaccctgaaccacatgccatacaacagcaacactgtttgttaattttgtatctttaaaattaaaacagtggtgatatcaaaaaaatactctaggagtatctacacaaaacactctacaacttcggtattcaatggataattcaattctgccatcaataagttctaaaacatctgacaagataactgactgaacctgttttagacaacaacctagttaacttcaaaattcgatatctcccaaactactgaaccaaaaattatgaaattctgctgacagtaagaacttttatccctctacaaaaatcttcatagttggaagagcc

SEQ ID NO: 56743 - DNA, 1175 bp, Zea Mays
cttagatcaattctgtcatcgaacagtgtcgccgtcatcggcttgtgagaccccatcccgtaatcaatacaattttggttggatcacctgaaaggggttgagtgcaaccctcgtccattgggacgccacaacgttgaagtaggcaagtgttctacttggccaaaccacaggataaaaatcgctgtgtcacctgttgttattcgtgtgcgattctctctgcttctactcacttgataattgctctaagtttaaatactcaccttgtgaagagcaattaagtgaagaagtcatctctttctctctagacatagcaccttggttttgattccactaacatttcataaaccaagttttgtgccatttagtgttgatttttacaggatcacctattcacccccctctaggtgctctcagcctccacgtcagctagccgttggcttttgatagattctctatttcactattgtaggtccggtgtgacaccccgtatggttcggtgcttccatttcaaattgccattggtaactagccattagacctcgatccggtgtaccaccagaatggtccagatagccagctagctagaggccgattgcagagctctctacaaaatcagtctagtgcaccatcggactagtccgacgaaccaaccaacatcccagactttgatacttctagcttcttttcttgggctcttttggtcttatgtcttggactagtgatgagtatttgtaggtattttgtgagtcttttaggtcttcttttgaggtgtcgcatccttagagcttcagttcaatccacttcacatcccatgaactataaaacacaaacacatgcaaaacatcagtccaccggttatgttgatcatcaaacaacatagtcaaatggatcagggtccattttccttacaatctcccctttttggtgattgatgacaacacaaccaaagcaagaaaatatcaaataacaaaagtaaatatgcatatacttgctatggatgcatgtgcatagacaagatgtatgagataccaaattgatagatatttgttcattttagaaattaaacacattcttgcatatgcaactagtcccccctatctatgattatggacttaagcctccccctaactccataatccacatactttctatctaggaccaacactaaacataag

SEQ ID NO: 56744 - DNA, 121 bp, Zea Mays
atcaccttggattctccccctttccttcctcccttcttccctccaccaaaaacaattgaagatccgcaccacgtgacgatgatccgagcggcaaggattggcaccttggggggaggagatt

SEQ ID NO: 56745 - DNA, 157 bp, Zea Mays
attctccccctttccttcctcccttcttccctccaccaaaaacgattgaagatccgcaccacgtgacgatgatccgagcggcaaggattggcaccttggggggaggagatgggggggggctagggtatggtggtgtggctgcaagaattgagagagg

SEQ ID NO: 56746 - DNA, 5809 bp, Zea Mays
tcattctagatgattatcatcaatcctaaaatggtttcacaaaaattaaaaatggtttacaaattaataaagatttgtttaccaatttcagggtgggggatcaggtgggtgctcctacagtcaacaaactataggtatttgtactagatcatcaagacatcaacactttggtgtgcaaagattccagcaatcgttggcaagtaccacgaaaatacggcaagcagtaaaacaccttggcaggtagtctgatgcgtgactgccacacgtacatactcatcaactgggttgagcgggcaactgtactatcggacctcttgctatctctattcaaaagaatacaactcggtgctaacagtgttgctatattaatcatttttttaaacttaactagattgctaacaatattagcaatatttatattttaaatacatttattaatatatatatatatatatatcaatagatttagctttgttaccaattatacatgataaataataatatttttttatatttaatcaaagataaaatatttatcttcccaaaaaacgagggtggtgttattttctggagatggagtaggcacatgttaaattatttctgttttggccacagtttataaaattattttttacactacaaaataagtattgtcagatttatgaagaaaatattgattttagtaggtatttttggaacaaattaattcataaagtaacataaaaagtaatatgacatacatgatcaaaattaacagtattattccatatgtgactaatttagagttcatctcaaaggtcgcacacaagaacaagagaaaagcaaatggatgaagatactctatagcaggtcagtggcaagaactagagaaaagaaaagtaaggggatgaagatatactatgtagcgggaccagtgccacgcgggcacggaggcactgttctgtgtggagttgctatcaattttaaattgatcgacattgatgggtcgatagagattgtatgttgtgtagtagtgagaatgcatcgaaaatgtaatagaatgaaacagattatgaaaaaggaaacaagttagaacaagggaccacaaaagacatacaaaaataaaaagcacaaagatcgaagtgctgacatgcatcatcacaaaagatataaaaaatagctagcaacaaagaagcaaggctggaatggagagctctaagggactccccaagttaagatatttcttagttttttctactttggattggctcaattcatggatcaaaaatcaagaccgaacctaacacgatacacccatatgtatgtttctttcggacaagttagagcagatgacccatgatcaggtctacccatcaccagtcttgcaacacaccttagctagcgtgctaaagtgattcatcatcatgggaaaagttgggtatagtcaaggaaacaatatctttaggaaggagtcatccaactaacattaattcaaaagagcatggactccctatatcaacccaaataaaaatatgggcatgaacaaggtttgaacaaaaacattcaaccctagacagtaggtggacccaagttcacaaactagtagtgtaggccaactagagccaccacttacaacatgcatgaacttgagattgatatatatactcaagtgttgctctacgaatgcaatcaggccctaatgagggttttggtgttgatgaccaccgatttagagaactaatgatatttattgatatgacaagcatggaatcaaataggaaggatgttatacaagttgaaggacccccaatcactaatggaggctttgccaactcaatgtttttaaactcttttatgttttgtatcttgagtttataaaaagtcgtagggagactcaaggatagttggtcaaactattaaaccatattccctttaagagtggtagtgttgcccttaacataaccgttagaactctgagtataagtactcatctgttcacgcacaatggctactactacttctttctcgcatttgaccatcacataacagaaaagtgttcaaccctctctccaatgttctctctcaagcttccaagcaaatctttgattccaaccataaaaacttgagagaaaagatagcaaacatctattagattagagagtggatcgattgatttcccctctcaaatagcatttggttcacgtttggtcggtggttctagggtttgttactcttggagcttgcttctagccggctaggtgttgccctacttgcctaggggatgtttgtaacacacaaatcgtagctaagaaatcaccctcacttcaagagtttggtcacttggtttgaaaacaagagaagggcaagccttggtggcaagcctaagccttttgtggcatcctcatcaatgtggacttaggcaagccttagtggcaagctgaaccacatgataaatccatgtcttgtgtgcttcacttacattcttataagttcatattattgatttaggatttatggtcgatctactagctcactagtgatatacttgatttatctctcgatctatgatctatatacctacagaaaggctacaagtttagctcttctaagttctgctaggtgcatttcgaatttagtttgaattcctctatgtaggtcggtagtgctgccctttactctgatagaatttcaagttgaatttttacaggcctattcacccctctaggccttcatccccttccaggagatcctacatgctcttggaacaacatgtctttgcacatgatcaagcacgatatgcttcaatcatgtttgatattgcgcaagtagccaattgtgttgatactcatacatataaatagacacataatttagattgaaatattatctaagtgttataagtttttagttgtctcattaaaaacttttctagattaaacatcatgagaaaaaactagaaagaaaaagggcacaccctagctcaaatgtttaatgcatacattacatgcaattatgtaacaacctacatgctaagtgagccacacattaataataccaaccccttatgcttttatccttgcttcatttaaaaggattatcccaagaatggtggtatggaatatataagccatatatattggcctaacccacactcaacatccaacactacttcataacacacatatccacctattactgttaggattgctagagccagtagtgaatttagttcattgttgggttcctaagactaggatattgacaatgattggaatccattgacccaacagtaaagctcattgtcattgtcaagtcaaaccatgacctagcaataatatatacctagtaggtttagccatgagccagcagtggtatggaagatcacactatcagatcaatccatagaccaattctgataggccaatagagtcatggcttgacccaatagtaggcacacgatgacggtgtcatgttgtggatagactcgacaatgtcctaactatagtgtaaaacctagtccccttcttgttcctctttccttctcataccaagaatagtcatttagttttccccactattctctctagtgttggatccatttttcacaaaaatgtttatgaacaagcttagttttaatggatggacatgctctcctacattaagatgggtaagtagcataccttgaatttgtagtttgttttattggttagattgtttttattctcatgattgttttttcttcattacagagagcatttttgtcgattttttatgaagactgttgcgcttttgtgaatctacgtggtacctatgaatccattttatttgtatctagttttcttcatcttgttttttgattgtctacttcaataacaataattattatacttgatgccacataaaaatatagaggctaattacagaaacataaaaattagaggcttaatgaacaacagttgtagctaaaaagaatagattgctagatgttacatggacaagtccatcaaattaaaaaaccctattatacttcatgcaagaactaaagaatcacattataacacttatcaaaactaccatttaatttggtagaaattaaatggttaacaaacattaacctttcgaaaaaagattcaccataatttgaacaccttcctcaagatctaattcaaaagtgatctcttgaatgaaaacaaatggctagagagggatgaataacctatagaaatttacttacacaactaataattacaattatagcaaatataaaagatatacgaaagcgattacttgctctagttttactcaagattattttccttaaataaataaatagtgggaaagggatatgtatgaaaaagataagctatgtactaaataagatatgcttgataagtggatgagctagcaacaagtatatgtaaaagggaggatactttgggaagtaaatcacatctggcaagatatgatatgatatttatcctcgaagtttagttgcttcctcaatgtggcaaatctaaaccaaatgattcatgtgcttaattcgtataacaagccaagcctataaagggtggcgtaagcattactctaacaaggcactccagcaagccatgatatcactaggatgtttgcgaatctcacgtggggttgaccacaaaaccccttacaatatgatgatcggagtcaacaacaatcacaaaaatctttcaatgatcctccgctatctcgaagccatataggtggcaacaaccaccaagagtaataagattctcgcatctcaatatgatcactagtatcactagatgcaaaaactctatgcaaatcactaaagatcactcccagccccactttggataaatcactatcactggatgtgagtgaaaaagtttcctttgggcttactagggtgcatatcaagttgagaagcctagattctcactgcaagcccacataatctctacttataggatcctaatggccaactagccgttggaaccattcttgtgcattttgcaaggttgtcggaccatccaacacgtcaccattagaccaaagctcaaggtctgacgaccatagatcgtttcatgtgtactaggcatttgaatgttaccattgttaccaccaacttctatcttagtgtatggtctaatgcccttagtgtgacgaccatcaaaacatagaatacatggtatgatgtctttcgttaagtgaccggagagcaaccagtaatgttgaactggtctaatgcccttcatcggaccaatcttcatggtttgacaatcttgttcccaatcacatgggagaagtgatagtgggaccgatttaataaacaatgtattcattcggttcgatgtgctcatttcctcaccgtcgaaccaaatccctagggtccaacactctctagaaaacaactagagagcaattgtgagcattgaactagtccaacgacctccatcgaaccatagcacagagttagataattactctgatcgtgcaactatggttagccattggactagtactattttggtatgatgtctctatctattagagtctaacgcctattctagacaagcattagtttttttcatctaacctttgcacgtgtgctaactccaatgtgttctaaactctagagtctatgagataacctttacttaatggtgtataagatggaaatttataactttacaagttctaatgcaaatgcatgagtttgtttaatctagtggtatatgagtaaccattttgaaccttgggttcccctctttatagcacaactacttatacaaaattcagtcacacactattgcatcttgtctggtaaaacaaa

SEQ ID NO: 56747 - DNA, 305 bp, Zea Mays
gctatctcgaagccatataggtggcaacaaccaccaagagtaataagattctcgcatctcaatatgatcactagtatcactagatgcaaaaactctatgcaaatcactaaagatcactcccagccccactttggataaatcactatcactggatgtgagtgaaaaagtttcctttgggcttactagggtgcatatcaagttgagaagcctagattctcactgcaagcccacataatctctacttataggatcctaatggccaactagccgttggaaccattcttgtgcattttgcaaggttgtcg

SEQ ID NO: 56748 - DNA, 1478 bp, Zea Mays
atcactctcaatatttgttagcacacagctgaacaaaagagttctgtttttagattatccaaagctgccttacatcatagacatagtttatactagcaacaaccagccttagagaggtattaacatgaaaggaaagtattttaacgtgctaatgtgaagggtcctcttcgggagatctgcagagctggattctgtgtggctgtttgacttctgcatagccttcagtattttgataataacttcttttaggaatctccaaatgacatggcgctagatgcgttggaaagctgacttgataagctttctcaccatatatagcatgcttaatgaaattcataaagtagtgcgtgcacctcttgctatatcttcttagctcggctacgtgtaattggtccatcaaagacttaggctggtgatgatgttggttgtacttgagttgatgtagtttgacttgggggttgtaacatgttgcttaatggcatggtcatatcatcctcctccccttgaaaaggagtcgtcctcgactctgaagtgtcttcactcgtaaatggtaagaggtcaacaacattgaacgtgttgctcacgccatagcttggtggaagatctatcttgtatgcattatcattgatcttggtaagaacatgaaatggaccatccccttgtagcatcaatttggatttgcgctgatcaggaaaatgctctttgcgcaagtgaatccaagccaagtcccctggttcaaataacactttcttcctatgcttgttcatgcttgcagccttacgcactgctttgagctcaattgcttccttggtcttctcatgtatcttttttatatatgcagcacgcttggaagcttccatattggtttttcctgcaatggaaggtgcaacaaatctaccggagcaataagtatgaacccatatacaatttcgaaggggcataaattagttgtagaatgtactgccctgttataagcaaactccacgtgtggcaaacattcctccaatccttcaagttcttctttaccattgttcgcagcagcattgacaatgtacgattcaccacttcagtttgtccatcagtttgagggtggcatgtggtggagaacaaaagtttagtcccgagctttgcccacaatgttttccaaaaatagctcacaaatttcacatcatggtaatatacgatggtcttgggtactccatatagcctcaagatttctctaaaaaacaaattggcaacatgtgaagcatcgttgctcttgttgcttggaataaaatgagtcatttttgaaaatctatcaaccacaaaaaatataatctctctttttttgagtcctcggtagccctaaaataaaatccatgtttatgcattcccaaggaattttaggagcgggtaaaggagtgtaacaccccgggatccacaaacaccccagaatgctactaaactacacatctaatattcatatataaaatttcgac

SEQ ID NO: 56749 - DNA, 126 bp, Zea Mays
aaaagtgattcaaagaaatatactttgaaattttataaattatttataattttgaaatatatgctagctcaatgacaatcctcaataaagaagctaaagatgggatatacttatataagaaggccg

SEQ ID NO: 56750 - DNA, 390 bp, Zea Mays
cttggactatatcccagatggatgtcaagaatgcttttcttaatggcgatctacaagaagtttatatgcatcctcctccaggggttgatactccctcagggcatgtttgtcgtcttcgtcgcgcattgtatgggctgaaacaagctcctcgtgcttggtttgagcgattcatctctgtcatcacagctgctggtttttcttctagtgaacatgatcctgcattgtttgttcatgtatctccacaaggtcgtaccttacttctattatatgtggatgatatgctgattacaggtgacaactcagaacatatttctcatgtcaagcaacatcttagtaaggaatttcagatgtctgatttgggaccgcttagctatttcttgggcattgaag

SEQ ID NO: 56751 - DNA, 593 bp, Zea Mays
tgttcactgttgttagcattaacatcctccccggtatcatgtatttcatcttcatgggacacattgttgtcaatgccacaaatatcatcgacatccatggcgctgtcattatatgagcaaagttactaatagttggtaaatcatactaagtagtctgtcatcgtcaacaacattaccaagggtgaggggctgcacgacggggccacagatagagggttcggccgtgaggtgcgtcttgctgctgctgacgagccgccgacgacgagccaacgatggtggccgccgaggagtgcccgctgttggggcctgatacgccggtgtggggctgctgcattcttggatgcaggggtcgacgatgcctagagctggaggcaggggtcggtgcgacgatggcggcgcctggagcagtagactgaatcttggtcgctgggagcctcggacggacggcctggacggtggacgctgctcgggcgagggaggacgctgctcggtgaattagctgctcgggcgagggaggacgctgctcggacggacggcctgaacggtggacaccggcctggacggtggacgctgcacgggcggacgcgccggac

SEQ ID NO: 56752 - DNA, 823 bp, Zea Mays
attaattttgatccactattagtttgggttggtatacatttacatttagtaactactaataaaatttgacaaacttactaaaagcaatgctcagctttaaccattatttattgatcagccttacacttcacatgaactcccaccttttgtgagttcatgcacattattccccacaacttgttgagctatgatcttttgtgagctcacccttgcgatatataaaccccccacaggtgaagagcaggtagtccaggaggaggtctacaacgagtagtacgaattaatctaggtggcgtctcccagtcagctttatggtgccaagaaataattattagttcactttattgatatcatttatttttgtaagatacttctgctatgttataatatttgtgacatttatctctatacacttcgtaattatatgtgttgttcttctttggcgcacatatgagatgcacctgggtttaccccttaaatctgggtgtgacatcacaacagcccagccttcagtttgagcacataacctcttccacctcaaaaatttgcaactccagatctcgtcaatccgtccatccaaactcgttcaaactttgagggattgttcctcaagggtttctcctccattccctaaagtcttgtgcaagttcatcaggcggatcttcagatcgaggtattcccttgtttttcactattttgccccgatctacgattctagccctcattttgcaaataccttcaaggtgtatgctaaactacacatattgaacatttcccttcaaaagtttagctttgtttttcacatttgctgtggaagagtgtg

SEQ ID NO: 56753 - DNA, 4555 bp, Zea Mays
ggcaagttgtgcccttgatcacttctttttacccagtcatgttctgatttatcataatgatctgcatatgttaattttgatggaacccaataggttaccctagtttgactatctttataccttgtttaccactaattttttgggtagtacctgctattgctttatgtggttttgggtatagagatacccactactcatgagtatacttttattatcagttgttatttactagttcatgttaagattattatgttaattggaacatggagaaccacccgggaaaaagtgctaccacaagggtggtatgggacgcccttggctgactaattaggaaagctagtggaggactaccttacccaaaaggggcaagggcagtaggggagtggtcagtgtagggagacccttgggttgattttgctgcgatggtggtcaggcgaggggtccctgcattggagcttcctataaactgtagcgggttttctgaagctagtggaactttataaaggcctcgtagtgttaccctgtctcgcctcctcggtagatgtgtatgggattgaccgtctcttggcagatgggtaacatgacttgtgggtaaagatgtgcaatctctgcagagtgtaaaactggtatactagccgtgctcacggtcatgagcagctcagaccctcacatgattaatatatggaactaaattcaatttgttatatgcattgcatcacaggtgttgttatcacttttgttctactacttaattgggttggtatttacttatacttagtaattactaataaacttttgaccaactttaaaagcaatgctcagcttttaccattctctttggtaagccttacacttcacatgagctcccacctttggcgatttcatgcacattattcccccccaacttgttgagctatgaacgtatgtgagctcacccttgctgtctcacaccctccataagagaagaataggtggttcaagatgaggcgtatggaagatgctgtgatgtgttcgtgagaggtctaggccgtcgtctcctagtcaactttaggttgctggagcgttgtcttcatatgatgtaattatttatttattttgtacaaactcctgttatgtagtaaatatgtgacattcgatcttgtgccatgattcatcatatgtgtgagacttggtcctagcacatctgatgattatgttcgcgctcgggtcttggtgccctgaaacccgggtgtgacaacacaccctctcctagcttttgttatctccttccttgcgcgaaaccatctcattttatccattcttttcttcaagatggttcgacataggaatccctttgtggtggagttcagtagcgatgaggaggagattcaggaggaatctccagttcctttccctccgcctcgttgttccctctccaagaggggccgaggctcttggaggattaagggggaggggccctccatgccctcccagccccctcgtgggggaggcaaaaggtggcctcctctcgctcttgccgtagcggctcttcggcagggaactttccctgtcaggaggaagatgacgctcaagacggtgatgttgagccgcctctgtctgacgccccttatgtcgggggcctcaacatgcatcgggccaaagtgtcttgatgccctcaagacactatggctgacttttctgtgaatggagtggactcccttcagaaaatcaggtttactaatcctaccatcttccccagacaccctggagtccttgacccatggttttggaatctttttcaagttgacttttacaattctatcatcattacaaagaagcacccagtagtccaccacagggtgattgactgggaaggctgtgagaggatgcatgataatgacatgactcaggctctcaggatatttgagcgtaaggggctaaagaacatcatgactttagaatactcctggaacaacgaggtagtggctcagttttatgccacactctggataaagaaggttgatgaagaagctgatgggtatgactacccggtcatgtacttctacatctagggtgtgtggcacaaggttagctaccatcgtttcactcacattctggatttctcggatgaagatatcagagacagcaatctcaaagtccatgacattagattgcctcggcgggaagaataagaaattgttcacatttccatataaagggagttttgggtgacctccaacatgcataggtactatcgataccttaattcactttctaggacgactgttctttccaagggtagaaatcaaatgaacgtccttggggagattcatgttctccttcttctccttactcccgatagcactgcccacataaatgtgtttgacatgatctaggaagaaattcttcgggcatcttggtctcctctgaaggggtctatccatgcaccctatattatgaagatgattgaagtcgttacccatactcattttgacgagcccgtcaagcactcccgcaatgtgccgtactgggttgactccaataacccagctgcatgttcctagcaggctcccgtagggttaggaggcccttcttctgatgagtcggctcctcagcctccgcttcatgagacctcatctcgtgctgccgctgcctcacgtccgatggaccgtagtgttcgaggtagaggttagggccggggtaggggtcggggcctatttgtgcgcctggcaaatgggatcgtcggggtcttcgccatatgccacagtcgtgctgtcaaggaggctgtgcacaggcgtgagtctcaagcacttcacgatgacatgcgaagcttcgcggcttccatgggccatcccatgccatagcaccctcctccacctacgatccctgccaaccctgagactcttaatgaatggcaccaataggagtatggcgtgccatttattactcctgaggatgaagctaaggagtttgatgactccttccagtatgctcctgctgccgcccctggacctattcttggtgaccctaggccttcaggctctggtcaccctcctcctcctcctctattccagggtccttcatcttcctcagctttccttcatctgacgagcctgggattcgacatatgatgaagagttgatgcattcattcttttcgggctatcctccctatcctcctccatcgggtcactatggtggtattgaccctgggattattgagtcttgtacctctctctgtttttggtacttgttgccaaaagggggagaagatctaaggatgtaagggtagttgttttgaagcagagtctggtagtttttgtattgcctggccactttatgacttgtatcctttcatttctgtaatattgatgaataaacatttggtatgttctaaatattttaactctatggtgtgatggtcatctggccatcaacatttgtttttaatctcatatgttaaaaatattgtatgatcatatgatatttgctgttgctgcatgatgtatgacgagattagtcaagaagtaatcatatgcatcacgttttttatatgacacccttgcacccctcagataattgtgtaaagtatggacttggtcaccttctccaaatgtgttgctagcttgacatattaagtcaacacactaattccaaattttatgcacacatttagggggagccatctatatacaattatctaaaataattttaccgcttcaaatatttatctgtttgaccttatatgttttggcatcaatcaccaaaaaggggagattgaaagtacaatcaaccctaactgagggttttggtgacttaataacaaaacaaataagggtactaacaagtttgctcctagtgtatgttcagaatctacagaaattaaaggagttataacttttgttgagaattcaaaagggaagtttcaaggacaaaccaaacacatcagtggtgccttgaaaagactccatgtgatgaacgtgtaaaatttcatatatatcttgagtcgcaggatctatttcttccttaatagttttcgcactggtaatggtgtttgctatagctcaagcctccaaattcaaaagctatttcgaaaaccaaaatcccttggacactttgtgtgttgggggccttcgtcttctaaaggtcctcaaaaacatgactaataatgtttcccaagtgtaatacacatacaggcaccttcggactcaggatgaagctgtacacaatatgggaagcagagtcggaatgaaggctgaaccagtgccaaagctgtgcgcaagggagcttcggctcagtaccagaaaaaggaaccgacttaagaaggaaaaggctatctagtccctgacagattgttcttaagtcaatagtaaacatgaagggtataaatgtaatttcacataggctgcgtcctgtgcctataaatagatgaatagtacccccgtactgttcacgccgacttgtactcgctcatgcatcacgcttgtacctttgccttctgttaagtcgaaggtacaaatgtaattcaatattgttcttattcattcataattatataataaaatatatatatcatg

SEQ ID NO: 56754 - DNA, 389 bp, Zea Mays
ggatccggctgacaaggtggggccacacgtcagttaggcgatggcacaaggagttgaccagtgggccatgattgtcggcgccaggcagcacctgggttagccatgccgagggaaaagaccaggtgggccgaattgcgggatggcggcccatgcgcggtatgtttattttttttatattttacattttttgttttcattttttctttttatttttaggtttcttacttatattaaatacacaaattcaaataccagtaggaacagaatatatttatttatatatttattttctccgttttaaataatattttccttctccttttctaaattctagattgcaaactaggtcttaaatccaagtttggaccttaatgtattcctataaatat

SEQ ID NO: 56755 - DNA, 155 bp, Zea Mays
ctggtggtctctcaaaaagtgatatcggatgtctatgtgctttgtgcgactgtgttcaacgggattgtccgccatgcggatagcactctcattatcatataggagtgggactttgctcagattgtagccaaagtgaaagggaattaggcttacac

SEQ ID NO: 56756 - DNA, 688 bp, Zea Mays
cttctcctcctccccttggccgctgcccccctgcccatctcttcctctctcaatttttgcagccaccaaaccctagccgccccccccacaatcccctcctcccaaggtgccaatccttgccgctcggatcatcgtcgtcgtggtgcgagtcttcaatcgttttggtggagggaagaagggaggaaggaaagggggagaattcaaggtgatttttgtgttcattccttgttcatttgcgctgcaatttaattgattagaggttgcgtttgcgattgggtagagggggttgtccagaattttaggtggtgggtgaacagcagtagtctagcagtttctgtgttttttcgtgaggaattaagggaaatcagtttggggatcatgtagaactttaccttacctttccaacgagtatttatgcgctcaatttggagttataaattgaaagttatcaccgtttgaatccgggtatgtggctgtccaaaaaaacagattttcagggggatgaacagcagcagtattagcagtttctgggaatttttcgggagtaattagtgctaatcagtatgagaatcatgtagggctttatgttatctttccaacaagtacttatgcgctcgattcggagttataattcaggagatatcgttgtctgaatccggttatgttgctgtccaataaaacagatttt

SEQ ID NO: 56757 - DNA, 487 bp, Zea Mays
ctcccctaggccgccgcctccctgcccatctcttcctctctcaatttttgcagccaccaaaccctagccgcccccccacaatcccctcctcccaaggtgccaatccttgccgctcggatcatcgtcgtcgtggtgcgagtcttcaatcgttttggtggagggaagaagggaggaaggaaagggggagaattcaaggtgatttttgtgttcattccttgttcatttgcgctgcaatttaattgattagaggttgcgtttgcgattgggtagagggggttgtccagaattttaggtggtgggtgaacagcaatagtctagcagtttctgtgttttttcgtgaggaattaagggaaatcagtttggggatcatgtagaactttaccttacctttccaacgagtatttatgcgctcaatttggagttataaattgaaagttatcaccgtttgaatccgggtatgtggctgtccaaaaaaacagattttcag

SEQ ID NO: 56758 - DNA, 1055 bp, Zea Mays
ctcaattgtctaatattgtggatgatcataatttggtaatgatatatgtggttgattcccatctggatgaagttgaagtgtcttttgaatcatgttatatgaagtgttgtaggcatgacatgcacatcgcatcatccatcttgcattttgaagttatgtcgtgatcttatggtccgaccgtaccggtacatttttagcatcgtacgttgcccgaggaggggtacgatgcggcttcatatccttagaggtatgaaggcagaagtcatccttgcatttgcagacatttgcactcatgaggaatatatgaagtgtgacattactatgttactattgtggtttctacctgcgaggtgtggtaactaggtgcgttgtacgttgtatacgtgttgcaccttcgtaataggaaggttgtggaatcaagtggtggtaaaacaatgttcttatgtggttaaactgtttgatattattttacttgctgagatgtgtcatctcactcttgcattactcaatgcaggtacttgatacatgttgggaatgaggggagtagcagcacgtccactttcactctcacaataacgctgcccaggcgcagccatgatttaattagaaacttattgtcaaaggaagtttgttcatttttttatatggtcgtgcgcactggttaattcagttcaggtcgtatgtttatctttccttgctagccgattaataatacttagtatgttttagtcatgatatatgtttatactctgttgccccctcttttatgctatcttgcaaaggggatgctgccgaaattttatatatggacgtcggaagtgtagtacagtagcattccgggttgtttgtggaacctggagtgttacatgcccctatttctaaacggccatataggatttctgtagaagagttaaatgaacttaagaagcaattaacggaattataagaggctgagtacattcgtccgaattcttcaccttgggggagcgccagttctatttgtgcagaaggaagatggatcacaaaggatgtgcgtggattataggtcccttgac

SEQ ID NO: 56759 - DNA, 430 bp, Zea Mays
ctggcgccgcgccccatctcaaatggcgcttggctgcccagctccctgcttttctagagcgccggcgatctctcgtggctctccggtgcccaggtctactcttcttcctccaaccgcacctcccttctctctctccctcaagttctctgcgcgtatcgagcttctccgcgatggctgccatggagtccaccagcggtcgcgcccagctcatgttctccatggtgcgtggctctgctactcccctcccatctccctgcgtctctctctactcgctgaccgagctccttccctgcagccgagtttcttcttctacagcccgtcgcgactgctccctttgcctggccgaggcttcccctgctcggtcccctgtcggcctgctccctcttcctggcggcgctcagcttctccgctccaccagccgtgccctgcg

SEQ ID NO: 56760 - DNA, 285 bp, Zea Mays
cggcggctaggattagggtagcgagggaggcagagtggcggccgacccttacatgggcctaatgggtcgttagggttagttaggttaggttttagttttttttcttttttttctatttcctttttctaaattcaaaatatacttttaaataaccctaaaatttataataattaaaccaaaattatttttaaataaaatatttatttttgaactaattattatattatttatttggtttttcattcacagaaaaaatgatattcaatatccaaaatccattatgag

SEQ ID NO: 56761 - DNA, 4007 bp, Zea Mays
agggaaataatgatccaaaggacgaagggttttgatatttaacattttatgttgccttgttcttgattcatagcatttgagaacaagtccccaacaagtattatttgacactggtgccacgcattcttttgtttctacatcatgggtagaagcacataacatccccagagaatcaatgtttccacctttaagagttaattcagttgggggaaaagttcactccgataggatttgttcgaacataaggattgaaataagggggatagacttccccgctgacctagtagtaatgggtactcaatggttagatgtcatcctagggatgaaatggctatacaagaaccaagccaccgtcagttgtgataagagaacagtcaagttggtgtccctatccggaaaggaagcagtaaccaagttgtacttgcctaaactagaagaaggagcctatcactatttgtcagtagatgacaaagaggccaacccaatcgaggatattagaattgtgtcagaattcctcgacgtgttccccgaagagttaccaggcatgccacctgaaaggaaagttgaatttgccatagagcttatcccaggcaccgcccctatttccaagagagcatatcgagtgtccagaccagaattggtggaactcaagaagcagattgatgagttgttggagaaaggctacatcagaccaagtacctcgccttgggcagccccagtgctttttatggagaagaaggatggaacaaagaggatgtgcatcgattacagatctttgaatgaattcactgtcaagaacaagtaccccctgccccgaattgaagatctattcgatcagttgagaggagctagtgtgttctcaaagatagatctaaggtcacgttaccatcaactcagaatccaaccttcagatatatcgaagacaacattcatcaccaagtatggactatatgagttcacggtcatgtcattcggtttgacgaatgtgccagcttacttcatgtacttgatgaatagtgtgttcatggactacctcgaccagtttgtagtggtgttcattgatgatatccttgtatataccgagaatgagcaagagcatgaagaacatttgaggaaagtattccagaggctacgtgattgtcagctgtatgccaagcttagtaagtgagagttctggatcagcgaatttctgttcttgggtcatatcctaaaccgagatggactagctatggatccaaagaagatagcagcgattctggactggaaagcaccaaaagatgtccgaggaatcaagagtttcatcggaatggccggttactatcggagtttcattaaaggtttctccaagattgccataccaatgatagccttgctggcaaagaaggttgagttcaagtggaccccagcatgccaagagtcttttgagatattgaagaagaagttgacaatagcaccggtattgattctgccagacgttcacaagccattcccagtgtattgtgatgcttcatacaccggactgggatgtgtatttatgcaggaagggaaagtactggcatactcgtcccgccagttgaaggttcatgagaagaattatcccactcatgatctagagttagcagtagtggttcatgcactgaagacatggagacattatttatatggacagaagtgtgatatctacacggatcacaagagcctcaagtacatatttacttagtcagagctaaacatgaggcagtgaagatggctagagttgatcaaaacaaatgagctagaaatacattatcatctaggcaaagcaaatgtggttgcagatgccctgagtagaaagagtcaagttaatatgttggccgctcacccgatgtcgtacgagctagcaaaggaattcgataggctgagtctcagatttctaaataacactcaaggagtgacagacgagctggaacccactctggagcaagatatcaggaaaggtcagaaagacgatgagaagatcaacaagatccgggagctgatcatagatgggaaaggtccagatttctgtgaagatgcagaaggagtggtatgctttaaggataggttatgcgttcccgacatcaaatcgatccaggaactgattcttaagaaagctcatgagacaacatattctagacaccctggtagcgagaagatgtaccaagacctgaagaaaatatcctggtggtacggtatgaaaaggaagacagcagagtatgttgctagatgcaaaagttgtgagaggatcaaggcagaacatcagaggcccacatgtttgttgcagccgttgcagattcctcagtggaaatgggacgagattgggatggactttatagtcggtctgcctcgcactcgagctggttatgattccatctgggtagtagtggaccatttaacaaaggcagcccatttcataccagtcaggaccacatatagcagtccaatgctggtagaattatacatttctcagattgtgtgcttgcatggcgttctaaagaagatagtatcagacagaggcacccagttcacttctcatttttggcagcagctacatgaaactttgggcacacacttgaagttcagttcagcttatcacccgcagacagatggtcagaaagagagaaccaaccagattcttgaagatatattgagagcttgtgctttgcaagacaagttgggttgggacaagaggctaccgtatgtagaattctcctacaacaacagctaccaagccagtatgatgatgtcaccattccaaccactttatggaaggaattacagaactctgttgcattggcaccaactcggcgaaaggcaggtgttcggtccagatattttgcttgaagctgaagagaatattagaatgattcgagagaatctaaagacaacacagtccaaatagcgaagctatgctaacatctgaagaagagaactgagttttgaagtgggagactatgtttacttgaaagtgtcacccatcaaagggaccaaaaggtttggagtcaaaggcaagctagcacctcgatacatcggaccgtggagaaatggcatatcaactcagcttaccagaaaatctgtccgtcgtgcacgacgtgttccatgtgtctcagctaaagaaatgcttgcgagtaccagaagagcaattgccaatagaggaccttgaagttcaagaagatctgacttatattgagaagccaactaaaattctggagacaacagatcaggtcactcggaggagcactattaggatgtgcaaagtcaaatggttccatcactcagaagaagaagcaacttgggaaagagaaaatgatctgagagccaagtaccatgaactctttgctagccatccctaaatcttgagggcgagactcttttaagggggataggtctgtaacaccctgaatttggggtataaaatttctttctaatattacctaccaaattcaggagttactcttctctctctctagtttctctctctctctcttttttcttttgagtagatttagcttaattagtgagggattaattattttgtcaaaacaatacgagtcatgaaatgttgcatcatgctgagctccaaatattctttgaattattgcacatgtttgatttagtttgaatttgaaacttggtttgaatttgaattgaaaaccctagggaaaataaaatagaaaaggcattagaaattctaggtaaatggaaaatcccttttcagcccaagtcggtccagcaggccctaccccgcgcgcgcgcccgcgagcccttagttactgacaggcggaccccgcccgtcggcgcgagtcggcgcccacgtctctctctctctcccgctcgctgccagtgcggccgatctgtcagcgccgtttcttttcgcgcacgcgcacgtcccttctcgttgccccgtggaccccacccgtcagaccctgtccctaacctcccgcccgtgcactctcacagtggacgcacccacgtccccgcgtttccca

SEQ ID NO: 56762 - DNA, 684 bp, Zea Mays
ccgatttgaagctcggacaacacgtgagcgtggacgacagttgctagcgtggggcacgcagtgagcgtagatcggggtgacggttggggaagtgggggctgacgggtgggcctgggtgtcatcgacgaaaacagagcgggctctcgtgcatcggtgctgataggcgaggcccgattaggagtgagggaggctagcgaggcacatgcgcgggtggggtgagatgggtcgagtgggctgggtccaaaggccaggtgaggggggaagggaaaggttttttttttattttcctttttttctattttgaatttgtttctcgtttgaattcaatcccaattatgcttcacaaatttgaatatacacacatgaatacaattcaacaacaataagatagatgctccagcatgtgatgcaacaattataactcccttatcgttttacttgccaattaatatacgtaaataatataactatccccttttaagaaaaggaataaagggaaagaaaagagagggtaacacctgaattttcatgggtattagaaaagattttttataccctaaaatttaggggtgttacaactatggcgtacgacacaggagtgtacaaccctaaatatctagggcgtgcgccacaatattcaaggacatctatagcagcatggaagacatactccttcaactatca

SEQ ID NO: 56763 - DNA, 561 bp, Zea Mays
gtgggagtctttccactgggtcttggtttcaagtgtaggagtgttttgttgattgatggcaaatgtttgtgaaatatttgtactaagttttatgcccgctagcaggtggctatactccagatcatgtctagtacatttcttcttcttcgatgaaggcaagtgaatgtagcggtggttgcttccgttctaacctgttatttctattgcctacactctaatattcagaagtattggattctttcataattggactctatggtgatgctttacttgtttgcattatactaatgctcaatcatatattgatgatgattatgattcgagtatgattcatgagattaattcacacccctgaaggtaaatgaagtattatttgaggttggtattgtatctgaaggtaaatgaagtattatttgaggttggtattgtatctgaaggtaaatgaagtattatttgaggttggtattgtatctgaaggtaaatgaagtattatttgaggttgatattgtatctgaaggtaaataaagtattatttgaggtttgtattgtatctgaaggaag

SEQ ID NO: 56764 - DNA, 54 bp, Zea Mays
cgtacttgcacatgcatggcttaatctttgagacaagcatatgactactggagg

SEQ ID NO: 56765 - DNA, 335 bp, Zea Mays
gaggattgcatgggggtttaactgtcgttatttgcagttttggcatggacccttttttgtgatagtcagcatggttcccacttagcggcttcaatctcaaagtcattggctggcttttgtattaagatatgggtctgcttatcgtcctcagatagaccctagtgagcagcaactatggcctcaatctcatcagcagatagtcgtgccctatggccagaaccactacattctccatgaatgagagggttggacacgatctcgagaaaaggactttgcaacaagaaagcagtactgtcagcataaataatagagtaactcgatgattagcaatggaa

SEQ ID NO: 56766 - DNA, 268 bp, Zea Mays
cttcaggggcatatccaaacatttagctttcttgcctcaacgaagttctaggctagcccttccaaccacttgttgttgtccacccaccatacctggcttacagtggtagagatacctccacaatctaaaatgtgggctaatcccaagaaaggcttcgctgagatgtacgaagatggcaatttgtagaacagaattgagattcatatgagtcagattaagagaatagtagtcaagaagacagtgaaaggaggagacgagtaaacctaaa

SEQ ID NO: 56767 - DNA, 213 bp, Zea Mays
gagtgaagtgaatggaggtggttggggttgtatttttagccaccaaccactttctagccgttgcccctttctgccgaccgcggacggtccgtgcccctggtccggacggtccgcccctacagatcaacggctgaaaacacaacagtcagcagtaacggctatatcaatggctacattgcatttaatgtgttgtcagatgtcagataaaggcag

SEQ ID NO: 56768 - DNA, 6435 bp, Zea Mays
caaccaccaggtttgaccctatttccctttcaccatgcaaaagacccttgctactactactacacctaccaactactactacactacataatactacgaactaagccgttggcggcttgccaccggcgttgctgcccttgccgccaccattgcctccattgccattgccattgccatcatcgctatcgctgcccttaacacggctgccgttgtcgccaccactattgcttcccttgctactgctgccgtcaacgccgcctttgccgccgttgccaccgccatccttgcccttgcttccattgtcaacattgtcatccatggctccttcatcaccaccatcgtagccatcgtcatcgtcatcgtcctcctcctcccctgactcatccaagtcatcgaggtcggacagctcgatgccccagagataagccctctccccgctgacatccccatggagtcgtccttgcaaacggatgatggggagccaggggacggcagattggtcctctcatcagagagctctgtgtcactgaagtcctccgatggcggagttgcaggttgtttcctcttgtcacccctggtgttcctcctacccttatcgtctttctttcccgccatcggagtttctagaagaggagaagaggataggaggaaacaagaagtatgtgcaagtgaaggagtttgcggcacacagttggtctatttaaagaaatgaaacagtacctctttgtattccggtcgtacaacaaacagtcgccagccttcaagagtcgtttggattccaagaaattgcatgcttctgtcaccctttggcgtaacacaacaccaacacctcaaacaactattccgtggacaagacaacgtacacacgcattgggcacacccattgagtgcacagattagattttctagaaaacacaatatatgaaatatcaacgacagtcctacaatatgacaaactcaagatcgatagaagtttactggtcaaacctgagtcaaccagacctatatcagttgaattcagtcggtagccttagcaagcctggccagacatgccctgactagagttcagtcagccaggccatagtcggttgacccttagtcggccaaaccaccctcaagacaaagttagttggctagatgccgtcagaccagaagcatggtttatacacaaccagggaagtaaaataaatcctacgaaggcaagatcttgggaccttcatgttgattgatactcaaatcagctcgaaactcaggggctacactcaatgaatcaaagcataaaaaactgcactcaaagaaatacgatcaaatagcttaattcattcttagacgtgtcctcgggggtttgtgggagatatatatcccatgggtcatcacaacacgaatatgttccatgggccacctaaaaagcctctgataagtcgcccaacagtgcatactatcgagaagcattcaggcaaaacaagatcaggcaaaacaagatcaggagaaacaaaatgacgtggccagcggggaacaaactcgaagaatatggcacgagaacgctatccatgcgccattgtcgtaggggaatggtggggattctgagacgcgtcctggacacgactagatagcgacctactcagaggataactcagaggaaaagcaactgaacatcggaagagtaggcacactcgcaatagaagatgatagactcaaatgatctataagataggatatctctctagtcagctatataaggctgcagagattaccctaccaaaaccctctctctctctcttgcccaccattggattgataggaactctttcaatcacttccacagctacctataatctgcaaactcaaagcaatctaatactcaacaccacacatgatgtatggtgttacacgttcacgtggcccgaacctatataaatcttgtgtttcgacatgcatcgcacatagcattgagcagtgatcgacgttgacgtcctcctaaaaagcactacgtgagctaccccatagtgcgcagtcgagactaaacaccaacaacggttaccgcccctggacccttcgcctttgagttgtgcgatagtgggccactcgaccgaggcgatgtcaatggcggcggacgtcgttgaggtccagcttccatatgcaccaggtccctaccctcctgctgcacagagggtggtggtctctttgctacttgctctagaggagggctccgaggatcttcccgccttatccttgaagggactggagtcgaggagatggaggcagaggagagaaggtttgttgagggggctccatccgggcaactaagagcctagagatcatcgagggctctaacacctctgccatggaagtagcggtgattgtgcgtgtgtcgatcacgcaagagttgctccctttcgatgtggtaagtctcatctcctttttgccccttagtgtttctaggattcctcacctgagtatcactcctagttgtagcgtctcctaacccagtcgtcgacccggagtgacgcactgcttgcagcgcagtaggaggtggagcacttgctcactgaagctgccagttcggaggagcgggagctgttcgtgctcactcttaggctgagaagccttgggcggaggtgacgcgcctacgcacatagcgaaatgaggcgcggggtgacgtggatcgccttcggggggagaggtcatgcttttagggagctctgtcggagttgacccgacataccgatgacaccgagttggcactaaactcagctaacgctcacctagaggggttggatgcagatctctcgcgagaacgtgaggcatccagaggtacacccttttgggaacggggttgttcttgattggtctatgtctaaggttacttacatttcttcttttgcagagctctaaaagatgtcctctgtggctcgggacacccaaaatgtggtagacgatgagaagcacaagctctcaattgcttgtgacgccaccgtaatcgcatggctccaagccgaggattcactctcggagtagagcgtggagcttcatgctctatggttggccacgggcatgtcatgtgtgcacctttgtccttcgatgacgacaatggtcttgttgaccgagcaactgggaatgttgtggggccacatggaatttgtcgtcctagaggacgcgttcttcatgagcaatatgccccttggacagatggtccctcacttcgatgagatcgaccctgtcatgagtcgcatcgaagaaaagttgcatcggatcgaagctcaagtcatccctcatgctcagctaatagtgtggtgagtcaacatggggcttctcctgcgatgctcccagccacagctccttaaactttgtctttagcttctgttttgtaaataaactttaatgttgaactaaatgtgaatgagactttatgctatgtgtcgttgagtttgtttgtttttgggttgaagtccacgtctttatcttttcttttaaggcctggttagtttgtccttttgattgagcgtcttgagttattgtagccatggccgctgggcccttttagggtgtggatgtgcctcgagatggatctagacaccagaacgcttaggcgagagagaaaatagtcgtagaacagtgagcgggcttaagggtataatgtggtgcttgctccccagcccctgagcaaaacttggcgacttggttggcatagcaatttggttgacatgttttgtttgtgtatgaatagagaagggacaaaagagtaacttaggatataatttatttagcttttcgatgttccatgcgttggataagagattgccgttgtcatccttgagtcggtacattcctgagcgtaggacttcaacgacgatgaacagtccctcccatggtggggagagcctgtgctcatcctgggtggtcatgatgacaaaatgctgatttctaaagcataaaatgaagacctttgaatgcattattttcaaaatccactcaaagctcgggggctacacccattgggtgcacctttggtgcacctaatagatttttagtcccatgaagataaaatgcttatttctgaagcataagatgatgacaaaatgctgatttctaaagcataagatgaagacctttgaatggattattttcaaaatccactcatagctcggggctacacccatttggtgcaccttcggtgcacccaataaatttttagtcccatgaagataaaatgcttatttctaaagcataagatgatgacaaaatgctgatttctaaagcataagatgaagacctttgaatggattattttcaaaatccactcaatgctcagggactacacccaatgagtgcaccccttcggtgcacccatcggcaaaatagaaaccatgtcatacaacgaacccatgagctggacctagaatctttgggctgattatttcaaaatcagctcaaagtttgggggcttgtgggggatagatatcccctgggtccactagaaggcaagaaggcctcgcgcgggcccttgggccagttacctcacaaggccatcccttcgtgggccgggctagaattactggtggaacgggccgacctaagatagcaacagatttaggcccaggcaacccgtcaacttgtgcgctatccatagcaaccgcccgactttctcgcgcatggcgtccttgaatatcggggcggattagggataagtcggcaatattgtaggaagatcagttcagtcggttcactattatttaggagacatgtgacacggtcgagtatataaggctcagggggtaccccatcatttccatcgactatctacctatctcattagcttttctccattcaggagacttcacttgtaacccaccacataaagatccactccaggaagtagggtattatgcctctctaagcggcccgaacctgtagaaaattgactgtccctctctcatgcatctagcacgaaccattgagctataatcgacaacaccttcctacccaaaagcatcgcaaggggtaaccctgggtgtgaggtcagactctaaacaccgataagaccctttgaagggtacgatccaactaggctccgtggcgagaatggaggctgcgaacgtgctggtaatagccgttgggggaggtcccttcctgaagtacggatggttatagggacccgatcctcgatttcacatggggaatttctctattagggaacgagtatgaggctaatttagtcccaacggggatcaaaacaagaaaaatttggtccctatcgggttcgcgggaaaccatacccattctcgttccctgcaacttctattgcataaaatagtatattgacatgtgaaaattttattaaaattaatatataaccaattataaaatagcaaactaaactttaaagtaaatctctcttataatttaaaatattgtttattcaatttatattgatttggtataaatttgcctttaaatatagcatttcttaacagggatagaatcctcgcgaagataaattcctagacgaggatgtagataggagaaaaaactttcccgtgaacattcgttgggatagggacgaagaattttccattgtcatttctatctaaaggccagcatgctatggtagggacattaaccacacataatgataactctgtaagggcatgtacaacctagatactatattataatttttcaagcactagatacacctaagaaacctctttttatgtacaacccaatatatttaagccttgtatcttactccctccgtcccagtatataagacataaccacctctagttcaaagaccaagaaatgaatttaattctctttatgccactgcatcgatgcatgtgagtctagagagagcacacgtaatattatgggacaagaataaaaagtgattacgccttatattatgggatggagggagtatttactagaacttttcaagatacaattgtaagtgtaactgtagctagactagagaatcgtgctagagacgttccttcactaagatatcgtctcttgtgtttttttgcacctactcatttaatacccttaagatatatgacatttatgtgggttgtacataccctaatgggatcttatcatcttaaaccacctcgaggttgagagcccacattgtccgttctttctatgcatgtttgtttttcttgtggcgcttagaataaccgtactcagggcgctgaccttatgtatatactacctccattcacaaatatatgacactattgattttttttcgaaagctttgactactcttcttatttataatatttattcaaaaatataaaattttaagttaagtataaactacattaagtgacaaaacaaataaataataaataataagttattattattattttgaataagacgagttgtcaaatatttttaaaaagtcaattatatatatatatatat

SEQ ID NO: 56769 - DNA, 778 bp, Zea Mays
ggactcttccccctcgcctcagcaggaggtggagtctgagaggccgccttcccttgcacctcagccagagatgcccccctgcaccaccacagagcatcccggctgctggaggagaccctgtcggaggtggagacgacgacgacgccggtggcagttcgagccacaacacggagctctcggaggagccagagctgaaggggtggatcgctagacccatcactcatgacgccgcttgcgggtgtcacttccacgacgctctcaacaccttgctgcgtcgggccttcgaccgacacacttggtctatcgagtaccattgtgtagtctaccaacatcgtcgcgggttatactcggactagtgggaggctacttgcctagtgcgccatccggacgatgatctctggagtgcagaggccatctcagagcactattcttttactgagagggacactaccgagacagccatgcaagatgcagcacgacgagcattttctcagtattgctcgttgttcagcggggtagctgatggccttgacttgaagtactaccctcaccattcgaccggcagtgctggaggtgtgattgtctcgcctattggtgagggcaatcccaggctgaacaacatggtcaatctggccaccgtgctcaacacagagctggaccatgcccttgacgagttgggcaaggttcaggcagaggttgcggaattgcatgctaagtgtgtagcatgccactatctagatggtggttctcccgcccctgtcgggattcaacaccctta

SEQ ID NO: 56770 - DNA, 249 bp, Zea Mays
atcaactctttttaaagaaaaacctagtaattaatataataattaaataatataatagttattagtctaaaaacaagtattttatttataaatagttttcgtgcaatttttatgaatttttgagctctttaaaaatatatttcggaactagaaaaaaaaagaaaaaaaccctaacctagccggcccactaggggcccaatccccaaaacctagtgcgcgcgcgccctctcccacccagcagaagccgcc

SEQ ID NO: 56771 - DNA, 406 bp, Zea Mays
attcaaacgaaaaggttgttgactacaaagttaaatgactttttaagttctactacttttattttgatactttttctatccgggatcgtttgcatttcaaatttgacaaattcaaatgcaattttggcagcccaaataatttcaaatgaaaggttgtcaactttaaaatttcataacttttagaaatctacatcttttacatactaggtcgtttcaaaaattcactggcgtttcattgagttggacgaactattttatttcgctggcgttctacagccaaaaccgtccgtaaaaattaggcactaccacatgcatagagttttttttctattagtgatagaaccaatccaaacaataattaattaggagcgaaacatttttatcacatcatattacagaaacaaac

SEQ ID NO: 56772 - DNA, 519 bp, Zea Mays
cagcaaggttcatggaaggagggggcctaaaaaggtccagctccccatcaggtccttcatttgttgttcccgatggtctagctcccactgcagcaacgtctggaggcacatccgggtgcagtcgagcatacaatacatgcacttcttcatgtaaagtaatacagtacaattgcaggctttcgagagacacgctaagttctgccatgtgggcaagagctttcgcttcacagtcccaagcgaaagagcgcgagttgatggcccaatcaatggttgtatcccgttccgagatttcgtactacaggcagctgacttcggctgacaattctgctatacggtgactgtcctgctcgcgtgccctattcctgtggcgtaactctgaccgaagttgctctacccgggcttcgaggtctccaatcgggtcattactgccactactacttccctcgtgtctgggggctagttgatgtcgaggcacaccctgaggtctagtagatttgcacactgttttcctagtacacg

SEQ ID NO: 56773 - DNA, 361 bp, Zea Mays
ctcggatctagtccgataaagccacttaccaggatcgaataccactagctcactcgaaggcgaggcacagagaaatacaataaagtataataccacaaatttaataagtatcaatattgattacattatcggagtttcaaaagcagtaacaatatttttagtgcagcggaaataactaaatggagaaaaccaagtaacatggcgaagcctggccacgctactcctcctgatcctctcctgcggaagcaataaccctctcgaccatttatcccggtggcagggatgaaggccaagtcacaccagcaaccaatcatcctacagagtacctgcaaaaattatgccacaagcaaggctgagtata

SEQ ID NO: 56774 - DNA, 540 bp, Zea Mays
gaaaaactgctataatcaaactgcaataactctctgatctgatatccgattgaggtgttcttcgcggccacggaaagatctacaaattatctacgacttatatatagactttttatttttttgaggcctctaagaccacagaaatctgtgattaacagaaactgtcgaatctgccattctgcagaaaactaaattcgagatcaaaacctaaccccacatctaatccaacctctaatcctttaatttccatgacccacaacctccaaaagcacataattacagggaggaacaaggatctcatccatacctagggtttccccaagaaattctgcaagaagagatggggaagaacatctccttgatcctctcttccccttcaactcaatgtgctcctcctcttctcgatccttgttgcgcgggggaggggagatctagagggaggaggaagccatggagaggggctgccatgggaggagaggacagccaacccaagggaaaagaagagaggggcggccaagtgtgggaggggggaaaggggtg

SEQ ID NO: 56775 - DNA, 247 bp, Zea Mays
tggcctttctcttaaatcatggtcaataggcatgggtttgcttccttttcatgggtttgcatttttctctggtagtttatctcatcatggacttagctaatttttggttgcccattattacattaataggggttgttcatgatttattggaaaaatgccttattatcactttgtatttattttccttacttaaaaagttgggctgaggtgctctgtatttttgtagtggggctctgatggttataag

SEQ ID NO: 56776 - DNA, 578 bp, Zea Mays
aaaggtttatcttcggtgcgtggatgtggggaaagagttgtgggccgttggatgcaaagtcaagagacatctgatgcgtcgtttctttttcccacaaaaccctagtggtcgcccccctatttttcccttttcttggccgccaacccccccttttccccacccttggccgcccctcccccttccccttgcagccaccctccactacttcctcctccctctagatctccccctccccacgcagcaaggatcgagaagaggaggagcaagatggattgaagaggaagagaggatcaaggagatgttctacccccatctcttgcagattttcttggggaaaccctaggtaaggataggattcttgttcctctctataattatatgcttttggaggttgtggatcatgtggattgaaggattagaggttggattagatgtggggttaggttttgatctcgaatttaatttctgcagaatggcagattcgacagtttctgttcatgtcagttttccgtggtcttagtggcctcaaaaaaataaaaaatctatatatgagtcgtagataatttgtagatctttcc

SEQ ID NO: 56777 - DNA, 857 bp, Zea Mays
tgatatcaccgctgttttaattttaaagatacaaaattaacaaacagcgctgctgctgtatggcatgtggttcagggtgggagtctttccactgggtcttggtttcaagtgtaggagtgttttgttgattgatggcaaatgtttgtgaaatatttgtactaagttttatgcccgctagcaggtggctatactccagatcatgtctagtacatttcttcttcttcgatgaaggcatgtgaatgtagcggtggttgcttccgttctaacctgttatttctattgcctacactctaatattcagaagtattggattctttcataattggactctatggtgatgctttacttgcttgcattatactgatgctcaatcatatattgatgatgattatgattcgagtatgattcatgaaattaattcacacccctgaaggtaaatgaagtattatttgaggttggtattgtatctgaaggtaaatgaagtattatttgaggttggtattgtatctgaaggtaaataaagtattatttgaggtttgtattgtatctgaaggaagtgaaggttattgataaatgcagcatgccatatacattgcatgactcatttgcatctgaagttttgtcgtgacctatggtccgaccgtaccggtacaatttagcatcgtacgttgcccgaggaggggtacgatgcggcttcatacccttagaggtatgaaggcagaggacatatgcattgcattcatatgcattcattgaagtgatatttgcagatgatgtggttttatactctcagaggtatgaagatagagtacctacacattgcattcatatgcatacattgaagtgatatttgcagg

SEQ ID NO: 56778 - DNA, 224 bp, Zea Mays
cccccctcctctctcttccactcttgcagccaccccaatccctctcctttttccccaagtgattccagcgccatccctcaaccctagccgcccccccccccacctcttcctctccatggtggagtctccccgcttggtgtccgtcgtgtgggtgcgagtcttccatgggagtttggagggaggaagaaggaagaaaagaaggaggaaaggaggaacccaaggtg

SEQ ID NO: 56779 - DNA, 412 bp, Zea Mays
tttttctccttcggttacatcaaaccctagcgcgccgcaaccatcttccttgtttttctccttcggttacatcaaaccctagcgcgtcgcaaccatcttccttgtttctctccttcggttacatcaaaccaattcaacgccacaaaccgagtcaacaccgcttccttgtttttctctttcggttacgtcaaaaaaaacagaaacaaaaaaaaaagaaaaaaaaacaaaagaaaaaaaagagagaaaggatagaaccagagaacaaacaaaaaaatagggaaaggaaacaaagcggttgtctcatctcggtcggtttaaacataacttgaggtaccttccttaaaccgggcataacttttcgctcggttgtccaaaaaatctgaaatttttacaggagctagttgacaccatt

SEQ ID NO: 56780 - DNA, 362 bp, Zea Mays
ttcctcaagttatgttttcaaacgaccgggatgaaacaaccgtatcctttctccttcgttgtttttttttgtttctgtttttttttttgacgtaaccgaaggagaaaaacaaggaaacgatgttgactcggtttttttttctgttttttttcgtgaccgaaggagaaaaacaaggaaacggccattgactcggtttgtttttttctgtttttttttacgtaaccgaaggagaaaaacaaggaaacaatgttgactcggtttgtggcgtgatcaaaggggagatggtggcggcgctaggatttgaatggtggaagaacacaatgcaaccagcaacaaatgacgcgaaagcacacaaattcaac

SEQ ID NO: 56781 - DNA, 545 bp, Zea Mays
cgcgtcgcaaccatcttccttgtttctctccttcggttacatcaaaccgattcaacgccacaaatcgagtcaacgccgcttccttgtttttctctttcggttacgtcaaaaataaacagaaacaaaaaaaaagaaaagaaaaaaaacaaaagaaaaaaaagagagaaaggatagaaccagagaacaaacaaaaaaatagggaaaggaaacaaagcggttgtctcatctcggtcggtttaaacataacttgaggtaccttccttaaaccgggcataacttttcgctcggttgtccaaaaaatctgaaatttttacaggagctagttgacaccattctgaggccggccaaacacacctacggtctgtttgggtttcgacaaaattgtcaaaaaaattcaggaaaataaagaaaaaaattcgtcaaagttctcgcacgcttttcagagaacttcctgattttctgtagaccacatctgaactctgttttaggtgaaacttcgtgtagatcctattttgttgcttcttgtgctgagaaaaatatcaaaa

SEQ ID NO: 56782 - DNA, 570 bp, Zea Mays
gtcatttgttgctggtcgcattgtgttttttctcaccatccttctttcttccaccattcaaaacctagcgcgccgccaccacgccacaaaccgagtcaacgccgcttccttgtttttcttctctggttacgtcaaaaaaaaaacagaaacgaaagaaaagaaaaaaaagaaaaagaaagagaaaggatagaaccagagaacaaacaaaaaaaggagaaaggatacaaaagaaggagaacttgtttgatcacgccacaaaccgagtcaacaccgcttcgttgtttttctccttcggttacgtaaaaaaacagaaacaaaaaaaagaaaagaaaaaaagaaaacgaaagagaaaggatagaaccagagaacaaacaaaaaaaagaaaggaacttgttgactcatctcgatcattttaaacataacttgaggtatcttccttaaaccggacataacttttcgctcggttgtccaaaaaaattgaaatttttataggagcttcttgacaccattctgaggccagccaaactcgcctacggcctgtttggtttcgataaaattgtcaaaaaaatt

SEQ ID NO: 56783 - DNA, 482 bp, Zea Mays
ctgggaagatggtgcctgggctggagaaggtgctgctggtgtagatgtgctcgtgttggtgttgatgtcctcatcaaccatgctagagacgtgagcctaggcacaaaggtagtcactgaaaaagaacaactagcacagcacaaagagaaacaacagatttagagattcagcccccttctttcttcttcttttccttttttttcttttcttttctttttttcttcttcttttttttgcaggggcctaaacccttttttcactatgacgacccaaacaataaggatattgctaacaacccctttaaatcagatttaacaaatcttgttaatatagaaagtccagaaatctctacgatgattgcggagcgctcagaatgaattttgagacaaggtcagatccgttagaaagaagataagataagctttccagattgtatttaaacttccaaatcggacatgagatgtatccgtggtggcaaaaat

SEQ ID NO: 56784 - DNA, 1325 bp, Zea Mays
gctctggagatatgattatgaagggtgtcaactcccttattgccttgggagcctggattatttggaatcatcggaatcgaattgtctttgatggaatctcccctagtgtttctgcagctcttcgtcaggcaagggaggaacaacagttgtgggaaatggcagaagctaagggtctctcctttcttgccgcaaccatcaggggcaccaagctgcctggtttatcgctgatgggctggttttgtttttcaggatctgtttgctcttgtttttgttttgttttgtttttttttctcttcttttttctttggttttttatcccctccggggaggtcttttgtactatggtctattttggacccttttttccttctacttaatataatgatgcgcagttctcctgcgctttcgagaaaaaaaaaagaattagatagatatacacaaccaaacacaatgatcacgttctctaacttacacgaatcaaatccaaacatccagaattaagaaactagacatagcttctatattgtcttgtttcaaacataacactaaccgattaccagacttagacttattagaatcagacatttaagatttagaataaggagagaagaattttaattagttttctcaacttaattatctaaaacacttctatgcaatacgtcttcatcaatcaagaatcaagaattaactaatccaacctagccaaacaagagtaaattcaataaatcaacttaaagcttgtatatttctggacagaagcacaatggttaattgttttgctcacaactcacaaaatattcatccaaatatagtgaactaagactttctagaaagcttaagaagtcctctacaacttaggtattatcatcacaaagtgattcaacacttagcaaggtcaaacagtgctaaacataaattctgtctagatttggacagaattcgactactcgcttcaaaaatctgtaactagatactcaagcatcaaaaacatttgatcctagactttctagaaagataatagaattgtctacaatttatttataaacatctcaggttaattcaatgcatatcaaagtcagttaacataaacagacttctctatccagatttggacaaattcagactctatagttcaaacagctgtaacttggtctctagaccacctaaaagggtgatctaagtcttcttggaaaacttaaggaaagtactacaattcgtctataattactaaaggctaattcttagtttaatttgggcaaacaatgtcatcttcgaaatctatacataatttggacagattctgagactgaatttgagaaaat

SEQ ID NO: 56785 - DNA, 380 bp, Zea Mays
ctccttcgttatctttttttctgttttttttttgacgtaaccgaaggagaaaaacaaggaagcggccgttgactcggtttgtttttttttctgttttttttcgtaaccgaaggagaaaatcaaggaaacggccgttgactcggtttgttttttctgtttttttttgacgtaaccgaaggagaaaaataaggaaacgatgttgacttggtttgtggcgtgatcaaacgggagatggtggcggcgctagggtttgaatggtggaagaacacaatgcaaccagcaacaaatgacgcgaaagcacacaaattcaacaatgcagattattgaaagaaagtgcgaggctcaaaagggtgctgggataagatctaacctgaattttt

SEQ ID NO: 56786 - DNA, 247 bp, Zea Mays
ctctggttctatcctttctctttctttttcttttttatttttttcttttcttttgtttctgtttttttttttacgtaaccgaaggagaaaaacgaggaagcggcgttaggttttgactcggtttgtggcgtgatcaaacggaagatggtagcggtgcgctaggttttgaatggtggaagaaagaaggacggtgagaaaaaacacaatgcgaccagcaacaaatgacgcgaaagcacacaaattcaat

SEQ ID NO: 56787 - DNA, 693 bp, Zea Mays
aaaaactgctataataaaactgcaataactttctgatctaatgtccgattgaggtgttcttcgcggccacggaaagatctacaaattatctacgactcatatatagacttttcatttttttgaggccactaagactacggaaaacaggcatgaacagaaacggtcgaatctgccattccgcagaaaactaaattcgagatcaaaacctaaccccacatctaatccaacctctaatcctttaatccccatgatccacaacctccaaaagcacataattacagggaggaacaaggatttcaacatacctagggttttccccaagaaaatcttcaagaagagatggggaagaacatctccttgatcctctcttcctcttcaattcaatgtgcccctcctcttctcgatccttgctgcgtgggggggatctagagggaggagggagccatggagagggtagggggcggctgccaatggggaggagagcaagagagggagggggcagctgcaacccaattggggagagggagaggggcggctagggttggggaggagaggggggctcccatccaccggatcgagatcaatggcccaaactcgctctcccctttgagctcccaaccccagcggaaaaaattccaaaagatctactgttttctgaggaatgcctcctaaaactctaaaccccaatgccac

SEQ ID NO: 56788 - DNA, 906 bp, Zea Mays
aaacaagataattcaatatgtttttttggccgtcggccttatcccatgctgcccagaagcttctaaccaccgcttttctcagccttatctctgctgctcgctcaaatttttttggttgaagctgctggccgcacaagcttgccagccatcttcctcgccaagccgctcgttgtgtcctgcttccgtagttctgcttcacctcgtcgtggtaaagtagccggtctctagttctttcccacgcactcggcctctcgtcttcctgctccatctctgctccagctctctcccatggccaccccagccatctcccatggtggccgagctcgcccaaccccctctctattggtggctagcgcccatctccctacgccgagcgtcctctccgtgctcgagctcgccctcagctccgtcgtgcccctgcgctcggtcctcgtcaaagtcacgcctgggtgctatccccatcgaccacgcttgctcatgcaccttcaacagctcgtcgtgtatggtagagccttcatctccgcgtccaacatctgattcgcgccaccgctcagcttgccgccgtcctctggtgaacgcccgaacctccaaccttgtcgtggacgctgtcctgcgcgcaccgacgattgttgggacttgttctcaaatgctataagttaagaacaatgcaacacaaaatgttaatggttaaagatcttcgtcctactaagcattatctttcttaggatataatgatctttagacgaaggttatgaaggacataccttcctcatcttagtatgtaataatgaaagcagaagcatatgaaacatggaaaataacatgaacaatcatcttgaatccttatattatttatattctcattatctcatcatggacaaacacattaataaaagtaaattacat

SEQ ID NO: 56789 - DNA, 261 bp, Zea Mays
cacaaaccgagtcaacgtcgtttccttgtttttctccttcggttatgtcaaaaaaacagaaacaaaaaaaggaaaagaaaaaaaagaaaacggaagagaaaggatagaactagagaacaaacaaaaaaatagggaaaggaaacaaagcggttgtctcatcttggtcgtttttaaccataacttgaggtaccttccttaaaccgagcataacttttcgctcggcctgtttggtttcgataaaattatcaaaaaaatcgggaa

SEQ ID NO: 56790 - DNA, 644 bp, Zea Mays
atttttctcagcacaagaagtaacaaaataggagctacactaagtttcacctaaaacagagatcagatgtggtctacagaaaaagagcaaattctctgaaaaacgcgcaagagctttgacggattttattctttattttcctgaatttttttgacaattttatcgaaaccaaacaggccgtaaaaatttcagattttttgaacaaccgagcgaaaagttatgcccggtttaaggaaggtacctcaagttatgtttaaaacaaccgagatgagacaaccgctttgtttcctttccacttttttttgtttgttctctggttctatcctttctctttctttttcttttctttttttcttttcttttttttcttttctttttttttgtttctgtttttttgacgtaacagaaggagaaaaacaaggaagcagcgttgactcggtttgtggcgtgatcaaacgggagatggtggcggcgcgctagggtttgaatggtggaagaaagaaggatggtaaaaaaacacaatgcaaccagcaacaaatgacgtgcaagcacacaaattctataatgcagattattgaaagaaaatgcgaggctcaaaagggtgctgggataaggtctaacctgaatttttaggtggttttgtg

SEQ ID NO: 56791 - DNA, 459 bp, Zea Mays
tgaaagattgcataaatgaggggcaacagtgtataaacatatatcatgacaaaaaaacatactaagcattattaatatgctagcaaaggaaagttaaacataacaacatgaactgaattaaccagtgcacacgactagaaaaaaaacatcatttgacatcgagtttctaattaaatcatggctgcaactgggcagcgttattataatagtgaaggtggacgtgctgctacttccctcattcccaacatgaatcaaatacctgcattgagtaatgcaagagtgagatgatacatctcagcaagcaaattattttgacgagatatttaaaccacaaattgaattaaacaacattttaaaggaatcccaattgagatcagaaatacttgtagatatagaactcaatagtcccaatataaccaataccatctcatttcctcgaacaaccacaataggttgtat

SEQ ID NO: 56792 - DNA, 316 bp, Zea Mays
tcatccctcgcctccctactcgttgggcacccgctgtgcgttcaggggtgtccgcctgtgaatcctctgcgtgaatcggtgggccaccaagcacacgggcgatcggagggacagcgattgctcgccgtcgattagcaccgccgtgggcccgtccttcactgtgaactcgcgcgtcttcgcccaaaccccggtacgatcttcttccacaagtacgattcgatccccgcatattttagctctggtcggtggttgagtttgggcgccggccgagggatgggcatgggcggcaatggagccgccgtggtggagtccttgg

SEQ ID NO: 56793 - DNA, 253 bp, Zea Mays
gttgcattgtgtttttttcaccatccttctttcttccaccattcaaaccctagccgccgccaacatctcccgtttgatctcgccacaaaccgagtcagcgtcgcttccttgtttttctccttcggttacgtaaaaaaaacagaaacaaaaaaagaaaaaaaagaaaaataaagagaaaggatagaaccagagaacaaacaaaaaagggggaaaggaaacaaagcgattgtctcatctcggttgttttaaacat

SEQ ID NO: 56794 - DNA, 1103 bp, Zea Mays
agcaagtctatagaggagcatttagaacatttgcgtgctgtttttgatgctttgcatgctgctcgcttgtttggtaacatggaaaagtgcacattttgcacgcaacgtgtctcgtttcttggttatgtggttactccgcagggcattgaggtggatagcagcaaggttgaagccattcaggactgggctacaccaacgacggtcacccaaatttggagttttcttggacttgtacgattttaccgtcgttttgtgcgtgattttagctccatcgctgcccctttgcacgaactcacaaagaaaggtgtgtcttttgcttgggaccccccacatgaagaggcgttcaacaatttgaaagataagttaacccatgctccactcttacaattgcccgactttcagaaagtgtttgaacatgaatgtgatgctagtggtattgggttaggtgctgttttgttacaagaaggaaaactggttgcttatttcagtaaaatattaaacggtgctagcttgagattttctacttatgataaggaactttatgctttagttcgcactttgcaaacatggcagcactacctttggcctcgtgagtttataattcattctgatcatgaggctttaaaacatatttgtacccaaacaaatctgaaccgtcgtcatgctagttgggtagaattcatcgagtcctttccttacatcattaaacacaagaacgggaaggaaaacgtcattgctgatgcgttgtcccatagatataccatgctttcacagttagaatttagaatctttggcttgcaaactgtgaaagatcaatatgtggatgatgctgattttaaagatttctatgtacattgtaaggatgctaaaccctggggaaaatttcacatacaggatggatttttgttccgcgctaacaagttgtgtattccagcaagctcggttcgtcttttgttgctgcaggaagctcatggaggcggtctcatgggcactttggcgtttacaagacacatgaggtgctggccgcacacttcttttggcctcggatgcaccgtgatgttgagcgtcttgttgcacgttgcactacttgccagaaagctaag

SEQ ID NO: 56795 - DNA, 724 bp, Zea Mays
ccagattgtttatggttacatccctagggcacctattgatttgatttcacttaatgctgtgaacgccccacatgtagatgttgctgcacatattgaacaaatgattaccatacatgaacaaacgaaacagaacattgctgccactaatgcaaaaaatcaggttgctggtagtaaaggaagaaaacttgttacttttgagccaggtgatatggtttggttgcactcgagaaaggatcagtttcctattttgtgccgttctaaattaatgcctcgtgctgctggtccttttaaggtgctaacaaagattaatgataatgcttatatccttgacctgcctacggaatttggtgtttccactagttttaatgttgcagatttgaaaccatatatggccgagggtgaggagttgccgtcgaggacgacttcacttcaagaaggggaggatgatgaggacatcactatgagtacgactacaccagcagcacctccacatcaagcgccacttccttcattagctaggacaatcactcgggcccgtgctagagatcttaacttcgtcatgctactgaagaatgagggcccagaagaatagacgactagcccaactgcggcccatagtggacgacctagggttggccgcccctaggggctgcgccccctctctatttatccaggagctgcacctcctttgttcttggagttttgttttacgttagctttagct

SEQ ID NO: 56796 - DNA, 429 bp, Zea Mays
ccctccaacacttggccgcccctctctccttttcccttgggctggatgccctctcctcccatggcagcccctctccatggcttcctcctccctctagatctcccccccgcgcagcaaggatcgagaagaggaggagcacattgagttgaaggggaagagaggatcaaggagatgttcttccccatctcttcttgcagaatttcttggagaaaccctaggtatggatgagatccttgttcctccctgtaattatgtgcttttggaggttgtggatcatgggaattaaaggattagaggttggattagatgtggggttaggttttgatctcgaatttagttttctgcagaatggcagattcgacagtttctgttaatcccagttttccgtggtcttagaggcctcaaaaaaataaaaagtctatatataag

SEQ ID NO: 56797 - DNA, 259 bp, Zea Mays
aaaatttgaatttggtacactttgatcattgatgaaactcataaccaattttaaattcaaaattgaattctaaaaacaaaaaggaaaaatataacagaaaaggaaaaagaaaataaaaagaaaaacgtcgcctgggcctaaaccttcacacttctgcccattaccccctatcttcctttgcgtggcccaaatctctatacaccgcacgcgcagccgaccgtcatgtgggccccaccgaccagtcgctccctctgcccgc

SEQ ID NO: 56798 - DNA, 279 bp, Zea Mays
atttgtttgttgaaggagagaggtctgaccgctgaagctgtggttgcagactttgtttttaagaatattcagccactgaaggacagagcatatccggcttatttgtatagtggtgtcaccgactcaacccgggttaccaacaagaggattcctgctgtggatttggtgagccaactggagatgatcttgaggggcaaagtatcaaatattggtgctcctgttgcatattctgcttggaatctgccaccttctaagtcctttttcgattttgtgtccaat

SEQ ID NO: 56799 - DNA, 209 bp, Zea Mays
cctctctcttccactcttgcagccgccccaatccctctccttcttccccaagtgattgcagcgccatccctcaaccctagccccccccacctcttcctctccaaggtggagcctccccgcttggtgtccgtcgtgtgggtgcgagtcttccatgggagtttggagggaggaagaaggaagaaaagaaggaggaaaggaggaacccaagg

SEQ ID NO: 56800 - DNA, 189 bp, Zea Mays
ttccaagattacgacgagttctaggcgtgggttagcggcaacccccagtcggctgcctatgaaggccgcgtgtatctacgtttcatttttcgcactttgattattgtaaagactatgtggatgtctcagacataagatgtaatcgactattattacccttttatgttattatttgagcactgtgtgatg

SEQ ID NO: 56801 - DNA, 156 bp, Zea Mays
ttgtataataggtaatgtatcctgttgtaaaaatccgagtctgtacattactctttttggtaatgtaaaatggatggtttttcctttggcatatcatattgtttctaaatgttgttgccacagatgtcgtccaagacccgatcacaggatgcagct

SEQ ID NO: 56802 - DNA, 498 bp, Zea Mays
aataacatcagagtatttattacatagcggaagtcttattacaaaaataaaagataaatataaaacgaactaaggatcatccttggcaccaataagtcaactgggaaacgccacctagatcagatcaaactccacgttgtgtggcttctcctaaaccatctgttcttctcctatggggggtgtgagacagcaagggtgagctcacacatgatcatagctcaacaagttgtggggaaaccagtgggcataaactcaccaaaggtgggagttcaagtgatgtgtaaggctaatctacaacatgggttaaagctaagtgttggggactttttctcaaatgctatgagttaagaacaaggcaacacaaaatattaatgtttaaagaccttcgttctacgaagcattatctcccttaggatataatgattttcagatgaaagttatgaaggacgtaccttcatcatttcagtatataataatgaaactagaaacatatgaaac

SEQ ID NO: 56803 - DNA, 357 bp, Zea Mays
ccaagacatccatagagtcattaacttgacatagtcatcaacataatcaaagtgtggaacacgaaacatagaggataaggccttcacaggcagctaactgggggtttgccacgaaacacgactagaactcatcgtagttctgaaactcttcaaaatcctccatccttcatctcctcctaagcactgattgcaatgggacaacctagggttaggggtttttaaagcaagggtgagtacacatcaacatactcagcaaatgtcttgtttggctaaagtggactagttgtatgtggggttaaggttaaagcagttccttttagttggtcagatatttattactagtagtaagccaagttt

SEQ ID NO: 56804 - DNA, 290 bp, Zea Mays
gtgattcaaggaaataaactttgaactgttataagttatttatagttttgaaatatatatgctagctctagtgaccatcctcaataagaagtatataagagttacttagacttataagaaggtcgtgcccaccggcgcttaaaaccatccacagtagcacgattctagtacccgcaacaacatgggttcgaaaaccctgagtacgaagtgtactttcacaagtcttacccgtctaaggaaaaagactctcaaggatatgctggctgattagtaatcaaggtaaggctaag

SEQ ID NO: 56805 - DNA, 527 bp, Zea Mays
tgcctacactctaatattcagaagtattggattctttcataattggactctatggtgatgctttacttgcttgcattatgctgatgctcaatcatatattgatgatgatgatgattcgagtatgactcgtgagattaattcacacccctaaaggtaaataaagtattatttgaggttggtattatatctgaaggtaaataaagtattatttgaggttgatattgtatctgaaggtaaatgaagtattatttgaggttgtattgtatgtgaaggaagtgaagtatattgataaatgcagcatgccatatacattgcatgattcacttgcatctgaagttttgtcgtgacctatggtccgaccgtaccggtacaacttagcatcgtatgttgcccgaggaggggtacgatgcggcttcatacccttagaggtatgaaggcagaggacatatgcattgcattcatatgcattcattgaagtggtatttgtagatggtgtggttttatactctaagaggtatgaaggcaga

SEQ ID NO: 56806 - DNA, 1502 bp, Zea Mays
tcgaattttgaatttaattacgctgctgtttgaaacagattcagtcagttatcttgttagagattttagaacttgtagatggcagattttaattatccattgaataccgaagttgtagagtattttgtgtagatactcctagattatttgtttgatatcacaactgttataattttaaagatacaaaattaacaaacagcgctgctgctgtatgtcatgtggttcagggtgggagtctttccaccaggtcttggtttcaagtgtaggagcgatttgttgattgttggcaaatgtttgtgaaatatttgtactaagttttatgcccgctagcaggtggctacactccagatcatgcctagtacatttcttcttcttcgatgaaggcaagtgaatgtagcagtggttgcttccattctgacctgttatttctattgcctacactctaatattcagaagtattggattctttcataattggactctatggtgatgctttacttgcttgcattatgctgatgctcaataatatattgatgatgatgatgatttgagtatgactcgtgagattaattcacacccctgaaggtaaatgaagtattatttgaggttggtattgtatctgaaggtaaataaagtattatttgaggttgataatgtatctgaaggtaaatgaagtattatttgaggttgtattgtatgtgaaggaagtgaagtatattgataaatgcagcatgccatatacattgcatgattcacttgcatctgaagttttgtcgtgacctatggtccgaccgtaccggtacaacttagcatcatacgttgcccgaggaggggtacgatgcggcttcatacccttagaggtatgaaggcagaggacatatgcattgcattcatatgcattcattgaagtggtatttgtagatggtgtggttttatactctaagaggtatgaaggcagaggacttacacattgcattactatgcatacatcgaagtgatatttgcaggtattattgacacaggaaagtgttatacaacctattgtggttgttcgaggaaatgagatggcattggttattttgggactattgagttctatatctacaagtatttctgttctcaattgtgatccctttaaaaatgttgattaattcatttttttggtttaaatatctcgtcgaaacaattcacttgccgagatgtttcatctcactcttgcaatactcaatgcaggtacttgattcatgttgggaataaggggagtaacagcacgtccaccttcactctcataataacgctgcccaggcacaaccatgatttaattagaaacttcttgtcaaaggatgtttgtttttaactagtcgtgcacactagttaattcagttcatgacgttatggttatcttcccattgctagcagattattaatgtctagtatgttttcttatcatgatatctgtttatactttgttgcttccacgtttatgcaaattttcaaaggag

SEQ ID NO: 56807 - DNA, 305 bp, Zea Mays
gtttagtagaatttattttatattgaaaatccaattaattaatatagaaatattggtccaaaaataaatattttagttataaatacttttggtataattattatgatttttagaattatttgaaaatatatttatttatatttttaaacagaaaagaaaaaaaagaaaaaaaggaaaaaccctatccctaatcggccaaaccggcccactaagggcccagcggtgcgcccccatctcacctccccctctctcactaaccagcggggcccactcgtggcccctctcctctccttctccttggccgc

SEQ ID NO: 56808 - DNA, 1480 bp, Zea Mays
gtcacatggtcttcttcttcctgctagccgcggcaaccgagctcccctgcttccctgccggtgccgcccagccgctccctcctcttctccccatggttactccctccatcgagatcggtctctgcaactcccagccccagccctcaacgccggcgcgcggactgcgcccctcctcctattcgccatggctgcgtcggtctccagctcgcggtgtccccttcagccgaactcctccctcaagctcgccgtggagcttcctttctccaaccgcgcaggcgagaatctccctggtgccgcgttgcccccccctgctcgctcggtgcccatctccatggccgttgcgtcgagttctgagctcgcgctcagctccctctacttctccctgtgccttgctgagcccctgcttctctcttcctcccgtgccgcgccccctcagtccacctccctgctcgccctccagcttccacagcccagctcagattttttccatggtcgctacgcactagtcgagcgctctacaccagcagtcgtcgtttgccttagcgccagcagggctttgtctcgctcgtcctgctgctcttgccctggtcagcagccgagacgctcgcttctgttccttatgttcaagccaccaaacgccagtgccctctcagtctccaggccgtatgctgctaattccctgccgcgccgagctccctgtccactcatcggaccatgccaagtcatggcactcgccctggtcccgtgcttgcgcagcttgctggtggcccggccactcgccatcggcctcaccttcatgacacaacgccatcggctcccctgtccgacgcgtcgtcaacctgccgtgcgagctagctccacctctcctgctcgtgtttctctccgtcgtgcttggcagcaagtacttcatgtcgaagcaatagctacgattgatagcacctagaggggggtgaataggtgatcctgtaaaaacttgaaacttaaagccacaaacttgattaagtgttagcacaatgaaatcaagtgactaaggagagctcttgtgaaccacaattaacacagtaagaacaagcacaagagacacaagaatttatcctgtggttcgaccaagtacaatacttgcctagtccacgttgtggcgtcccaatggacgagagttgcactcaactcctttcaagtgatccaaagatcaacttgaataccacattgttcttctttcttttctctttctcgtttgcgaggaatctccacaacttggagcctctcgcctttacaataagatgatcacaaagaagcacagatgtaagagtgggaagagcaacacaaccaagcctcaaagcacgagcacaaacacgcacacaagtcacaacttgagctctaagatcacacacggagttctcaactcaagaggagctcaaattgctatcacaacgaatcaaatgcgctagagagatgtattggtgctaagagatgatcaaac

SEQ ID NO: 56809 - DNA, 293 bp, Zea Mays
ggcaaatcttgccttctatcgactggtgcaccggacagtccggtgcaccaccggacactgtccgttgcagatttctttcctattctggcgtagtcgaccgttgaagaattggagccgttggcgcaccggacactgtctggtgcacaccggacagtccggtgcccccttcagaccgttggcccagccacgcgtcacgcgcggattgcgcgaccgactgttggctcggccgactgttggctcaccggacagtccggtgcaccaccggacagtccggtgaattatagccgtacgcc

SEQ ID NO: 56810 - DNA, 287 bp, Zea Mays
cgtagaggcagggttggagcgaacacaatgacaacaagatcgctgaccagcagtagtgtggaggcaaatgacgacatcgatgtgtcggcatgacaattctatttgacgaaaataatggcgcggcgacgaggatccgaggagtgagcgccgcggtcacaggcgtggggattcgacagcgaataggacgcgtatcagggagtctgcttgggagtcgagcaagggaggaccgggtttgacgactcgatagcaaacgtgagcatgtcgaagcccgatggacgaggagcgag

SEQ ID NO: 56811 - DNA, 733 bp, Zea Mays
cccgcctcgtcatccgcggttccccatccacgcgctcctactatcactgtcgtgtgggtcatgtttgtcagtgttctcctcaagctcaggatggtaacaaatcccgcgctgctcgccgatatgggtgggaggcaggtgctgggatccctctgacctcggaatcgggcttcgcccgattataaaacaatgcactgccttcccttcttggctacaaccgcgtggatcgggcaaaactttgtgcatccttgctgtggacaaggattgggtgccgccggtgccgctgctggggatcttcgtctgcacaggcgctcgggtcacgacggtcgcctgggtgcttcaccaggccgtggggttgatatcagtggtctcagctggccaaatcggtgggcaaggggaagggaatttctcatcagcacgcctccgtcgccgctgttctgtcgtaccgcgtcgacaacctcatcctcgtcaccatcgacggtgagaacgcctctgtatggctcgccttcatctctgctccgtctaccgtcccttggatttgaggatttgtgctcagatcggcaggcggccgtgcaccggtaatggcaccaccgtagggtggctggcgccgccgctgttcgcgtccggtgtggtgcaagcgtactagggttgcagatgaccgttggatcctattcaacgtttgtgatccaatcaacgagataccggttcgggaatagatcgtaaccgttgggaaatg

SEQ ID NO: 56812 - DNA, 174 bp, Zea Mays
cttacatttagtaactgctaataaaaaattgaccaacttattaaaagcaatgctcagctttaagccctattattgattagccttacacttcacatgaactcccgcctttggtgagttcatgcacattattccccacaacttgttgagcgatgaacatatgtgagctcacccttg

SEQ ID NO: 56813 - DNA, 692 bp, Zea Mays
aatctattcatcaaatcaataattaagcaaacaaaaatatgaatcagcttaccatactaactctaacatgctatccgcgaacacggcaaggattctggttcagcccttgcgtcgagcacttggtgaatatcacgctgcaaacttcgtcttcacccgactcttgggttttcttgatgatgcacggaacgacgacgagatcgagtttggagcgagctggtgaggtgtagtcgagcaggttagcgcgagctatggcgaggacacaaattcagtgaggactttgacgacagtgaggtcatgagctctagcgacacagggtcaagcgacgaacgtgttcgacgtgcatacgtgagccgaaccgaaggcgaggaatccatgaatcgaagttcgtcgataagcatcatggaggaatcagcgacgttgctgcacacacgacgcgacaacgaacgacaacaaccagcatggagacccgacgcgactgaggaaggggttcgacggttcgacgacaccggcgaggtcaacgacgagccaaccaaaccaaaactccacgacgccgaccagtacacgggttaaagaacagcggctggcgaaatccgagctggaaaccaagcgccggcgagctggagctggagcgccgcgatggggcgaggggagcgcggccgggcgagacctcggctggccgaacttgggaaaag

SEQ ID NO: 56814 - DNA, 298 bp, Zea Mays
cttccctcttctctcttccccaagtgttgcagccgccccctctccattctcaagttttttttgcagcagccatctcctcaaccctagccgccaccccccatctcctcttctccaagtgtcgttcttcctcgtcggatcttcttcgtgtgggtgcaagtttcaattggagaattggtgggaggaaggaaggaaggaggaaaaaggtggaactcaaggtgatcttgaagttatctatgtttttgcgctaaaattcaattgattatatgtttatctatgcgaatcggtagaggtgctgtcc

SEQ ID NO: 56815 - DNA, 1133 bp, Zea Mays
cacatccttcttccttctctcccctcccacggcacctcttctctctgtcccgtggcacacggaagcaagcagggagctcagctcccccttcttgccatggcgctcgacgcccttgcctcattggagctcgaccagacatcacctccctcctctctgtttcccttgaacccaagtgcaggaagccgcgcccttcttctccgcaaacataggagtagtttctccctggatccatggcgccacatctccagccagccttcttcctccccccatccgagctccatccatggctgctcctctctctaccgagcgcccctccccaactctcctacacccggacgtgagcctccaccccctgcaatggacgctggccaagctcaccccatggcgctcggctccctgttccatggtgccctgttggccgctaccccatggagctgagctccttctcggcttcctccacaccagtcaccatctctccccaggccggcctcctctctctctctatttcctctggccgtcggcctccatagcacacgagcacttccccagcaagcgcacatgtcctcaccatggatgtcgggcttcgccttcaagcagctcacctgcacctccatttgttccctcgccggcaagctcgtcgtgagcaggccttatgccgaacttgctccctcgttgcgagcgctgcgcgagtgccaagcgttcgatgaaatgcctaagtgaggtgttgtgtcgtggacagcgccatggctgttccctgtgtcctcgctactcgctgcacagcctcaccgtgctcgttgttcttccgtcccctagacccagcaagcaggctgacacatccctcgctgctccttccttttttctggcgttccttgccgctgctccgtcgccagcaagcagcggcgagcgccgtcaagcccctccaacccgcccccactgatgctcgcagccgagctccatctagcggcgccaacacttcgcccctgcaggacacgctccgcttcatcgtcgacactcctccgcactctcaacgtgtcgacagtttgtgcaacctagctgcttgccgcgtcgctgcgcgtctgtgctacgcaaccgcgtcgtgtcgtgtcatggtcgttgcagcaccgtgctcgctg

SEQ ID NO: 56816 - DNA, 1908 bp, Zea Mays
gctcttctctcccgccgttctcactttcttctctgatttcttgattctttctatcccagcgtcgatccttatccccgccgctcttctccccttcagatctttcagccgtcagtatttatctgcgcagttcctctgattctcatccatcggcgttccttcgtccccagctcggcgctcaagctcccttacaccgcgcgccctagcatctgctcacctctgcgcgcgcttctctccatggagcgctcgaccggagctctgctcccctgctcctctgcgccgcgcccttgtcttcagccggcgctacctctttttcagcgacgtccagcttcatctccctcaactcccacggccggaactcccgctgccgctcggctctagtgaaagaagctccctgtgcccagcgctccctgctccatcttctcgtgcgcgtgcgtcctcgccgcgccgagcgccgtgaagtctctgcgcgccgcgggctcgattctttcatcccgcgcgcgtcccctgtgtttctctgctcggcctctgttacttctgttactcctctgcgcgcagctgcatcccactgcttggctacggctcatccgttgcgctcgggtcaccctggtattctagctcgtcgtcgcgttgtttgccgtcgacctcgctaaatcgccccttgctcgacgccggtgatggccgtcgtggagcaccgctgtaaactcccagcacccttgcctctgctccaggaaatatcaagccttgaacaaccatcaatttgttgcgacgtgtgtgcgctactcgtcccacgtcgtcgtctttgtgtgtggacagccccgtcgcggcatgtctgccaaatcatcgcgcccgtgctgagttccctggtcatcgcgttttttcttatagatgctcagtcttaccgcgcgtcctctttcctgttcgccagcgcgccctctcggctcgctcggctttaattcccaatcgtgtcgtcgattccaccggttagcgtcattcgtcgtcgcgtcgcgtgtgcagctctatatacgtcactctcctgtgtcgtcgtcgttccacgtgtcgtcaagaaattccaagagtcgagtgaagatggagccagcagcatggtgttcaccaagtgcgcgacaaaaagctcggacatcctgcgcgactcaagttcgattcgtcaaaattatttagtcgaggaaaagatcttcagcaaatgattatcgaagaaaagaaggcccctgggtgacgtcaaccggaacctgtagtcgtgcttgcgactatcgcgtcgaattagtcagggtaagttcattcgttttcctgtcaactagatctataaatagattaatagaattattagtcgcaataattattattaatttagtatacacatattgtgatgttcgatttagataaataggtaaatcaagtaattaagatacacagtttaaagagttaataaaaagctaggaataaaaatagatattctagtgttattatgtcaatggatgtagtcgatgccctgttgtgatatccatggtgcttaatgtttggttttaagtgtttcatccttttagtgtagattatctatattatactcgtgctcatacatgtgcatcatgcatttcatgaggtgcgataattaatcacgtgatgcggaagatgactcaagtcgaccccaagcgcgggctaatccgcgggatgaagctgatggaccaacctgaagatggttaaatcaagcaaatgttcggttgagggatactcgtcaagcggacgtcatctaacaaacactaacatagtgtttattccaggcaagccccggtgcatgcaactcctttccttgtgttttaaatacttttcgcacactttaagtctagtgaaatgtgcattaggttcataggagttgcttggaaccctttgatgcat

SEQ ID NO: 56817 - DNA, 465 bp, Zea Mays
gttttatttccctgttgtttttcaggtcctaactttgtgatgttgttgatggtgttaagtgccggtgggctcgaccttcttataagtctaagtaactcttctatacttcttattgaggatggtcacttgagctagcatatatttcaaacttatacttttgtaatcacttcgacaaaataatgtaaattttttataacctgtaaaatttggtaataagatttccgctgcaaaaatgttgtgtgtgtgatttgtgttacttaatcccgcggttctggttgtaagtggtttatccgatgtccttggggcaatcggacggatcctgttaagttatttagtgcacatgcatagctgtctgaggtctttgagacaaggacaggtgcatgtgggcccaataacttgggaggttctgccacactattcttggcaatggaaattcatccttcggacaagccttgttgagatcag

SEQ ID NO: 56818 - DNA, 439 bp, Zea Mays
ctttgcaccacggctttcacctccctgagcgccgcctccatagcctccaccacacatattgtcatacctttcgccatatgttagaacatgtcttccaatatcttcagatgatatagaatgaagaggaaaagtttgtactgtaaagaacacttttaggaaaaataggtcatacggttaggatttgacaaggagcaagaacagtgtacccttgattccaagttcatcagaactacagattcggttgcccctttagcatgatcaggtggttctacaactaaaacgaatgcaacatactcaactcttgatgatgcaagaaacaacgcgcggcgagggtgaggaggacggctaacaacattgacgaccacctcggcttccccaaggaggactccatcgcctccgtgttctttttggacaagctagcgccggcgagcccactgtc

SEQ ID NO: 56819 - DNA, 266 bp, Zea Mays
ctcctttgaaaatttcataaacggggaagcaacaaagcataaatagatatcatgataaggaaacataatagacattaataatctactagcaatgggaaaacaaccataacgtcatgaactgaattaaccattgcgcacaactagttaaaaacaaacatcctttgacaagaagttgctaattaaatcatgactgcgcctaggcagcgtgatagtgaaggtggatgtgctgctacttcccactccccttgatgagtaacaagcacctg

SEQ ID NO: 56820 - DNA, 213 bp, Zea Mays
ttacctagggtttccccaagaaaatctacaagaagggatggggtagaacatctccttgatcctctcttcctcttcaattcaacgtgctcctcctcttctcgatccttgttgcgtggggagggggggagatctagggaggaggaagcaatggagggcggctgaaatgggaggagagggggcggccagccaagggaaaagaggggggtggcggcc

SEQ ID NO: 56821 - DNA, 387 bp, Zea Mays
ctttaacagaatattggttgcaaacttctacaaacttgtacatacgggttggagacctcttaaagtacttcactgtgtttctaagatcacttatcaatgaatcaattggttgcaacccatcattcacaaccaaattgactatgtgggcagcacaacaaacatgaaagtacatagggtcaaagctcgagttctttctagcaagaaacttggacttcagatttgtaatagcagaatcattactagaagcattatcaagagtgattgtcaagatcttatcctcaattatccattcaaccaaacattcaaaaatagcctgagctatgacaataccagtgtgtggaggatccaattcaataaagttcagaacacggcattgcaagatccaat

SEQ ID NO: 56822 - DNA, 356 bp, Zea Mays
cgcgccagtgaagaggtgaggggcgatcacagatgagcaccgtccgactgacgaaagggccccacttggtggcgccatttcacagttgatagacgggctgtgcagtagggtttggttactgagccgaaaggaacgaagttggcccaggcgcatagtttccctttttttctttttctttttccttttctgttttcttcttttttttatttctagaattcaaatttgaatccaattccaattgtgaactgatactcattttaaatgtacaaatttaatatactactatggaaagggcttcttgtgttcatgaatttatttctctattctgtgtagtagttttatcctcttccctcaac

SEQ ID NO: 56823 - DNA, 1098 bp, Zea Mays
tccaggatcgaataccactagctcactcgaaggtgagacacagataaatacaataaagcataataccatacattaagaaagtatcattagtgattacattatcggagttttcagaaataataaccataaattttaatgcagtggaataactaacggagaaaaccgagcaacatggcgaagcctggccacgctactcctcctggtcttctcctgcggaagcagtaaccctctcgaccatctatcccggtggcagggatgaaggccaagtcacaccagcaactaaatcatccaaggagttcctgcaaaaattatgccataagcaaggctgagtatactaatactcagctagatttacctggtgtgaggagtctactcctctacctctagacatatagctgtttggctgaggggtttggtttgccaaaagcactagctgagtctaaaatcaagttttagcttttcaagttttagtatgatccttttagactagatgtgtacctagctaatcatacatggtatcaagcattttatcaatcaacatctttttgccagtcatcttatttccacttattactcaatgcagtacaatggatcaagcagtctcattagctgcgagaagcagacgattcgaatcgagtttttaaaccttgcaaggtaaacctaaacacacgacgtggcgaggcactccgtccccacacatatcaactgtccccatcgattctccgtcaacagaacagggctcaccgccttggcgtacaatgcctcactgaccctgactgtcgtcgtgcagtgaccgtacttgtaccaccataaccgaaatgggagaccacgtctcaggtcgagtgaggggtaaagtctgcgggcaggttcactcaggtactaggcttaccgacttaccatatttctcggcatgtgctcagtacgttcaaatgcttgacacaggtatccgcacgttaatccttattccaattttcgtctcataaacaacgcatccccatggatccgtgtccacagaccatcatcgttctgatataaaaatagatgcaaccaattcctgaccttgcgcgagtgctagaaaaatcacttgacttctaccga

SEQ ID NO: 56824 - DNA, 976 bp, Zea Mays
ttagatagtgtttgctgggctggcactcgcttggcgagcatccacttgttaagtccatcattcttcaggtcgtccaccaactgcatcttgtggttggcaccacatcacgtgcacgatcatcatctcttggtcctaaatgagatgcaagatgcatatgtatgaatataatgaaagtagcacaaaagtagcacaagatatacaaagacacagtggcgaactaaacattaaattggaagacaccgtagacaaccagatgttagctttagttatttatatgtcatcgggcatacgtaatcactatcactggaaagatgacgacacttactatatttaactaacacaaacaggacatcacaagtatgagcatttatttaattcgctacagcttttcattagttcttctattaatcacacaaaagcatcccaaacacaagtttaacagaggacataggcataaaaaactacggaattcctatccacaatcaactagagaaataaacatataaaacaagacacatattttatctcaagcttagccattacaagtctatgtccgttaagtgctaactaagtatttttagccaaaagggtgaactaaacattcatttgatcacttgcagatttttagacagcaacacagcagttactcgttttaatcataaatcttcaattatgagtccaaaaatatcaaactataactttctggaatgcttaaaaagtgctctaaaactttggtattgtcatcacaacataattcaacacttaacaatgtcaaaacgtgctaatacaacagctttgtccagatttggacagatttagacttgcaacttcaaaaattcacaactaaagatttagacatccaaagaaagtgatcttagactttctggaaagctaattaaatgttatacaaattatttataaacatccctagctggtttaatatgtatcaagggtaaaatacactatgaaggctgtg

SEQ ID NO: 56825 - DNA, 626 bp, Zea Mays
caaccgtgtttttcttcatccccggaatggcacagtacgggggtatttataagtaaccgagggtctaccttgccttgctaaagacagttacacccttagttacctaggttatggccagaatatttccccttggggggttatggtgggtcattacagcgtaatcaattacagacatgggccaaccctctatcagccctgccagcatggcgacctatggtcgggaccctgtgacaagggccgaactataaacgaggccccttttacaatgtggaagattacaatgcatggtcttcgtggtcctgattgttcgatctccggagtccttgatggtcttcgccccggcctgtgcgggcgaaggtagcgcctgagtctttgcacgtgcatttttccttaagcacttctgtcacatccagatttaagggacaaagtcgggtgcatctcatatatacgccaaagaagaaaacacatataataacagagtgtatagagataaatgtcacaatataatcagagtacttattaaatagcggaagtattacaaaataataatacaaaattttattagcagttactaagtgcaagtaaataccaaaccttagtaataataaatagaaataataataaag

SEQ ID NO: 56826 - DNA, 222 bp, Zea Mays
ccgagtcgctcatgaccgtgagcatgcctagtataccagttttacactctgtagaggttgtaccctgtacccacaagtcgtgtatcccatgtcgctagggtttgcaaggcccttagacactaccgagatgaatggctagggatccactacgaggcctttacaaagttccactagcttccaaaaacccgctacagtttatgggaagagaacttacaagattcc

SEQ ID NO: 56827 - DNA, 596 bp, Zea Mays
caattagtaacactgtttagccatgaaacttgaattaaaattgttcatttggattaatctattctaagcactaaataatttcagaaattcataatttaataaccatagctccgaatttagtggttcttgtttctacgatcttgtagcaacccgtagattattattacacagtttattcttatgtttggtgtaatgttaattttgcctataccatgtttgtctttattgctacatttagtagtgaggacacgtgtcacctgaagagcaagttggtacctggaatctcaagtgctaggcaagttgtgcccttgatcacttctttttatccactcatgttctaattaatcataatgatctaaataggttaattttgatgggacccaataggttaccctagtttgattatctttataccttgtttaccattgaactttttgggtagtacttgctagtgctttatgtggttttgggtatgaagatacattattcatgatcacacctttattatctgtttattattactgttcatgataagatcattatgttaattggaacatggagcgaccacccgggaaaacagtgctaccacaagggtt

SEQ ID NO: 56828 - DNA, 318 bp, Zea Mays
ctcaggatggggtatcagttgatcctgaaaaagtacaagaagtgatggattggaaaccttctaccacagtacgccagatccgtagttttctgggattggcagggtattatcgacgatttattctggatttctccaggattgccaagccaatgactgaattattgaagaaaggagtcaagtatgaatggagccagaaatgtgaagaggcctttcatacattgaggcagcatttgacaacagcacccgtgttagctcagcctgacaacaccaaaccctttgaggtttattgcgatgcttccggtactggattgggatgtg

SEQ ID NO: 56829 - DNA, 2239 bp, Zea Mays
ctctagcctcttgtgcttcctaaaatcactcacatttcacccgttcatctccttggagcctctcaacaagatggtgcgtcgctgcaatcctttggtagtggagttcagcagcgactccgacgagatccaagaggaatcgtcggttccctcccctccgcctcatcgttctctctccaagagaggacgcggctctagccggttggaaggagagggatcctcgatgccctcccaacctactcgtgggaggcgccataaggttggtgccactcgtccccgccgtagcacctcctccgcgggatacgctccttgccaggagaaggatggagcgttcgacgatgtagtcgatcttccatcgtctgacgctctcttcatcaccggtctgcacatgcatccggcgaatgtttcacagggaccaaacgaaccttcggtcgacttctctctgaagggggtggacgcccttcaacgtttaaggttcactaaccccactctcacacctcgtcatcctggtgtccaggaccctcggttctggaatctttttcaggatgacttttataactcagtcatcttgactaagaaacacccagtcgttagacatcgttttattgactgggaagggtgtgagaatatgggagatgctgacatgacgtcagctctccgtaacttggagagaaaggggttgaaaaatataatgactatggaatacccctggaacgatgaagtgatagctcagttctatgccacactctgggtcaagaaagtagatgaataagttgatgggtatgactacccagtcatgtattttttttatccaggggctctggcacaaagtcagctatcgtcgttttgtccacatcttgggcttctctaatgctaatatttagggcagcaacatgaaagttcatgacattaggctgcccatgcgggaagagactgaatttattcatgtctctttggatcaggagttttataccactgccaacatgcataggtactacaggtaccttaactctttgtccaagatgaccgttctcccgaagggcggaaatcaaatgaatgtccttggggagagtcgggttttccttcttctccttgctccaaatagtctcgcctgcatcaacgtgtttgacatgatctgggaagagatccttcgtgcttcctggtctccactcaaggggtgtctccttgcaccctttattatgaagatgatcgaagtggtcacccagactcactttgaaaaacctgtcaaacactcccgctatgtaccctactgggttgattctagcaacccagctactcgtacaaagcggactcccttagggtctggaggccctgcttcttctctgagccacctcctcagcctcctcatcatccatcctcctctcgcgtccccgctgcctcacgtccgatggaccacagcgggagaggaagtggtccgggccagggacggggtcgtggtcgaggactattcattcatctggccaagggccttcttggcgcctttgccatgtgccgcgaccgggcggtcgaggagtctgtgcgccgacgtaggactgaccggctacatgaggattttcttcgttatgccgccgagacaggtcatcctctgcctcccgggtcccctccacctccgacccccaccttccctgtggaccttaatgagtggcaccaataggaatttggtgtgccattcattacccctgaggatgaggccgaggagtttgatgactcctattatacctcggctcatcctcatcctcctcctccctattcgggtcagggacccattcccagtgaccccaggccatccggctccggtcactatcctcctcctccctacccgggtcagggacccattcctggtgacccatggccttctggctccagtaatcaccaccctcctcctcctcatcagcgtatgtcttctgcatccattttttctgcaggtgatgagcctcctcgggactcctcactcgaggaagacatgatgcggaccttctttcccgactacacttcctatcctccgtcctatcctcctcctggaggatattgattcatgtgccttcttctcactctctcctcgttttttggtacttgttgccaaaaagggggagaaaatctaaaatttctagccaagtcattctgtttgtggttgttttggttctttatatctctcttgtttattgttttgttttggccactgttgtggcttgtatcctcttattaatgcatgaaataaaac

SEQ ID NO: 56830 - DNA, 373 bp, Zea Mays
ggaaaacggaacgaccgcgacggcgaaaggagagtggcgacggccggccaacaccgcaacggcatcggcatgtgcgccccatcaactctggcgcgcaccgagcaagcaactggccgcgtgcgtgcgcacggtatgggaacggggtggcggcggcggggcggccgtttgcccgctccccctctcggttgttcggtcgtcccatcccttcgagcggccggccgtgcgcacaggatcagctgtgcgtgctgtgccgtgtgcaccgacccaccctctctctctctcccccgaatcagcccgtacgctggacacggcgacgccagcagaggcggggcatcgaatcggctccggcagatgccgctcccttccattccag

SEQ ID NO: 56831 - DNA, 480 bp, Zea Mays
ggcgcgcgggctcaagttgctagtgagactgacataaggggcccaccagtcggcgcccaggcgaggtagtggggatatgggctgagcggatgaaaaggggtggtgggccgcggcaggagggaaggtgagtgcgccgatggagttttttatcttttctcttttttctttttattctctatttttttttctttttgctatccttttattccaaattcaaatcaatcccaagtttaaaatttccaaatttttgtggcaaatctatcttcacatcaaatgttcaatttgaacatagtatgaactttataggtttttattttgtattttatgataattctctctttttttctagtttcaaatcaaatatcgacttaggctatttcatattctcaactcatcattatgtgtataccaatattattgttattattacttaaatgcacaagcaatccaaaactccaacatgatgcatcattcttttat

SEQ ID NO: 56832 - DNA, 433 bp, Zea Mays
ccatctttaagttggttcgccccttcgtcctgagatctgtcactatgacgaagctctatacgtaatagcttcggcgctgctcctgagaggatctgctgaaggtgttctctttctttaggatcttcggctacgaagcatacccccaacagtaatacatttggtataattattatgaattttcaaaaatatttaaaaatatatttatttatattcttgggaaataggggtaaaaaagaaaaaaataaaaaaatgaaaccctaatcgacccactagctatttcggcccccgcggctcatccccttcctccagccgcgcacccgcctgactgagccacctcgaactgcctctacttccacccgaatcgcgcccgacccttcgcctcccgtgcaccagtaacggccgcctctcccccccactctcttccctaatgaag

SEQ ID NO: 56833 - DNA, 683 bp, Zea Mays
gaaaagtgtcgtgcacatcagagagaaagaaaaaaaattctgcccacgatctagcctcacatcagattttctgtggcttgcttctttagtcctccgtggtatctcttgaccagtcagtttgtgccacatcgctcgattcattaaaccttcatatctttcacgttagatgtccgatttaattcattcgagttgcgttagcttcattataactctgtccacgtgttgttaatattgtttcattatgccatatgttttaaataaattattaaatggttgtttggacaacgtttattaaattagcgttccaattaaatctaatttatagttttcaatttgcgtttttataaatatcggttaatgtgattaatgtcaactcgaatgttttttaattaatacttgtttagtataaacacgacacctatttagtttttctcgcctgtcgcgcgtgctgttccacacgtggtagcatgctggttcgcgctggtcacgcacactattttcgtgcgtcgtcagaataggtgtacatttgggccgaacctgatgggccggcctgaagcacgaaaaaaatcacggcccagacatggcacgacccaaaatattttagtgtcgggtcgggtttgggccgaggtcgcggcccatgggcgggcacgagcacagcctgtttaagacagacacgaaatgac

SEQ ID NO: 56834 - DNA, 929 bp, Zea Mays
ttggcttcgagttttatttgtcaggttgcactagttattgctgcttgcagcaagttatcttggcttctttgaagctagttatctgaagattgatcctacgtcgtgaagatcgggcatcgtgacgcatcatctggtattaaagcctcagttgccacggtaggattctttaccttagctacatatattttgtgttcgtcctatccaccaaaggccataaatatatttttgccatagccctttgtttcaatctgttgttccagtgagttttgttaagtttcagtccttagagtctttgtttaattgctggtcactctatcctttgtgtttcctttgagcctcttatatatacctgaaaatatccacaaaaagaaaaatctgaaaaccctcatcatttccttcgcgttaactttgattctatttaagttatagctgctggttgagttctttgttaagtattataaagtgtgcaatatcatatcagatctctgtgtttagttctataaaaaaagagtatcaaaaaaagagaagaaaggaaagtaccaaagaaaagtgttgaacaagattctgaaagaaaagtagaacaatcagtttgtttatatgcacaagtgctgaaaattttatcaagttgttcaaccagtttgctattgtcttttggtgcaaaatttttgttggatctgattgcaacacttgcattccaatcatactcctcgatttgcatcaaatctgaaatttctttgcgcgtgtgtttgatctacttccatcactcgaatcttgtggtcagcactaggcagtgaacttctagttggattgttatttaactttacaacaactaggattcagattgcattccttgtttactattacccaccaagctccacatataagccatcgtaatcggtactctggtcttgtattcgcttaaccatcac

SEQ ID NO: 56835 - DNA, 664 bp, Zea Mays
atcaagccaccaaagctgaacgccagctgcaacaagatgctaagagcagcaagcccttgtcatatggtgcacgaaccatgactggaggaagcaaattgatctcaaggtttactgctgcatcctcagcaacaaaagtttcaactggaggcttgcgatccaatattcaaggcagttctagtggaaagaacggtgctgctccaaacatgagttataaaccagcagtatccacttcaacatcagtgggttcaacaaccaagagtagtggtattcagtgcttcaagtgtggaggtcgtggtcatgtcataaaggagtgtccaaataattgtgtgatccttgtgactgatgatggagaatatacatcagctagtgaagaggaagctgaagcaggaaatgaagatgacattaataaatctgaagaacatacgagatgtgaatttgagcatggtactactcttgtggttacacaaatcttgagtgttcaaatgaaagaaactgaaattggacaacgacataatctttttcaaacgcgagcaaaagtgcaagacaaagtagtaaaggtgatcattgatggagggagctgccataatcttgcaagtcgtgagatggttgaaaagcttggtttgaagttgcagcgacaccctcatccatatcatgtccaatggtt

SEQ ID NO: 56836 - DNA, 1095 bp, Zea Mays
ttttattccatgcaacaagagcgacgatgcttcacatgttgctattttgtttttcagagaaatcgtgagactacatggagtgcccaagaccatcgtatctgaccatgatgtgaagtttgtgagctatttttggaagacattgtgggaaaagcttgggactaaacttttgatctccaccacatgccacccccaaactgatggccaaactgaagtggtgaatcgtacattgtcaatgctgctgcgaacaatggtaaagaagaacttgaaggattgggaggaatgtttgccacacgtggagtttgcttataacagggcagtacattctacaactaatttttgccccttcgaaattgtatatgggttcaaacctatggctcccatagatttgttgccccttccattgcaggaaagaaccaatatggaagcttccaagcgtgctgcatatataaaaaatatacatgagaagaccaaggaagcaattgagctcaaagcagtgcgcaaggctgcaagtatgaacaagcataggaagaaagtgttatttgagccgggggacttggtttggattcacttgcgcaaggagcgttttcctgatcagcgcaaatccaaattgatgtcacgaggggatggtccatttcgtgttcttgccaagatcaatgataatgcatacaagatagatcttccaccaagctatggcgtgagcaacacgttcaatgttgctgacctcttacctaatacaagcgaagacacttcagagtcgaggacgactccttttcaagggaaggaggatgatatgaccacgccattaagcaacatgttacaacccccaagtcatactacatcaactcaaaaacaaccaacatcatcaccaacccatgtctttgatggaccaattacacgtagccgagctaagaagctacagcaagaggtgcacgcactactttatgaatttcaattaaatactaatgagaactttgttgggcctgtgcttcgtcgccgaaggtcttttaggaagaagcaaccttcggctgaagctgtttgtgtaagatggtcgaaggttcctcttcatgaagcttcggtgtcacaaaccgacttaaa

SEQ ID NO: 56837 - DNA, 1148 bp, Zea Mays
cagccaagggggagaaaaagggggtggcggccaagaggggggtgaagggaaaaaaaggggtggccacctagggtttttgtgggagaaagaaacgacgcctcagatgacttatatctttgcatccaatggcccacaaccctttacctcatccacgcaccagagattaacttttggtcaacattttttttgggatattacactctaccccccttaaaaagaattcgacctcgaattcggccactccaagcaaaacacccaaggtaccccatatagcaccacaattcaaaacatgtgtccattattggtcttaattaacacaagaacttctaccttggactaattgtctaaggaaactacacgacctgacatcaagcatgaaacaacatgtaatgaagcacaaagcatgtcatagttgcaatcaacactccaatttcacaccatcaaatttggatgcagctatacatcaacatcaatgtcttaagacaacactcttttatgaaggggtaatatgcaccaagcacaacccttaccaacttcaaccattaattttaattaaatggtgaaacatctacacccgacgaatgtataagaagatcaaacacctcaccttaaagcactatgaaacaagtagttctattggaacaaaactcctaatcttcctaaaccttattcttgccatcatgaaaagataatcatgtaatctaacattccttgcaccccaccaaaagggagaaaatctatagaactaatggagcaataaagccaaaagaagccaataacatcttgtgcggcatagttcatcgaagaaatgccaaaaactctacatagagcactgatagcccaacaacaacacaatacttgcttaacccatgtcactatacttcattcaacatctcaactaagaaaaatatccaactagtaaggataacctacacataatataagtcttcatctactgtagttcagaaacttacatttcattctatcatacgatgcactcaaagtaccagacatacaaagtcaataataataacccctaatccttcacacatttgacaaacatattaagctgatgtaaacaccacatgatctaggaataggtgactagccacacccaaccaactctaggctaggcaaggacttccttc

SEQ ID NO: 56838 - DNA, 879 bp, Zea Mays
cctcaatgtatcaatacataatcaatggatcaagagaatcaaagatttattctacaattagtatgactaacaggcaaccactttaaaccacatctaggctttgtggcaactaaaacacacaatatgagagagacatgtaagccattctggctatgaaaagacttcccccaaaaatccatataaagtaccaatattcatttctttcaaaactggtttctcaacataaacaatcattctttgcaatgatagttggagctatccaccaaccgctcaacaacttaaattcaaatggatgattaccttgtaccccaaaacacgcaattcacactcctcttagaaacatccacaatcaagcatatataacaatattattgtaataaaactcaaccatgaaaaacatggtgaaaacaacataggcatacttgtatatcacaagcataataacaacttcattctcaccaatgaccagcgatatctaccgcattaataaaacaatatcacaatttcagaaataaattatattaagcattaagccataaacaacttaccacatcaccgtaaaggaatagggaggggtgaaactattgtcatctgcactccaaagacattaatatatatcaaagatatttgaacccatacccttcctatatgtgcaagtgtgtcaaatttatcttcaaattgccaagaatctaaagcctaggctttgataccaactgtaacaccccgggatccacaaacaccccagaatgctactaaactacacatccaatattcatatataaaatttcaacagcatctcctttgaaaattgcataaacgggggaagcaacaaagtataaatagatatcatgataagaaaacatataagacattaataat

SEQ ID NO: 56839 - DNA, 363 bp, Zea Mays
ccccccacttctcttccctcttggccgccgcccccctgcccatctcctcctctctcaattcttgcagccacgaaaccctagccccccctctcaatcccctcctcccaaggtgtcaatccttgccgctcggatcatcgtcgccgtggtgcgagtcttcaatcgttttggtggagggaagaagggaggaaagaaagggggagaatctaaggtgatttttgtgttcatcccttgttcatttgcgctgcaatttaattgattagaggttgcgtttgtgattgggtagaggggggctgtccagaattttaggtggtgggtgaacagcagtagtctagcagtttctgtgttttttcatgaggaattaag

SEQ ID NO: 56840 - DNA, 234 bp, Zea Mays
cccacttctcttccctcttggccgccgccaccctgcccatctcctcctctctcaattcttgcagccaccaaaccctagcccccctctcaatcccctcctcccaaggtgccaatccttgccgctcggatcatcgtcgccgtggtgcgagtcttcaatcgttttggtggagggaagaagggaggaaagaaagggggagaatctaaggtgatttttgtgttcatcccttgttcattt

SEQ ID NO: 56841 - DNA, 528 bp, Zea Mays
cactagcttccgaaaacccgctacagttatgggaagagcaattgcaagaatccctcgtctgaccgccatcgcagcaaaatcaacccgagaacctccctacatgcctactcccctactgcccttgcccctttcgggtaaggtagtctttcactagctttcctagttagtcagccaagggcgtcccattccacccttatggtggcacgtgcttctcaagttaagctccatgttcgaattaaaataatataatgatcttgacatgaacataaataaaataacagaataatcggaacatggacataatgtaatattaatctcaaaaccatatagagcaatagcaaaactacccaaatagttcaggggtaaacaaggtataaagataatcagattagggtgacctattgcgtcccatcaaaattaaacctatgcatgattaagtgataataaagaacattattgggtaataaaagtgatcaagggcacaacttgcctgggacttgagattctaggtaccaggatgatcttcag

SEQ ID NO: 56842 - DNA, 279 bp, Zea Mays
cgcaagggttggagtccggtgatgaattaccagtcgcccacatgatttctcacttggccgagcccccgaagacgtcctacgctcgatgccgatcctcccagaccaattgtcccggaccaatggcgacgaggaccaaccctcaacaatggcggctctctgatctcacactcttgcagtcaatggcagaccctggcgcggcgtggagaagctgggagcggtttgcagacatttgatgaccgagacgggggtcgcagccgccatataggccgcagggtccgg

SEQ ID NO: 56843 - DNA, 1163 bp, Zea Mays
caggttcttatcactgctagccagtagaatgtcatctacatacaaaactaggaagatatactttctattcttaaacttcacataaatgcaattgtcttccttgttttcttcaaaatcgtactttcttagtctcaacaaacttgaggtaccactatctagaagcttcatttaatccatcaatgtacttccttaagtcgcatccgatattttcccttgtgacaaaacccttaggttgtatcatgtagacattttctagcaattctccattcaagaatgatgtatttacatcaattagatgggagttctaaattataatgtgtagatagtgtcatgattatcctgaatgagtctttatttgagacaggtgagaaggtttcattgtaacacattacttctctctaagtaaatcctctggctacaagcttagctttatatctttctacattccctctagagtcacatttggttttatagtcccacttgcagcctgctgttttggctcctttgggaatgacctttaggtcacaaacttcatttattctcataggctgcaattcattcttcatggcagaaaactacttggatgagtttggacttctcatggcttcttcataagcagtgggatctccttcagagtcaatatcccaactaacatatatctcgcaatcttttgtttcttcactagcacatatttcataattatcagagatcacagatcttctgactctctgaggccttaaaggcacatcattctcatcatttcgagggttctagggttgctccaatggtgaatcatcaagcacaacttcattctcttgttctgagggctcctgtaactggtgccaaaagcttagacactacaagagctaatgcagcttgctcattaattgtcgtgctcaatgatcaacattcgtagcagggatttcatttacagtttagagaaattgatggtgaaacctactctgcaggtctatgcggcctactctgcaggtagaaacgcttaaccaatcctggttgctattctcacatggtaatcagagcctctcctctaccctaaccctagccgccatttatcaccaattcgagcaatggcgtccagctcccaaaccgctatgcgaacaccccttctagggcaaattgttgccgtaaaactcaacaagacg

SEQ ID NO: 56844 - DNA, 1813 bp, Zea Mays
aaaaattggagacctgctatgaatgctgaatttgatgctctagttaagaacaacacttggcatctagttccacaaaagggagtgaaaaatgttatagattgtaaatgggtatacaaaattaaaacaaaagcagataacacccttgataggtacaaggctagattggtagccaaaggatttaaacagcggtatggcatagattatgaagatacttttagtccggttgtcaaggcagcaactattagagtcatcttatccttagcagtatccggaggctggtcattgaggcagctagatgtacagaatgtgttccttcatggcattctagaggaggatgtttgcatgaaatagccaccgggatttgaagataagttgagacaaaatcatgtttgtaaactcgataaggccatttatggactcaaacaagcaccaagggcttggtattcaagactcagtgaaaagttggtgaaactgggttttcaggcttccaaatctgatacttctctgctctttacaacaagggaggcatcactatttttatgcttgtttatgtagatgacatcattgttgctagttcctctcaagaagcaatagatgcaatgctcaatggtctgatcggattttgccttgaaagatattggccagctttcccttgcagatatttgggactgcccttatccttgcataagttgtccaaacagcagttccaaccaattgttgagaagattgctgatcagctccccaattggaaggctgatctaatgactagagctgggaagagagtacaggttcagcatgttctcacaagtatgatggtgtaccataccatggcagttgatattccaaaatggggtctagatgcttttcataaaattcgcaggggttttctttggaggggccggaaggaagcaagaggaggtcactgcctcgtggcttggggaagagtctgtcgtccactgtatcttggtaggattggaatatctagtttcccagagctatgttgggcccttcgaatgagatggctctggttgcagaagacagatcccacaagcccatggtctgatctccccattaaagttcctggaaaggctagagctttctttacagatgtggtcctcactgaagtgggagatggcacaaatacaaaatttggaaggataagtggctacatggtaagagaattgaggaccttgctctaagtttatttactattatacccaagaggttcatcaatagtagggcagtatgaggcaattacagacagaaaatggatctctgatattaaaggaccacagacagtgggagtcttaacaaaatatcttcagttatgggatatgatttcaggatggcagctgcagtctgaggttgaggatagacatgttttcagtattgctccaagcggcacctatcagctaagtctgcttatgaagggttatttctggggtctgtggcttttcctcattacaagggaatttggaaaacttgggccttgccaaaatgtcatttcttcatttgactggttgctcaaaaaagagtctggacagcagatagacttgctaaaagagggttgaaccatcctgagaagtgcctcctttgtgatcaagaggatgaaactttacatcatctccttgttacctgttctttctcgagggaattctggtatctgctactaaggaaatttggtctgcattctcttgctccacaaccggaggttgactcatatttgggttggtgggaagaggtgggggctgttgttaatggactccccaaaaaaggacttgactcccttatcatcctgggaacctggattttg

SEQ ID NO: 56845 - DNA, 429 bp, Zea Mays
atcagtatgcacctgctcttaaagacgaaattgagaagcaagtagctgaaatgctccagtcaggaattgtgtagccaagcaagagtgccttctcttcttctataatcctggtcaagaaaaaggatcagacctataggttatgtgtggactatggtcatctcaatgcactacatggattacatggagattcaatcaagcaacacacgagttcctagatgaaatacatggagattcaatgtttatctaaatcaaacaacacagttttcgaaatctgttctgacggtggacagaacacagcaaccagtttgtaaaattcataactcttaaactatcaggcctatggttatgaaattttaacaccagtaagataagaaaagcatctacaactttcttataacgaccatgaacggattgtaacattaaattaag

SEQ ID NO: 56846 - DNA, 230 bp, Zea Mays
tgggaattacacatttaaaaggcaatggcttaaatagaataataaataaataaaataatatcaatattgcatatcatgcagagtttgtgattttgcaataaaaattttgaacttgaaccctgaatcaaatataaattggaaacaaatttggaagaataaaattagaaaactagaaattagaaaaaagaaaaaagaaaaaaagaatatacctgccacctaggtcgatttcc

SEQ ID NO: 56847 - DNA, 195 bp, Zea Mays
catgacaaaaacatactaagtattattaatcggctagcaaagagaagttaaacatacgacatgatcagaattaactagtgcacatgactagttaaaaaaacaatcttcctttgacaataagtttctaattaaatcatggttgcgcctgggcagcgttattgtgagagtgaaagtggacatgctgctactcccctc

SEQ ID NO: 56848 - DNA, 224 bp, Zea Mays
atcaccttgggttcctcgttttcttccttcttcctccctccaaactcccatggaagactcgcacccacacgacggacaccaagcggggaggctccaccttggagaggatgaggtgggggcggctagggttgaggggtggcgctgcaatcacttggggaataaggagagggattggggcggctgcaagagtggaagagaggaagagagagaggggcggccaaagg

SEQ ID NO: 56849 - DNA, 701 bp, Zea Mays
gtctattcaaggtttttggtatttctagggtttgaatgccacttaagcccatccatggtgacattttatgattattacaaataagttttgagaacctaactcattttgggctttattgacctcctaagctcaatttagggttaagtgccctcccctagggttgtacccatgacatatcacctcaattcaacttgtttgaattttttgtctggtgaatgtattacatgatatgccaaggcttacgatgttatgcccaagctttagtagaagtaacaccaggggtgttacacgtggtaccgacggaagttgtctctgaactcctcccatgtgatggcttcagggtcagcatgggtggcgaggtaggactcccaccaggaccatataggaccttctcccggtcattgcactgagcggtatgtagctcccgctccactgtgtgcaaccagtcttcggcgtccatggggtctgcagagtgagcaaacacttggggatgacccctcatgaactccgcatgctgctgcacctattgcatggctgccagggtctaaccaatcgcttggactgcctgagtctgcatcagaaacatctgctcgattgtcattgggggtggtggtggcaactgctgctgggggcttcatcttggggtgtttgttgctcttgctaggcacaccttccacctcggcgcctattgtaagacatct

SEQ ID NO: 56850 - DNA, 967 bp, Zea Mays
cataagttcatcactacaaacatggaaacacatgataagcaaactaaaagtaaccaagactgactatgccaccagtttggtcacagatgtgcagagaataattttattggaaattgcaaaagatactacaacagaggaatgagcacacaattccatattctgtagatgaataaaactaatattccagtgagcatacaaactaagtggacaacactgaactcagttcacagcatcaccacttgacttcacatttcagttgagtttgcacaaacataacagcatataataaaaagttgacacccacgagcaacttgagtttttgggtaccctcatgtcaaagaacaggccaaacacagcagctctgaccagcggccctcatgtcgaagaagaagagttaccatgcaaggacaagagcttcttgatgagcacattggtctcctccatctccttgttgttcttctctgttatcttcttgtactcctccaactccctttgtgtcgtcgcctgttgttcctcagcttcttcacatttcttcctgagctggtcgagttcaccttgaacagcagccgtcgcttcagctgcaagttgttcccgaagctcactttgatttgatgatgatgccttggaggatgccgatgttttgatgccaacgctcttcaggaattggtgtgagctactctgggacaacaccttggacactaggtgcacactggatgctgcaatctcaccttcagcaacaggttcagccctcaaagcctccatacgatactgaaatattatggccagaaaacagttacatgttaatgctaatgagcaacaacaatatgccaattgttagttattgcaataatttgaagaagacatatgacacaaagtgtttataatgaaataataaccaatgctacactgacagaaactgattgcagttggcatttgctttggagaggtaaaaatgcagagatttagg

SEQ ID NO: 56851 - DNA, 1575 bp, Zea Mays
gcctgatgaaacttgacttgactgcggttctgcttgttcttttcacttatttcctacaatagaatgaacatgtcagattaggtcataggttcaatatgcgaaaatgctttgcaaacttatagtgaaagaagaatatatgacaagatacccataccatgttctttggatcagaccactttgcaactaatgccctccactgttcatcagtcatgtaagatacaggagaagttgtcctaatctcatttgcaggtacaccattgaagtatttctgcttgagccgataacgctggttttttaacgcagagcgtagcatatcggtgcaagcttcctttgttgccttgtcctcagtgttaacggacaagcgcccctatgcatatgacaattccatagttagtcaattcaggttaagcagtatacaagtgaaccatagaatcagtaatgcacttacatttagctgtgacacaaagctattgtagtatttctggtcgtccttgtaatctttccaacgagttaggataggcatggtttcccaaataatgataccagcctctgatgcaaacttggcagcttgaacaggttcatgtggcctttttttgccttcctcgacagctatgggcagtctcctttgcataactttagtcatcctgtccaattgttttcccttagttgctgccctgggtctccatggtgctcgttgtgtaggagctacaaaatagaattcgcatttattgaataatgaaattgttttgtttcatgcaaattagcaaaagagatgccatatttgactgaaaaaactagaacttgccttcagtttcttcatctctagctacattgccttcagcatcacctgtactgtcatgaccagcagatgccatgtcttcctctgcagctctgctgaaatgatcagcaagtccagctatagtagggttgttgccttcagcatcacctgtactgtcatgagcagcagatgccatggcttcctctgcagctctgctgaaatgatcagcaagtccaggtgtagtagggctgtttggtatgtcatcattagcatctgttggttcctgtacattgtggtcatctgtctctgtagagtgaagccttttttatgattgctcctctggttgtggacctgccctcactctcttgctgaacctaattcctggagccatgttggggtttctcttcttctttgaagcaagggttgtgtttctagctcttctagataactgtccacaaaaaatagtcatgtgcatttaagagcaataccatatattaattaagaggtatgaaataaagaagatgaatctaaaagcatgagcatatattaaacaccagattaaaaacattgaaatgcaatgcaactatttgccatccactactttgaagatagaaggagcaccttaattgccaggggttgtggctgctcataagattcagtgtcatcatcatcagtatttccttgatcatcatcgtcaaggagatagacagatacatatgaatctgaatctgaactattagttatcttgtttgctgcatttttcccctttgttgatgcaaatggtgataaagattaac

SEQ ID NO: 56852 - DNA, 279 bp, Zea Mays
ctttccctgagttgggtgtgcttaatgaactgttgggctccgggcaactctaatttgttgggcctcgaccaaccccacctgggctgggtgtatcatctggtatcagagctagggcccattttaagaaggtgggaatgatgaggacatcctccactattacccgttagcaaagacacaattggcccagttggcccaattgtagtcggacggtgaccgtgtgagcctcagaattatcccacctcgcttcacttgggaggaggaagccactttaaaagggag

SEQ ID NO: 56853 - DNA, 618 bp, Zea Mays
ataaaacataataccacaaatttaagaagtatcattagtgattacattatcggagtttcagaaataataaccaaaaattttaatgcagcggaaataactaacggagaaaaccgagtaacatggcgaagcttggccacgctactcctcctggtcctctcctacggaagcaataccccacttgaccgtctatcccggtggcagggatggaggccaagtcacaccagcaaccaatcatcctaaagaatacctgcaaaaattgtgtcacaagcaaggctgagtatactaatactcagctagacttacccgatgtgaggagtctactcctctacctctagacatgcagctgtttggctaaggggtttggtttgccaaaagcaatagctgagtctaaaatcaagttttagcttttcaagttttagtatgatcctttttaaactagatgagtacctagctactcatacatgatatcaaacatttttaagcaatcaacctttttgtcagtcaactcatttccacttattactcaatgtagcagcatggatcaagcagtctcattagctgcgagaagcagacgattcgaatcgagtttttatccttgcaaggtaaacctaaacacac

SEQ ID NO: 56854 - DNA, 532 bp, Zea Mays
caaaacgccaaatcgggccgcgctaatttatttccattttattttatggtgttttgattaaacacggattatcagatcgctaattatttcccggaatacaatgctcctgcggaattcgtctctacggagaacatagcgaaatagatttcggaagatcgggcgattaactcggccgagagtctgatttaaattcgctcggcaacaatccctacgcatgatccaaaaataaattgtctcgggatacgaccgactttcggatttatgatttgaaagagacaaatcgcgatatttaaaaatcgtcgtcgaggttgatttttgaaatcggattagacacagaggtattaagctaagtcgagtaagatttgattagaggacgacatactgagtatttattttgagagtacggattcagattaaaatagtcgaacatcgatcgaagtctgaggaattggattcgagctcagatcagataacagtcgtcgagagtttgatttaatgagcttcagatgagatttataattcgagaatgatc

SEQ ID NO: 56855 - DNA, 460 bp, Zea Mays
cttgcctttaatttaacacttaggtagtgtttgctggggaggtactcgcttggcgagcatccactggttatgtccatccttccttgggtcgtccactgactgtatcttgtgggtggcaccacatcacttgcacgatcatcctctctcggtcctaaatgagatgcaagatgcatatgtatgaatataatgaaatagcacaagatactttaagtacatgttagcgaattaaacactaagtagcgggcatcataagcgaccgcacacactagcgttagctactacatatcattgagcgcacaacattaacaccactaaaagacgacaacattttgtatatttacgcaacacaaatacgaccccataagtacgagcatttatttaacttgccacggattttcattagttcttctatttatcacacaaaagcatcccaagcaccagttcaacagaggaggaattt

SEQ ID NO: 56856 - DNA, 364 bp, Zea Mays
accggtggagggggatgcagggatctggtcggcgtgaggggcggcttggcggtgaagacaactccgtcgaggaattccacccgacccagtcccgctttccaccacaatcggtgacatccgcgctcagggcactccggggattacccagcacgcacaccgagcacggagggtggtccttctcgcctgtagacgacagtgtatcgttgttcctcccgttgcgctcggcgtacggccctctgcagtcgccgggtatctcggcggttgcagcgaggcggttgcacggggtatggcgaagatagtggtgcgcagagactcatataggctggctgggcaacaacttgcctgagatccccgccgaattgag

SEQ ID NO: 56857 - DNA, 117 bp, Zea Mays
caccattctcacaactctagtttaagttctccatcttccacatccctctaattccactaaaaagccttgaactcacggtgggtactgaggccggtgatcacgacaggcattttttcc

SEQ ID NO: 56858 - DNA, 809 bp, Zea Mays
ggagataatgcttcgaaaggacgaaggtctttgaccattaacatttttgagttgccttgttcttaactcatagcatttgagaacaagtccccaacatgaaagatgttgtgatgtgtttgtgagaggtctaggccgtcatctcccagtcaactttgggttgctggatcgttgtctccttatgatgtaattatttatttattttgtatagaaactcctattatatagtaaagttgtaacattcgtttcgtaccatgattcatcatatgtgtgagacttggtcctagcacacctggtgattatgttcgcgcccgggtcgctaaaacctgggtgtgacaaacctacgatctcgttacgatgcgtagaatattatgatgcaagttgttctcatgtttggcgtgatgttaatttctcatgtaccatgttttcttgtattgttgcgagtagacgggcaagtgactgaggactcagaagctcagcaggtggaaactgttgagcaggagctcgttgaaggcaagttgtgcccttgatgacttctatttacccaataatgttcctgttaatcattatgatctgcatagatcaaatttgatgggacccaataggtcaccctagtttagctatctttataccatgtttaccactgaatttttgggtagtaccttctattgctttatgtggttttgggtgttaagatacacattattcatgatcatgctgttattatcaatttgttatttactgttcatgacaagatcattatgttaattggaacatggagcgaccacccaggaaaacagtgctaccacaag

SEQ ID NO: 56859 - DNA, 560 bp, Zea Mays
cacatctaacattcatatataaaatttcgacagcatcccctttgaaaattaaataaatggggaagcaaacataatataaatagatatcatgatatgagaacataatagacattaataatctgctagcaatggaaagacaaccataaacggcatgaactaaatcaaccagtgcgcacaactagttagaaacaacatcctttgacaagaagtttctaattaaatcatgactgcgcctaagaagcgttattatgagagtgaaggtggatgtgctgctacttcccacttcccttgatgagcaacaagcacctgcatcgagtaatgcaagagtgagatgaaacatctcaccaagcgaattgttttgacaagatatttaaaccacaaattgaattaatcaacattttaaaagaatcacaattaagatcagacattcctgtagatatagaactcagtagtctcaatataaacaataccatctcatttccttaaacaaccacaatagtttgtataacacttccctgcgtcaacaatacctgcaaatagcacttcaatgtatgcatagg

SEQ ID NO: 56860 - DNA, 170 bp, Zea Mays
cacccctcaaccctagccgcccccctcctcctctccatggtgcagcctccccgcttggtaccccgtcgtgtgggtgcgagtcttccattggagtttggagggaggaagaaggaagaaaggaaggaggaaaggaggaacccaaggtggtggatttccggatcgtacttagt

SEQ ID NO: 56861 - DNA, 338 bp, Zea Mays
cagacggcgggtgagggcgcgacagaggagtagacgggccacgcggagaaacctttaggtgggttggtcaacccaaatttggcccataaggctgattctggttttttattcttttctatttcctttttctttttctttttttactttttgaatctcaatttgaatttcaaatttgtggtgaatctatactcaattaaatgtacagtttgaaaatactattgtgattattataacatctacttttttttacaaaattattatttactcttttccttgtcatttatttaccaaaggaataaatggttccataaattgttttctttatcattttctatttt

SEQ ID NO: 56862 - DNA, 1041 bp, Zea Mays
caaaggtgtaccatattacacatttatttcacacgattacgttaccggaggtgctgaggtattttagcaaacatctaacacaaacacgacgcgcctgctaaacacgagaattattacgactaataagtctagttaatctaattcgattaaccaaaataataaattggcttaccaagaccgaattgattcgataaccgcaagggcgatgacggttttctaatttagacatttggttgagcccctagcagatgttggacaaacttgtctcaccttttcatccaaatccaggatcagtctccggaagataaagtcgacgacgagttctatggagtgaacgacaacgttgttgtacccacggcgcgtttaagcatatcggctagcaatccgaataaacaacgatgatccttgttcaagtctttcgccaagcatttggtgggcatcaatttggagcttgcttctccacattctcttggggattcttttgccagcgcgaacacaagtcggaggcatcacgtaaggactggcatcgaagcgaggcgacggaacaacgacaacggggtgggcagtgttgaaggagctcggcgccatggcaaataggagatcgatcgaggcagaaccgattgccgaactgaaactgcgcagatcgacaacgcgaggcccgatctgcgagcacgacgcaaaggagggcgtcgcagccgctgctccgacatgaagtacttgctgccgagcacgacagaggtcggggagctgctgacggttggcccgacagcgagcaggggtactagggcgtgcgtgcaggaacaaccttgacaggacgcggctgggcgagaccacgacactgggaaacagcgggcaaccaagcaaaaatccgagatgggcgccatggacgcgacagcagggaggacgcagggaccaagttcgctggcgttgctgccgagccgggagggactcacggcggggatgaccggctcaggggtagtggcgagcgcaggggcgagccagggagctccggtcgggcgctgcggagaaggccgagccggg

SEQ ID NO: 56863 - DNA, 356 bp, Zea Mays
aaagcgcgcagaggctgatgactgggcccccggtatcggcgccgagcgtcaggtggatggcgcaacgaaccaatcggctagggctggtttcggccaaagcactctcttcttttttttctttttccttttcttttttgttttgttttctttttatttttacatcttcaaacttgaattcaaatttttgttgtgagtttcacacttagattatatgcaaaattcaaaataccagtatgaaaaggtatatttatttatatatattttttctttatagtgtatattattttcctttttctttcctatgttattttcaatttatagatttcaaattaagttaaaccctaatttcagcatta

SEQ ID NO: 56864 - DNA, 143 bp, Zea Mays
cagccatcctccactacttcctcctccctctagatctccccccacgcagcaaggatcgagaagaggaggagcaagatggattgaagaggaagagaggatcaaggagatgttctacccccatctcttgcagattttcttgggga

SEQ ID NO: 56865 - DNA, 403 bp, Zea Mays
aggcagataaaagtattatttgaggtttgtattgtatttaaaggaagtgaaatttattgataaatgcagcatgccatatacattgcatgactcatttgcatatgaagttttgtcgtgacctatggtccgaccgtaccggtacaacttagcatcgtacgttgcccgaggaggggtacgatgcggcttcatacccttagaggtatgaaggcagaggacatatgcattgcattcatatgaatacattgaagtgatatttgcagatgatgtggttttataccctcagaggtatgaagatagaggacctacacatttcattcctatgcatacattgaagtgatatttgcaggtattgttgatgcagggaagtgttatacaacctattgtggttgttcgaggaaatgag

SEQ ID NO: 56866 - DNA, 387 bp, Zea Mays
agaaaaaatcgcaatgaaagaaagtagacaatgagatacaacatccagtggttcggccgaggcctacctccacgttgtggtgtcccaatggacgaggattgcactcaaccaatcccaagtgatctagagatcaaacttgagaaccacgactgtcttccttatagcattttctcgtttgtgaggaatctccacaagttggagtctctcacaccttacacggtatgatcacaatcaagaacaagagtaagggagggatcagcaacacacacaagagcacaaatatagcaagaccactcacacaagtcacaaaaaaccgacaaagtctcaactcaaaacgtgctcaaatctctcttggatgaacaaaagcgtgatcggagtcacagagtt

SEQ ID NO: 56867 - DNA, 2975 bp, Zea Mays
tgacaacccatttctattttattatgatgacggaatagaaataatatcaaactacaaatgtaccttcggctcgtgagaaggtaaaagtacaagtgtgacgcaaaagtcaatgccaaatcagcgtgaacagtacgggaatactgctcatctatttataggcacgggtcgcagcccatgcaaaattacattaatgccctttacatttatcaatgaacctatagtaattcttcgaggtctagtttggcttttcatctttaagtcggtttccccttcccgtcgtgatgccgaagctcttccacatatcgcttcgtgatcgtctccgtcccagttaagcttcgtcttgaccatgcttctgtatacccgcaacctgatttcttattccgaagatacctgctcgcatacttagaaagcattgtcaaattatgtttttgaggaccttcggaagccgaaggcccccaacacataggaaccactagatgaagcaatcatagtgcacaaagtaaaaacaacattatgacgcgtacgtaaaacatgatgatcaatatatgcatcatcatgaacattacgagcattatgagaaacattcttaacatgagaatctaaataagaatggttcttcttttcatgaacagaatgtgagctactagccataggtgcctttcccttctccctagtgaagtcggcggccttttggctctttgtgtccttggtttcattttggaaaccaagtccatccttaatgaatgtttgtctaccaatggtgtaggcatccctagcaaatttaagtttttctacttcattgttgcaagttttaagttgaacatttaattgaacaatttcatcattcaacattgcaatagtataagcatgatcattgcaagcatcaatgtcaaaatccttaaccctattgcaaataaatacatgctccaaagttgaactagttgcattcaacttttctattctagcatttaaatcattatttgcattttttgaggctataaatagtagcatgacatgaagataaattacacagaagcctttcattcttctccacttctaaagcaagagatttttcaatttctacaactttatcatgttcctcataaagcaaatcctcttgcttttctagcaacctatccttttcattaagggcattaattaattctttaattttgtcggctttacatatatcaaagcccttaaaaagattgcaataatctacatcatcatcagattcctcatcactggaggtgtacttaggagtgtcatgtgtatgtaccttcttttccttagccataaggcatgtgtgtcgctcgtttgggaaaagagaagacttgttgaaggcagagctgacaagtcctttgtcattggagtcggatgaagagcaatatgagtcccattccttgccaatgtgcgcctcgcccatcttctttctatagaacttcttctccgtattccctttcttgtcttggtcctggttattctcattattgggacattgagtaataaaatgatcagacttaccgcactttaatcatgaatgctttccccttgatttgttcttgctggggtagtccttgtgtcccttcaaggtggtattgaaacttttaatcaggagcgacatctcatcctcgttaaggccagtcgcctcaactagtgccacattgtcgggaagtgcttccttattggtcgttgctttaagtgcaacgggttgcggctcgtagtgaggatgaggtctgttggcgatgttatcgacgtatcttgcttcctttaccatcatgcgctcactcacaaacttaccaagaatttctttgggtgacattttggtatacctggggtttccgcgaataagatttacaagatgagaatgactaacattaaatgaccttagcatgaggtgcacgatgtcatgatccatccatcttgtactctcgaggattccgatcttgttcactagggccttgagcctattatacatgttagtttgctcctcacccctcttcatggcaaacctccccagctcaccttccaccaactccatcttggtgatcattgtggcatcgtttctctcatgagagattttgagggtgtcacatatctccttggcattgtccaagccactaattttgttatattcatctctacatagagatcctaaaagcatagtagtggtttgggtatttttatgaattttctcatgaatataaatagcattatcactactatcaaaatgcattctattttttactacttcccaaatgctcggatgaagagaaaatatatgactacgcattttatgactccaaaaagaataatcttccccatcaagagtttaggtgatatgtaaagcccaaaaaatttgtacaaggaaaaaacaaataaagaaataaaatagtaaagtgagatatctcaaattatacccgagctttgaattttgaagactgaattttgaaaaccaagaattaatttagaaaagaaataatagaaaggtttactgtccaactaaatgattattcattttattaaataatacactacaagcatttatttaaatgagtattaaatttagatgactcaaatctagactagacttattaaatgagttttaaatgattattcatttcattaaatgattattcatttcattaaataatacactataagcatttatttacgaatggctactgtgtcttcattgggttcctcaaaagacccatcatcctccatatcccctccatcatctaaaccacaacctaaatcctttaacaactcagatattgcatcatcttctgtaggatgctcgctaaactcatcatcattgttaccatgattcacaaaagaggacgaagcttctccatgtaaggtccatgttgtgtacccttttagaaaaccatcacatatcaagtgttctcgcacttcactggcctctctccaaatgagttaacacacttcttgcaagggcatagtatcttatt

SEQ ID NO: 56868 - DNA, 660 bp, Zea Mays
tctaaagctagtggaactttgtaaaggcctcgtagtggatccctagccattcacctcagaagtgtctaagggccttgcaaaccctggcgacatggtatacatgacttgtgggtacagggtacaacctctgcagagtgtaaaactggtatactggccgtgctcgcggtcatgagcagctcaggactctcgcatgattaatttatggagttaaattcaatttgtcatatgtgttgcatcgcgggtgttgttatcaattttgatctattattactctagtttggtatctacttacacttagtaactgctaataaatttttgaccatctttaaaagcaatgctcagctttaaccattctctttggtaagccttacacttcacatgagctcccacctttggcgagatcatgcacattattccccacaacttgttgagcgatgaacatatgtgagctcacccttgttgtctcacacctctcccacatgtcaagaacaggtaccgcaggatgaggcgcatggaggatgctgcaatgtgttcgtgagaggtctaggtcgtcatctcctagtcaactttgggttgctggatcgttgtctccttatgatgtaattatttatttattttgtatagaactcctattatatagtaaatatgtgacattcgttt

SEQ ID NO: 56869 - DNA, 584 bp, Zea Mays
ctacactaccgacgtccatatataaaatttcggcagcatcccctttgcaagattgcataaaagagggagcaacagagtataaacatatatcatgactaaaacatactaagtattattactcggctagcaaggaaagataaacatacgacctgaactgaattaaccagtgcgcacgaccatataaaaaaataaacaaacttcctttgacaataggtttctaattaaatcatggctgcgcctgggcagcgttattgtgagagtgaaagtggacgtgctgctactcccctcattcccaacatgtatcaagtacctgcattgagtaatgcaagagtgagatgacacatctcagcaagtaaaataatatcaaacagtttaaccacataagaacattgttttaccaccacttaattccacaaccttcttattacgaaggtgcagcacgtatacaacgtacaacgcacctagttaccacacctcgcaggtagaaaccacaatagtaacatagtaatgtcacacttcatatattcctcatgagtgcaaatgtctgcaaatgcaaggatgacttctgccttcatacctctaag

SEQ ID NO: 56870 - DNA, 171 bp, Zea Mays
tcaccttggattctccccctttccttcctcccttcttccctccaccaaaacgattgaagactcgcactacgacgacgatgatccgagcggcaaggattggcaccttgggaggaggggattgagagggggggggggcggctagggtttggtggctgcaagaattgagagagg

SEQ ID NO: 56871 - DNA, 236 bp, Zea Mays
aattatagaacttaaattcaatttgtcatttgcatttgcatgggattatttattaattttgttctattatttattatagtttggtatttacttacacttagtaactgctaataaaattttgaccaacttataaaagcaatgctcaacttcaacctttattttgttgatcagccttacacttcacatgaactcccaccttttgtgagttcatgccacattattccccgcaacttgtt

SEQ ID NO: 56872 - DNA, 1328 bp, Zea Mays
cagaaacaatagacatgtggttacctgcgaaaggcaactggctgttgggatcgatgggaggaatgattgcgatagatgaactgtgagtcttccgcttgggcaccatctcaatcttgctggcgagcagagcggaagcaatatcgcaacaaagcagagaagatctggatgcagaaaagcaaaactagggctcagagtgcagaggcatgcgacagtgcagtacatattgggttttcccgggcttgtaacaccctgggatcctcaaacacccagaatgctactaaactacacatctaacattcatatataaaatttcgacagcatcccctttgaaaattacataaacggggaagcaacaaaatataaatagatatcatgataagagaacataatagacattaataatctgctagcaatggaaagacaaccataatggcatgaactaaatcaaccagtgcgcacaactagtagaaacaacatcctttgacaagaagtttctaattaaatcatgactgcgcctaagcagcgttattatgagagtgaaggtggatgtgctgctacttcccacttcccttgatgagcaacaagcacctgcattgagtaatgcaagagtgagatgaaacatctcagcaagcgaattgttttgacaagatatttaaaccacaaattgaattaatcaacattttaaaagaatcacaattaagatcagaaattcttgtagatatagaactcagtagtctcaatataaccaataccatctcatttccttaaacaaccacaatagtttgtataacacttccctgcgtcaacaatacctgcaaatatcacttcaatgtatgcataggaacacaaagtgtaggtactctgtcttcatacctctgagggtataaaaccacatcatatgcaaatatcacttcaatgaatgcatatgaatgcaatgcatatgtcctctgccttcatacctctaagggtatgaagccgcatcgtacccctcctcgggcaacgtacgatgctaagttgtaccggtacggtcggaccataggtcacgacccaacttcagatgcaagtgaatcatgcaatgtatatggcatgctgcatttatcaatatacttcacttccttcacatacaatacaacctcaaataatacttcatttaccttcagatacaataccaacctcaaataatacttcatttaccttcaggggtgtgaattaatctcatgagtcatactcgaatcataatcatcatcaatatatgattgagcatcagtataatgcaagcaagtaaagcatcaccatagagtccaattatgaaagaatccaatacttct

SEQ ID NO: 56873 - DNA, 136 bp, Zea Mays
ctcttagtgagatcttgaggtcgattcctagaatcgcattgaatttactgcgttttcattcttctttcaggataacttaggtacaattaaaatatttcatgcagtcctactagtttattaaatatgtgatattttt

SEQ ID NO: 56874 - DNA, 349 bp, Zea Mays
gtggtagtggcagagtggtgatgagcgcgcgggtgagggctgacgtcctggtcccacacgccggcgccgcgcccctaagctgggccgcgcggtgtaatttcttgagtgggccgaattgggtacagaggcctagttaggggtttctttctttttttcttttttttatttttcttttctctaatcccaattccaacttgaattcaaattaacattcaaatcttgtgctgaatttatctttgagttatactgtgaccttaaggtactaattttggagatatataaactttctttatattttatatatcttctcttcttcaaactctcaaattaggtattaaatccttgcttt

SEQ ID NO: 56875 - DNA, 272 bp, Zea Mays
gtttaatagcatttcttcttaattgaaaatccaaataagtaatttaataaatgttagtccaagaattaatattttatttataataattttagtttaattattatgaattttatgattacttgaataggtatttcgaaattagaaaaagaaaaaaaagaaaaaaaagaaaaaaccctaatctaaccctagccggccatatggcccattaggcccactaagccgcgcccctcctaccctaggcagccgccgccccctgctcctggcaacagccg

SEQ ID NO: 56876 - DNA, 184 bp, Zea Mays
acacccccataggagaagaacatgtggttcaagtggagccacgtatcgaggactttgattcgatctaggtggcgtctcccagttgactttctggcaccaaggatggattttagatcctgttatatttatcgtttattttgtaagacttctgctatgtaataagtactctgattttattgtgaca

SEQ ID NO: 56877 - DNA, 247 bp, Zea Mays
cttgatacatgttgggaatgcggggagtagcagcacgtccactttcactctcataataatgctgccaggcgcagccaggatataattagaaacttgtgtcaaaggatgtttgtttttcttaactagtcgtgcgcgctggttaattcagttcttgtcgtatgtttaacttctcgttgctagccgattaatattacttagtatgttttttgtcatgatatatgtttatacactgttgcccccccattta

SEQ ID NO: 56878 - DNA, 350 bp, Zea Mays
ctttccctcctttgtccgtcaccctccccccctcttccctcttccccaagtgctgcagccgccccctctccattctcaaattttttgcagcagccatctcctcaaccctagccgccaccccccatctcctcttctccaagtgtcgttcttcctcgttggatcttcttcgtgggggtgcaagtttcaattggagaattggtgggaggaaggaaggaaggaggaaaaaggtggaactcaaggtgatcttgaagttatctatgtttttgcgctaaaattcaattgatcataggtttatctatgccaatcggtagaggtgctgaccagaatttttgtgggagggcgaacagcag

SEQ ID NO: 56879 - DNA, 428 bp, Zea Mays
ctacctgcgaggtgtggtaactaggtgtgttgtacattgtattcgtgctacacctacgtaataaggaggttgtaaaaatcaaatggtggtaaaacaatgttcttatgtggttaaacagtttgttattattttgcttgctgagatgtgtcatctcactcttgcattactcaatgcaggtacttgatacatgttgggaatgcggggagtagcagcacgtccactttcactctcataataatgctgccaggcgcagccaggatataattagaaacttgtgtcaaaggatgtttgtttttcttaactagtcgtgcgcgctggttaattcagttcttgtcgtatgtttaacttctcgttgctagccaattaatattacttagtatgttttttgtcatgatatatgtttatacactgttgcccccccatttatg

SEQ ID NO: 56880 - DNA, 551 bp, Zea Mays
aatgaattacaaagccatttatacattacattaagaacccatgagcaccaaatgttacaagtatagtctagcaaatgttacattaatattctagcaatatttttacaatatctattcttcttccttcaaaactttgtctgcagcttcggtcagcggttgagtaacgacttcgtccataatgctttcggccatgttaataatttctgctgattcctttgcctctgggtcgaccaatgactcgaagggctctaggggaggagatagcttggctgcagtagaaaatgtaaataaattcgaagtcacaaaaataaacaataaagttaaaagctattaagcaatacctatccgcctttcgagttccgcagcattttcagctgccttcgttgcttccctagcatcatgagtatctttttcgctcttctttattatttcgtgggccatccctcggccgccattttcctagatgtcagtaaagaattttccaccaactaagcttgcttcggccgaggggtccttcgtatcatcgatagataaagcagcttcagtttgcg

SEQ ID NO: 56881 - DNA, 440 bp, Zea Mays
ctcgactcaatatttgcaagaacgacggtagcctccggttgaagtcttcgaccgaacacttgacgagcgatacacacgggcctcgctttcttcatccacacacacaaattgcactaacgagcagcgaggtcagagggactcggtgttggagaaaaatactaggaacgtccggtgatggagctggcagatgagctcggcaaggcgcaagggccgagcgacggtagagtgagcacgcgcaggggcgaacagctcacgaccaagcgacggtgagcacgagaccgaggcgtgctgcacatcagtgattgacgagaactgaagaccggcgatgaggatccgaggagcgagtgcgccgcagtgacaatgagcaagaagagaggttggactgggggaggggctcggcgagctggaataccagagagccgagcgcgagaaagctggag

SEQ ID NO: 56882 - DNA, 1073 bp, Zea Mays
acttcgacctcaggataaatgtctaaggaaactacaccacccgacatcaagcatgaaccaacatgtaatgaagctcaagccaagtcatagatgcaatcaacactacgatttcacaacatcgaatttggatgcagccatacatccgcatcattgtcttaaaacgacactctttgatgaaagggtaatatgcactaagcacaacctttaccaacttcaacaattcattttaatttaatggtgaaacatccacaccagatgaatgtataagaagatcaaacacctcacctcacaacaccacgaaacaattagttctattgaaacaaaactcctaatcttcctaaaccttgttcttgccataatgaaaagataatcatgtaatctaacattctttgcaccccaccgaaagggagaaaatctacagaactaatggagcaataaaaccgacaagaagccaataacattatgtgcggcacagttcatcgaagaaatgccaaaaactccacatagagcactgacagcccaacgacaacacaatacttgcttaacccatgtcactatacttcatccaacaactcaactaagaaaaatatccaaactagtaaggttaacctacacataatataagtcttcatctactgtagttcagaaacttacatttcattctatcatatgatgcactccgagtaccagacataaaaggtcaatactagccccgtaatccttcacacatttggaaaacatcccaagctaatgttaaaaccacatcatctaggaataggtgactaaccacacacaaccaactctaggctaggcaatgacttcattcaaaccaatagataagtggtccgacaatggctccacaaacatgcatcgggacgagaaccatcaaatcctcaatgtattaatacataatcaatggatcaagaaaaatcaaagatttattctacaattagcatgactaacatgcaaccactttaaaccacatctaggctttgtggctactaaaacacacgatagaagagagagacatgtaagccattctggctatgtaaagacttcccccaaaaatccat

SEQ ID NO: 56883 - DNA, 2008 bp, Zea Mays
caaaagcgtgatcgaagtctcggagtttgttgtatgctcttgtgattgtttcggtgtgttgcatgggtaccgctccatggcgcctaggggctccttttatagccccaaggagccttggagccgttggttcttcattagggaagcaatcaaccttccatgtttgcatgcaacggattgaacaatcagcgacctatttccttcaacggccgagccgaccgttgtgcgccttcggtcgcctcgcacatcgggcaaagcacaaatgatctaagctcgcccgaggccataactcgcttaagacagtcacgacccgcctgaggtagtcacgaccagcccgaggctgtcatgacttgcccgaggcagtcctatctcgctcgaggtagtcatgacctgcctgaggcagtgacgactcacccgaggtagtcatgactcgcccgagacattactgacacgtcgaggcagtcatagacacgctcgaggccaactttggataggagccacaatttcgattcgcccgaagccaacctcagagggagacgtagtttcgatttgcccgaggccaacctcggtagaagatgcagtttcgattcgcatgactgcacctccgactcgcccgagcgcagtcatgattcgcccaaatgcagtgccaattcgcccgagcgtagtcccgattcgctcgtgctcatcaccaactcgcccgagcgcatcattgattcgctcgagcgtagttccgactcgcccgagcatgtctcgggtgactgtccggtgaggccgagactggcccaagttcgaccatacttagccaaacttcttcactacattctggcttgacttgagaagttccctagcacttagatgaacattgttagcacctaaaacaaatgactaagtgctagaaacatacctttatctttttgattcatagaggtttgcaatatgcccaatttcaagcccaaaagtgcttttcttattttccttaatcttttggacttgattgcttcaatttgctttctaaacacttgtgctcatgctcataaagaggagtgttagttcttagtaatgtgttgagcatttaatcaccaaaacaactggaaatagcaaaggacacatttccctttaaatctcccctttttggtgattcatgccaacacaccaaaagcaacttaaaagtactaacataaccaaatatgagccaacttttgcaaattgaagtcaagtcaagcaccgatagaataactataggatttggcatatttggatcattttgctaccacctggtttattttcgcaaaccaaattcattttctcacttctaagtcaaaacagtttagttctacaaattaaaccatttttcaagacagttttgatcaagaagccaaaagctcctccttttcccataaagatttctcccccataagagagtagttttgcaataagagggctcctcttgcagttaagaggcctttgatcaaaaagacaagttcaaaacataatactttttgaaattcacaagtggcggttgatctagttgctttggccttaatttctcccctttggcattaagcaccaaaatggagaatctagtggcctaaaacctcattgcctcaccaaaaattatgaatttgagaacaagaagacaatgaacaccaagggcaacttgacaaaggtacattgataccgttatgcagtggaagcattttcctgtctcagtccaccatttccctttcaatctacctttgagactacaccaaaatcacttaagcaaacatattagtctcaaagggtcaaattgtagcatatcttccccctaaacatatgcattattttcacaaggacttgtgaggtctggggatgacattctacaacttgagcaccaaaataagcaagaaggacaattaagcttaaaataacatcatcaaaggcacctttcccatccacctcatcctttaccactatgttaacatcaaaccatcaatttctaataaccacactgaggactttgggaatcaat

SEQ ID NO: 56884 - DNA, 263 bp, Zea Mays
cggggtgtcaacgccaggcggagggactaggccgcacgcacgtgagtctggtgggccgacaacgagggattgagcccagtgcctatttttccttttttttctttttctttttattttctactttcttctctttttatttgtaaatttcaaatttgaattccaattttgttgtgaatttcatactttgattaaatgcacatattaaaataaataccagtacgaatacatataattatttatttatatcttttgctttatagtat

SEQ ID NO: 56885 - DNA, 445 bp, Zea Mays
gtgcagcgcagctggagttctggtcccacacgtcggcgcatgtgttttcccccatgggccgcgcggcagcaagggagaagcggatttactgggtcaggagaagaagacggcctagatacaggttattatttttttcttttcttttttttattttcatttttcatatttgctttcaaattcaaaccaatgttaacttcaaatatacatcagcaaaaacttcaataggtatgcaattatataactttatttatttattattttttataaatgattttatagagcataatataaaagaataattaattctcctattttcaacttttcaaattcaaagttaaagtttgattttgaatatcacatttcaaatgcagaagacaaaatcccagcatgaagcaatatatacttattattattatgtttttatattaactatagtattccaaat

SEQ ID NO: 56886 - DNA, 218 bp, Zea Mays
gaacaactaagatcggagttatggttaaggaggtatgatttatggaagatctacgtgattcaaatattaaactatattataaattggttagcatagatcatatgagaggttattctataaataattatctcaactttaatctaagttataagttgatcatagatcatattctagtagattataaagataagcatattaacaagactaaccaacttaag

SEQ ID NO: 56887 - DNA, 309 bp, Zea Mays
aaagagtaattttatttgtttacaagaatttttatgcgtgtgcatcactaatttgaatcatctacttaaataaagaaaataataaaacatctaaaataagaatagcattaataaatattcatatactttgcaacatgctggacttttgtgtgtgcatatcagatttaaattcaaacttgaaatttgaaatttgaaaatagaaaaggaaaggaaaaaaagaaaaaaaaagaaaaaggggaccatttctcctgctaggccgaattccttacccctcagcccactccctactccaatccagcccaatcccgc

SEQ ID NO: 56888 - DNA, 342 bp, Zea Mays
gaactacatatccaaaagcatttgcttaagaaggataataaataaatagaataacaggaatactgcatcacatgtggagttttggttgtgcatctaactcaaacttttgtttatgagtttaaaaaaataaaaaatggaaatccaagaaggaatgaaaaaaaagaaaataaaaaaaaggaaaaccatccctgggtcgattcccaagccgctcagcccagcctaacccctttgtcctagcttgttgggccaaatacgcatcctcctcggctcatccggctcactgtggtcagctcctcagctctccaaacacgcgctcggtctcaccttgaccgccatgtgggc

SEQ ID NO: 56889 - DNA, 415 bp, Zea Mays
tcttatatattagaggaaaagaaaacattacaatagaggagatgttgttgagcaactctcccaaaaaccctcataaacccgaaggttattacagattggtgctgaaacttgacccgacctcgcccagggcagcaactaagcccaagctcccaaactccttagctcctgctattacccagcaagcgtactcatccgagaaacacctaaaaatcctgggtaatgaaggagactccccatggaacactgctctgtttctctgaagccatagacaccaagccccaggatgatcagagagttaagccccttttttctggtcttgacaaccctaaggcttgcctttccccaccagtttgcaaaattctcctcatcagttgtcggagtgaggtgccccaagccaatagcagcaagaattgtg

SEQ ID NO: 56890 - DNA, 425 bp, Zea Mays
cgcactcggcagcggggtcgggctccggggcttcggcgtcctgggagagagaagcgaggggagggagagaggaatggaagggagagagagaagggagggtcctagggagcggcggcggctgcacaggggagtggaggcgcgcggctggcagcagggaaaatggcggctagggttaggatgttgggcctaatgggccttaggttagttagttttttatttcttttttttttcttttcaaatttcgaaatacatattaaataaccctaaaattcttaatgtttaaaccaaaactatttataaaatatttatttttgggactaataattatattattaatttactaggattttcatttaacaagaaatgctattcaatgaccaaaatcaatcatgagcattccaaaaattattccaaatgaaataaat

SEQ ID NO: 56891 - DNA, 358 bp, Zea Mays
ctggtgccctgggatcgggaacggacgtgagagcgagtttgggccgtggatctcgatccggcggtggggagcccattagttctccccccttaaccctagccgccccctcccctattcccctttggttgcagccgcccccccttccctattcccctttgtggccgccacccccctctctctccctctccttctcccccaagtgattgcagcaccacccctcaaccctagccgcccccctcctcctctccatggtgcatcctccccgcttggtaccccgtcgtgtgggtgcgagtcttccattggagtttggaggggggaagaaggaagaatggaaggaggaaaggaggaacccaaggtg

SEQ ID NO: 56892 - DNA, 462 bp, Zea Mays
gttactattgtggtttctacctgcgaggtgtggtaactaggtgtgttgtacgttgtatacgtgctgcatcttggtaataagaaggttgtggaatcaggtggtggtaaaacaatgttcttatgtggttgaatagtttgatattattttacttgctgagatgtgtcatctcactcttgcattactcaatgcaggtatttgatacatgttgggaatgaggggagtagcagcacgtccacttacactctcacaataacgccgcccaggcgcagccatgatttaattagaaacttattgtcaaaggaagtttgttctttttatatagtcgtgtgcactgattaattcagttcaggtcgtacgtttatcttcccttgctagccgattaataatacttagtatgtttttgtcatgatatatgtttataccctgttgcccccttatttatgcaatcttgcaaaggggatg

SEQ ID NO: 56893 - DNA, 1067 bp, Zea Mays
attggccgcacggtcgaggcctacgtcgatgacatcgcagttaagatgaggaaagcctccgacctcctttccgaccttaaagtgacatcccgatgtctcaaggcgaaaggcgtcaagctcaatcccgaaaagtgtgtcttcgggatgccccgaggcatgctcttggggctcattgtctccaagcggggcatcgaagccaacccggagaagatcgcagccatcatgcagcgccccgagcccttgattgaagacacccgggggctacacgcacctctgggaagggccgcttgtcatcgccagagctctgaagcccgggacaaacgaactggccgacggtcaaggcgaagtctacaccaacacttcgaacgtctaacagctacgttgcttctacccttaagatgctttcgagttgtccccttaccttgcccccgtgcaagttttagtcgtcaaggaagggtcagccctgcctctgcagaacccgaccctccctcgggggctaaaaaggggggaacccctctgcgtcaaaattttcaatcgaaaagacctttgcgttcccccggctatgtcagaagcaggaccccaaggagcgaacgcgggtgcatgtaagtggcaaggccgactgagccgagggactcctacgcctccgtgttacggacacctcactcgtcacccgccacgaaaagtgacccctacttggggaatccaccctgctactgacaggcggggccggacacgcaaaatgaaagggaaaggagtacgacttcgtgcaacggtaacaaagtgttcaggccccagcggccgcagaaagacacacgcgcatccaacagaaactgctccgacagagttaggcgtcgccccgggaaggagccgcgccttcggcttcgtccccgacctcggcaaagtccatcccggcttcggacgacgacgcaggtgggaggatctctgcctcaaaggtggacgccagcactgcgctcggacccgcggcggccgcatcaagcctctggacttctgccagggcggcttcatctttgtcaggaaggcaatacccctcgctgacccgctccagg

SEQ ID NO: 56894 - DNA, 243 bp, Zea Mays
cccagaagacggcaaactccgctccacccgatccagggctcggactcgagctcagccccggaagacgacgaactccgctccgcccgacccagggctcggacttgtgctcagccccagaagacgacgaactctgctccgactgaccccaagaatcggactccgccctggcctcagccgacggtctccgcctcgcccgaaccagggggctcggactcgacctcggccacggaagacagactcaac

SEQ ID NO: 56895 - DNA, 272 bp, Zea Mays
ataggcaatgatggcgccctgcgtactctatgacgacggcggctctcagcccccttacggaagcaagaggacgtcagcaaggactcaacagctccgacagctgtccctccaccaggctccaacactcctccgacggccacgacatcacaccagctgggtgccaaaatctctccggctgtcacgacgacatgtacttagggcgctagctctcctccgctagacacgtagcagtctgctataccccccattgtacacctggatcctctccttac

SEQ ID NO: 56896 - DNA, 471 bp, Zea Mays
atgcaatatttcataactcatattgttttgacaaaaataactaataaatctctcactaattaagctaaatctacttaaaaagagagaaaggaactagagagaagcaagaataacacctgaatttagtagatatttagaaagaaattttatatcacaaattcacaggccaggactgaagcagagaggcgctcggcgagggagatccggagatgcgggcatggagaggaggtacggcgagctcgcagcggcagtcggctagagcacaacgtcccagcgagcacaaccagggcagggaggtgagcgagagcgtagggcgccggagtccggcgacctgagaccgaggcacaaggtacggttgtcgaacctaggcacggcaagaccggctggcgtgacgaggtcagcgcgatgagggaggagaacgagcgatacacaacgacgtcgaggtgcacgaaccagaggaatcgcttgagg

SEQ ID NO: 56897 - DNA, 130 bp, Zea Mays
gcatttatccgattccgtttgacatgctttgacattcagttttcacaagtttccactgttttctaacccactgacaaaccaattttcgtgggtctataactctctaaccagtgctcgaatcacctcaagt

SEQ ID NO: 56898 - DNA, 258 bp, Zea Mays
ttacatagcggaagtcttacaaaaataaatgagaacaataaagcgaactaagtattattccttggcgccataaagttgacttaggagacgccacctagataagctcatactcctcgttgtaggtctcctcctagaccacctgcccttcacctggggggtttatatatcacaagggtgagctcatgtaacaccccgggatccacaaacaccccagaatgctactaaactacacatctaatattcatatataaaatttcg

SEQ ID NO: 56899 - DNA, 534 bp, Zea Mays
ctcatacatagacttcttatttttttgaggccactaagaccacggaaaactggcatgaacagaaactgtcgaatctgccattctgcagaaaactaaattcgagatcaaaacctaaccccacatcaaatccaacctctaatcctttaattcccatgatccacaacctccaaaagcctataattacagggaggaacaaggatctcatccatacctagggtttccccaagaaatcttcaagaggagatggtgaagaacgtctccttgatcctctcttcctcttcaattcaacgtgcccctccttttctcgatccttgctgcgtagggggagatcttggggaaggaagcaatggaggatggctaccatagggggagggggcgtccagccaagggggagaaaaagggggtggcggccaagagggggggtgaagggaaaaaaaggggtggccacctagggtttttgttggagaaagaaacgacgcctcagatgacttctatctttgcatccaatggcccacaaccctttacctcatccac

SEQ ID NO: 56900 - DNA, 418 bp, Zea Mays
cgtcggtagtttattctattctaacttcaaggtaaaaacttttcttcgacttttcattgtttttgacgacgaaggtgtttgctgacgaagcttgcttctactcagagtatgctattaagcaaagctttgaggatgcaacaggaccttgaagacaaaaaacatgagatcataattgaaggtttagaaagcaaaataaaagatcaagcagctgttcttgaaaagaaagatttcgaacttcagacaatggaaggtttactggcagaagctgaagccaaaattgcaaagttagataaggagcttctctcaaaatcagaaagcttcgaacaagaaaaatagagatttgatacgaagtttgaggctgaggtcgaaaaaagttcaaatttgcaaaaatcattgaaagaacttcaagataaatgtc

SEQ ID NO: 56901 - DNA, 334 bp, Zea Mays
cttttttccacgttcagattcatttctctatttttgcagcttatttgttttcctttcttccactttctgttcatgtttcatttttttcttgttttcacattcagcttgcatacatcgactcccaattccttttttacaagatttctatcccgacttttttgtctggtctcctcttaactaactggccactgctcttttcgatccaaatacaaagtgtttgagctatagagattccccaagcccgcaactgcaagaatcagcaaagcaccgatcatacatgtattaacttagctgctaaaacacaagccaagaatgctgagccaggaaaaggtgg

SEQ ID NO: 56902 - DNA, 621 bp, Zea Mays
cttcggtgcgtggatgtggggaaagagttgtgggtcgttggatgcaaagtcaagagacatctgaggcgtcgtttctttctcccacaaaaccctagtggtcgcccccctatttttcccttttcttggccgccaacccccccttttctccacccttggccgcccctcccccttccccttgcagccaccctccactacttcctcctccctctagatctccccccacgcagcaaggatcgagaagaggaggagcaagatggatcgaagaggaagagaggatcaaggagatgttctacccccatctcttgcagattttcttggggaaactctaggtaaggataggatccttgttcctccttataattatatgcttttggaggttgtggatcatgtgtattgaaggattagaggttggattagatgtggggttaggttttgatctcgaatttaatttctgcagaatggcagattcgacagtttctgttcatgtcagttttccgtggtcttagtggcctcaaaaaataaaaagtccatatttaagtcgtagataatttgtagatctttccgtggccacgaaaaacacctcaatcggacatcataacagaaagttattgcagtttgatt

SEQ ID NO: 56903 - DNA, 77 bp, Zea Mays
gcctggagggtgagagccccgtccggctcggaccctgtcgcaccacgaggcgccgtcaacgagtcgggttgtttggg

SEQ ID NO: 56904 - DNA, 2791 bp, Zea Mays
aaaatgtgcaacactcataaagcaatggagggataacaacaagaaaaactaatgatcttcttgatacagactcatgcaaaagcttcataaatattactttcaacactaaaataatatcaagatactatgctcaacaggagtaattggacttcaataagacaatccacctaatcaaactaccttgattaacctcacatacaacaatacctcctattattgcacttgaacaatttctacctcgtgatgtcataggatgaattcaaagtagtagacatacatgatctatcaaaccatcattcatatgaaaaaaaaatctccatctgatgcaacaaccacatcattatagagatagatgactaacaaacataagcaacttccagttaagcattgactttgtttaagataaagcggtccaaataataattcaacaagcatgcatagagaacagatcaaaaataaaataaaactaccatatatcgtcggcgattacaaaatatatataaaatgggttgtccatatcgtccacatgactagcctccaacaactaaaaaaaatatgcataacctttatggctatagaaacaaaccatggagggaaaacatgcatgcctcttcaactataatatagacataaaatccacttgaaatcaccctatttattgctaaggttgcacacaataagaaaacctatcatgtaaacatggttgaacttatctatccacgtcatcttacaaattcacttgagttctaccagtctcaaggtttcataaacattacaacattgcctttgctctatggagacaaacctcttgtactctaagatcaagttggcaagtagccatattagcccaaaggggtgaggcacaaagcattgaatccatggaaatattacattgataagttgggttgtaacccaacattcaatcagactcaaccacatgataaaactacattatatagtgttttcacaccacaccaagccggattagacccactatacacaaactcaataaacaatcggtcctacaagtactagaacccaaagaaatccataaaaaaacatccacagtcaagcatatagaaatatattatagtaatggctcagagatttgaaaaacatcgcataaaaaacatcatgacgatatgtatacaaaacaagtacattagtagcttcacttgcataataacttcagcaacaaccacatcaagaaaccaatattaaatggaagtaacatatcatatcaagcattaagtcgttaacgacatatcccatcaaaccataaagggatttggagtaagggaattctagtcatctatacaataaaatactaatatgaaagatatacgaactcatacccttcctatatgtgcaagtgtgtcaaatttatcttcaaattgcgtagaatctaaagcctatgctttgataccaactgtaacatcccggaatccacaaacaccccggaatgttactgaactacacttctgacatccgtatataaaatttcgacagcatctcctttgcaaaatagcataaaggagggggcaacagtgtataaacatgtatcatgacaaaaaaacatactaagtattattaaacggctagcaaaggaaagttaaacatacgacatgaactgaattaaccagtgcgcatgactagtaaaaaaaacaaacatcctttgacatcaagtttctaattaaatcatggatgcgcttgggcagccttaatatgagagtgaaagtggacgtgctgctactcccctcattccccacatatatcaagtacctgcattgagtaatgcaagagtgagatgacacatctcagcaagtaaaataataacaaactgtttaaccacataagaacattgttttaccaccatttgatttcgcaaccttcttattacgaaggtgcagcacgaatacaacgtacaacacacctagttaccacacctcgcaggtagaaaccacaatagtaacatagtaatgtcacacttcatatatacctcatgagtgcaaatgtctgcaaatgcaaggatgacttctgccttcatacctctaagggtatgaagccgcatcgtacccctcctcgggcaacgtacgatgctaaaagtgtaccggtacggtcggaccataagatcacgacataacttcaaaatgcaatatggatgatgcgatgtgcatgacatgcctacaacacttcatacaacgtgattcaaaaagatacttcaacttcatccaagatgggaatcaaccacatatatcattcccaaatcatgatcatcctcaatattagacaattgagaattaattctttcgaacaaataaacttcatcatagaattcaatgattaacacatttaatacttatgcatactcaatgacaaggcatagggtgcaaaccaaacggtagcaaccaccactgtatttacttgccttcaccgggaatttggaatggtactaagtacgatccggaagtccaccacctgtttttgacacacaccttagtgtacaaatcaacataacaaacgctaataaacaacgccgcacctacgcacaattccaacccgttgcgagcgacaactctccccatcaccaccaaactgcagcggtgctgcttgataatttcataactttaaaattataacagcagtgatatcaatcaaaaactacggaagcatttacataaaatttcccacaagttttatattcaaatgataattaaattccagcatctaattagcccaaactcgtctacaagatacaccctgcaatctgtttttggacagcaacataacc

SEQ ID NO: 56905 - DNA, 64 bp, Zea Mays
aagatgcagttgttggacaagtcgacgaaggacggatgagtcaagcaccaagataggagatgct

SEQ ID NO: 56906 - DNA, 120 bp, Zea Mays
tcgctcgaagggcaccgaccggtggggatgacgctgcagtagggagtttgtctggtgacaaacagttgggaaaagcgtcgccgcttgaagggcacggctaggaaaagcgatcgagcaggg

SEQ ID NO: 56907 - DNA, 244 bp, Zea Mays
atcaaacaaggtccaaatcaaaccaaaatctacccaaggcttctaaataaagtttagagttcaaataaaaagtttgggcatttttggaataattatctattctctagaaatccagaaccaatgttttaggctattttaaatgctccaaaattccttatttgacctaaaaatcataaaactatttttattaaatactatggaaattaggagtctagcaaaattggtttgatatttttagcatttt

SEQ ID NO: 56908 - DNA, 1583 bp, Zea Mays
gccatcttaactcttgaattttgacaaactactatagatattaaaagctgcctctgaaaccggcagtcgtttcttacaccatagtcatagaaaagctcatatgttacatgacccaggggaaacaggaaaaactctttccaacaaagtttaacctgtttttattaccaagctggtctatcttacacctaccttactaccttgatctacttcactacgctcccagttgcctactatatcttctctggctacgccatctgccagatgcttgttgccattcttccaaggaacccttagtccgctgatgcaggagtaggataaaaggcaacatggagtcgatgcactgcttgctgcagatggttgacaagccgttgtgctacttgaaattccattggatgagcacgattcaattctttgatcgcctgatcctgatggcttatgaagcttatggtttccttaaggtcttctctaacagcaacagcatacaagcgaatttcttcttgttgctgactcaaaacttttgatttagaatgagcattagttagctgatgctcaagctccttaatgcgagtctgataagcttggtgttgcgtctgaagttctgtcacctgatgctctactccaataatctgttccgcttgaacctttatttcctcaagtcgttcttgtgcctgggtacaagccctattcttggccatttccatcatcttaaatgctgcataacttccagtgtacaactgctgccacttttgacgactgtgccctcgagtaagttgcaactctagcacgaccatcaaaactcgagcagatgccgattcaacagaatcctgcccaataggaatgctttccattaatcgggcctggtgatgatacacaaatgggtcacttaaggcaactacagggaacaacctcatagatgtggcttgtatttcttcccatttctggtaacaaatggttgttagcgcctctaaggcagctacctgagcaccctcccaaggagtcattccttcagcatggaacatccaatatggccaagatgggtttctagcacgttctggaatacgcactactacctcataccatggttgtcctctaagaaccgtgcgtggccactggtacttgggtgcttcggtatatccgacttcttgaagtagtcgccacaggaccactggaacaccaaaatctcgtagaaactctccaactcccgtaggggcttcttgttgattcatctatagagaagggcaacggatacactctattcactaaagatgtatgaacaaggtagatgattcatacactaaaatagctacgcagggggtttaacttaaagttgtatgacatgatgcatgtgtaattacagaatcaacctgggttgattcacaccttctatacattgcactcttcctatctggtctttaaaataaactcttcagaatttcttagataagaagggaaaagattttgtagataagactttagaaaatcttttgaagatgcctaataatatctgcagagaagggctacgctccgataccagctgtgacggaacctcccaagtaattaggcccacctacagttgtccttgt

SEQ ID NO: 56909 - DNA, 322 bp, Zea Mays
ccaggatcaagtctcacgcatatgatgattcaatgtacagaaaataatgtcacatctttattacttaatacaatttatgtacaaaaatagctaaataaattagaccatatgacgacgacgatcctccacgaccatagttgaatagggagacgacaacctagacctctccaaactcatcttcatgatcctcctccagcagtacctgttcttgacctggtttgcttatagtaagggtgagctctcatatgatcattgctcaacaagtgtgggaaaaagtgtagtgtaagacttaccaaggaatctggttgaagctgaacattgc

SEQ ID NO: 56910 - DNA, 202 bp, Zea Mays
tgcatgtcaagttattaattcagccatttactcatgtgaatgtttgagtcgctcttgaccgtgagcacgactgatgtaccagttttacaatctgcagaggttgcgcatctttacccacaaggcgtgttctcctttttgcctcgggttgatcgaacccttaaacacttccaaggtgaattggtgagggcacattgtgaggcct

SEQ ID NO: 56911 - DNA, 528 bp, Zea Mays
ggagacacctgggctttatccactagctctcgcaacgcccaccccgatttccccggccacacgcgagattgttgcaacggcgtggccgctcgttagggacacacgacctgacacgccgagcccattctccagtggcacagtgcgctcggcatcagcgagaggtacgggtgcgcgtgtgaccgatgggcggggttggtgtcgcatctggcgggtggagtgcgcacgcgttgggccgcagtgggccaatttgaaagattcagtccgcgccattctctttttatttctttttttccttttcttttctttttcctttgtttttttccttttatttttgaatctcaaatttgaatcccaacctttgttgtgaatttttcactttatactaaatgcttacatcaaaatgtcagtatgaaataatatctttatttatatatttttcctttattttgcatctagggttttcctttctcacttctctttccttttccattttatttccaaattctaggatttgaattaggttttaat

SEQ ID NO: 56912 - DNA, 290 bp, Zea Mays
ggccgccaaccctttccccccctccaacacttggccgcccctctctccttttcccttggggctggctgcctctcctcccatggcagcccctctccacgacttcctcctccctctagatctccccccgcgcagcaaggatcgagaagaggaggagcacattgagttgaaggggaagagaggatcaaggagatgttcttccccatctcttcttgcagaatttcttggggaaaccctaggtatggatgggatccttgttcctccctgtaattatgtgcttttggaggttgtgg

SEQ ID NO: 56913 - DNA, 2787 bp, Zea Mays
gtcaggtggtgtagtttccttagacatttagtctgaggtcgaagttcttgtgttaattaagaccaataatggacccatgttttggaatggtggtgttatatggggtaccatggatgttttgtttggagtggacgaattcgaggacgaattctttttaaggggggtagagtgtaatatcccaaaaaatgttgccaaaggttgatcttcggtgcgtggatgtgggaaaagggttgtgggccgttggatgctaagtcggagtcatctgtggcgttgcttcttttctcccgcaaagaaaaccctagtggtggccttttcccccttttgcccctgcttgtccgccaaccctttccccccctccaacacttggccgcccctctctccttttcccttggggctcgctgccctctcctcccatggcagcccctctccacggcttcctcctccctctagatctccccccgcgcagcaaggatcgagaagaggaggagcacattgagttgaaggggaagagaggatcaaggagatgttcttccccatctcttcttgcagaatttcttggggaaaccctaggtatggatgagatccttgttcctccctgtaattatgtgcttttggaggttgtggatcatgggaattaaaggattagaggttggattagatgtggagttaggttttgatctcgaatttagttttctgcagaatgacagattcgacagtttctgttaatcccagttttccgtggtcttagaggcctcaaaaaaataaaacgtctatatataagtcgtagataatttgtagatcttttcgtggccgcgaagaacacctcaatcggacatcagatcagagagttattgcagtttgattatagcagtttttcagtctcttaattctgtacagaatctgttctcttaagatttaggcaattttatcaatagaattaaaccttaggtttgtaagaaaagatgtagataatttcataagctttccagattgttaaagagtgcattcatatgaattatgaaactccagttatgtttgttttactgtggctgtttctgttagcctgacagaaatgagcgggtctgttcactggtaggtttcatcaagtaaatggccgaattggctctcccagctatggagacttttgtagagggataaaagttcttgctttcagcagaatttcatgatttttggttgagtagtttgtgagatatcgaattttgaaagttaactatgctgctgtctaaaacagattcagtcagttatcttgttagatgttttagaacttatagatggtagaatttaattatccatcgaataccgaagttgtagaatattttgtatagatactcatggagtatttgtttgatatcaccactgttataattttaaagatacaaaattaacaaacaacattgctgttgtatggcatgtggttcagagtgggaggttttccaccaggtcttggtttcaggtgtaggatcgatttgttgattgttggcaaatgtttgtgaaatatttgtactaagttttatgcccgctagcaggtggctacactccagatcatgcctagtacatttttcttcttcgatgaaggcaagtgaatgtagcggtggttgcttccgttctgacctgttatttctattgcctacactctaatattcagaagtattggattctttcataattggactctatggtgatgctttacttgcttgcattatacttatgctcaatcatatattgatgatgattatgattcgagtatgactcatgagattaattcacactcctgaaggtaaatgaagtattatttgaggttggtattgtatctgaaggtaaatgaagtattatttgaggttgtattgtatgtgaaggaagtgaagtatattgataaatgcagcatgccatatacattgcatgattcacttgcatctgaagttgggtcgtgacctatggtccgaccgtaccggtacaacttagcatcgtacgttgcccgaggaggtgtattatgcggcttcatacccttagaggtatgaaggcagaggacatatgcattgcattcatatgcattcattgaagtgatatttgcatatgatgtggttttataccctcagaggtatgaagacagagtacctacactttgtgttcctatgcatacattgaagtgatatttgcaggtattgttgacgcagagaagtgttatacaaactattgtggttgtttaaggaaatgagatggtattggttatattgagactactgagttctatatctacaagaatttctgatcttaattgtgattcttttaaaatgttgattaattcaatttgtggtttaaatatcttgtcaaaacaattcgcttgctgagatgtttcatctcactcttgcattactcaatgtaggtgcttgttgctcatcaagggaagtgggaagtagcagcacatccaccttcactctcataataacgctacttaggcgcagtcaggatttaattagaaacttcttgtcaaaggatgttgtttctaactagttgtgtgcactggttgatttagttcatgtcgttatggttgtctttccattgctagcagattattaatgtctattatgttctcttatcatgatatctatttatattttgttgcttccccgtttatgtaattttcaaaggggatgctgtcaaaattttatatatgaatgttagatgtgtagtttagtagcattctgggtgtttgaggatcccggggtgttacagcttggataatccgttaagaaccccttagccact

SEQ ID NO: 56914 - DNA, 1384 bp, Zea Mays
ctgtaaatgagaatttgtttcctcccgtaactgtgcctttatttacgcgaacgtggggcacgtctttccttatctcaaaccggtggatatttaaatgttgcatggtttacgctatcatgttacacagcgttatgcagtcgtaagcggtgtacacatggtaatattcgttcccgtgattcgtggcccaaaagattccttctatgcatgatttatgcacatttctacatatatttatgcatgcgtatattgcctgtcatatgcatggctgacgcatgctgacgtacagtgggccgaccgcgacctggttggcgtcctggctggggcttcccctactaacgaaagcccagggcttccattacctcttccctatatatatatataatcttttactccattatcaaaatggattcctatggatccaatgaacaaagtaaaaagtagacatacttcctgcttgtattagcaggattcctatggatagacaaacgtatttttagccccaaagggagtactaaaggatcctatcttatttcttgtattagcaggaatttttggtatattttgtgaaaaaaagaaactccattcttcattgttgataaaacaaaatccctattgactctttcttccttacttgtgaatttgtacctgtaatcttcacttcctagggtaaatagacatacttcctgctaagatggatggctttctttgttgcacctccacttcaaagacgactgtcaacttcaactctttgagggatttgctttctcctgaccctcaatccaaaaggtttggcgttgcagttgatactttcgatagctttgatcctctcttgcacgatactttccagaaaagaaaacccaagtttatgatgcctcacatggtctagtatcccccaactctactcaaggtggttaagaagcaaggcattcaagtccaagaaattgagagcgcggtgactacctgacgaacccgaagttgactaaaaagaaggggcaattgtcaatgtctcacctcaggagcagaaagcatactatggtggaagatcccattgagttcattattgaagatctgaccgtcgctacgagacttctgttctaaaacagcctggacgaggctctacctaattgctagaaagtaagaaagtatagggtccaaattggataaagaagcactacgctttgcaagggcgccaaccactaggttgtaacgaccagaacaagattcagtttgtgttcagtccattgggcatgggtatcctcctaactaaaacgattcaaatccgtaagttccaccctaaggtgatcaatcttttttattctttctcaactgcctagtatgttgtttcaagaacactggactgtaaatctattggcgagagaagagg

SEQ ID NO: 56915 - DNA, 504 bp, Zea Mays
ggagaatccaaggtgatttttgtgttcatcccttgttcatttgcgctgcaattcaattgattagtggttgcgtttgcgattgggtagagggggctgtccagaattttaggtggtggatgaacagcagtagttctagcagtttctggtttttttcgtgagaaattaatggaaatcagtttggggatcatgtagaactttgtcttacctttccaacgagtatttatgcgctcaatttggagttataaattgaaagttatcaccgtttgaatccgggtatgtggctgtccaaaaaaacagattttcagggggatgaacagcagcagtattagcagtttctggggatttttcgggagtaattagtgttaatcagtataagaatcatgaagggctctttcttatatttccaacaagtacttatgcgcttgatttggaattatattttaaaagttatcgctgtttgaatccgagtatgtcgctgcccaaaacagaaaaaacagattgcag

SEQ ID NO: 56916 - DNA, 732 bp, Zea Mays
caagctttcgcttagtgtcgcttttcaccctcagacggatggtcagtcagagtgtaacaccccaggtgttaccatggctagagcccaccttgatactaaaggctatgatcacatgtggaagaacttaaggagcaaaagcatgagggccttggaaagctagattttaatcaaggattgtgagtaaccaaaagcattactctaacccttacacacttactaccttggataggaggggagaagaaccctagacatctcttaaaccatatctcccaaaacccttgataagagggaaaatagaatgaacaagtgtgcaaaacatgagtaatttttacccaaaccttaagtaaccttataaccagcaattaggggaaggaaatattgcaaaaagacccctggagaaaccccaaatcaaatctccaagtggagagagagctagagctctctatttctctctaagttaaaaactacacctacactaaagatcagttgtgttcacctcgaagctggcatcaaatccacctatgtcctataccaaaaatgtggcataccacccaaggcacccactggaaaaagctgagcccgagacttggacgtttgacatgccttggcatggtttttatcgcgaggtgggcagtgtgacacacccgatttggcgaccagagatctccctacctaggccatatctgccatggcagctcacggatgagagacatccctaggtgccaggaaaag

SEQ ID NO: 56917 - DNA, 1174 bp, Zea Mays
aacacaaagtgtaggtactctgtcttcataccactgagggtataaaaccacatcatatgcaaatatcacttcaatgaatgcatatgaatgcaatgcatatgtcctctgccttcatacctctaagggtatgaagccgcatcgtacccttcctcgggcaacgtacgatgctaagttgtaccggtacggtcggaccataggtcgcgacccaacttcagatgcaagtgaatcatgcaatgtatatggcatgctgcatttatcaatatacttcacttccttcacatacaatacaacctcaaataatacttcatttaccttcagatacaataccaacctcaaataataattcatttaccttcaggggtgtgaattaatctcatgagtcatactcgaatcataatcatcatcaatatatgatttagcatcagtataatgcaagcaagtaaagcatcaccatagagtccaattatgaaagaatccaatacttctgaatattagagtgtaggcaatagaaataacaggtcagaacggaagcaaccaccgctacattcacttgccttcatcgaagaagaaaaatgtactaggcatgatctggagtgtagccacctgctagcgggcataaaacttagtacaaatatttcacaaacatttgccaacaatcaacaaatcgatcctacacctgaaaccaagacctggtggaaaacctcccactctgaaccacatgccatacaacagcaatgttgtttgttaattttgtatctttaaaattataacagtggtgatatcaaacaaatactccatgagtatctacacaaaatattctacaacttcggtattcgatggataattaaattctgtcatctataagttctaaaacatctaacaagataactgactgaatctgttttagacagcagcataattaattttcaaaattcgatatctcacaaactactcaaccaaaaatcatgaaattctgctgaaagtaagaacttttatccctctacaaaagtctccatagctgggagagccaattcggccatttacttgatgaaacctaccagtgaacagacccgctcatttctgtcaggctaacagaaacagccacagtaaaacaaacataactggagtttcataattcatatgaatgcactctttaacaatctggaaagcttat

SEQ ID NO: 56918 - DNA, 432 bp, Zea Mays
attttaactaatagtgttatcctctcgatgagattaagagtaccgttgcttacaaggtgaaggctccaaataattttttgctctgtttcccacggagagcggcgctcgacgagtatgcggtggcgatgggggagctggccctgaagctgttggagctcatcgctctgagcctgcacaaacctgaccggctgcacagattcttcggagacgaccagacaacattcatgccgatcaacctgtaccgccacaaggacaacagcgcctacgatacgtactgttgggcggcttctgctggttggagagtgctattcttcgattcgggatctaggcgtcctttggtcgccttgcagtgccttccagaggctagattttccaggcgctcagtatctacacactaatgtttgtatctttggttaattctgttgggttttc

SEQ ID NO: 56919 - DNA, 902 bp, Zea Mays
ctttaatgagattgatctcttccttcctgagctttggtgtctccatccgagtttgggacatgaggttaagatagatctgtaggtaacagatgggtagagggtttagtaggtagctatatgctagatgggattagttatgtaacatgttatgtaggtcaagttgttgggtatggccgagttgatttaagatctcaaacttgtttacagtagcagggtctaatgtatttccttagcattagccaatcatgttttagtgactcacagtaggtttgatcataatagattagataggattggatatgactagaatagactagtttaggttagatagatctactagggtgggataaatagcgttaggatatgctagtctttggaaataggatggattatatggtgtatgtaagtcagaatctctgttttgttgttaggttaaaatagcggggttatgcaactgtcagatgtttaaggtagttgcatatggccaagttggtatggtgttcttaatttagtgtagagagaactaagttaaaacatgttctataggagtagagtctaatctatttcatcagtattatctaacatgtttaataagtcactttagattagatcagatctaggttagattggtgtgactagcttgggctagataagatctaattaatttgggttagatcatgatcatggtgggataagtcaagtggtttggataagttgaatttattaagataagagagaatattttaagataagatggatctattaggcttgatatattctaatggggtattcttagttggtctagtttatctcataaacaatttatgaagataagaatttttttaacataagatgaacctattaggataagatataatcctttaagttaagagggatctatt

SEQ ID NO: 56920 - DNA, 1294 bp, Zea Mays
catacactaagcataatatccggtctacttgcacataaataaagtaaagaccctatcatagaccggtatgccttttgatcaacggacttacctcctttgttgaggtcggtgtgtccgtcggttcccattggagtttttgcgggcttggcgtccttcatctgtaacaccccgggatccacaaacaccccagaatcctactaaactacacatctaacattcgtatataaattttcgacagcatctcctttgaaaattgcataaacggggaagcaacaaagtataaatagatatcatgataagaaaacataatagacattaatagtctgctagcaatgggaagataaccataacggcatgagctaaattaaccagtgcgcacaactagttagaaacaaacatcctttgacaagaagcttctaattaaatcatgactgcgcctaagcagtgttattataagagtgaaggtggatgtgctgctacttcccacttcccttgatgagcaacaagcacctgcattgagtaatgcaagagtgagatgaaacgtctcagcaagcgaattattttgacgagatatttaaaccacaaattgaattcatcaacattttaaaagagtcacaattaaaatcagaaatacttgtagatatagaactcagtagtcccactataaccaataccatctcatttcctcgaacaaccacaataggttgtataacacttccatgcgtcaacaatacctgcaaatatcacttcaatgtgtgcataggaatgcaatgtgtaggtactctatcttcatacctctgagggtataaaaccacatcatctgcaaatatcacttcaatgaatgcatatgaatgcaatgcatatgtcctctgccttcatacctctaagtgtatgaagccgcatcgtacccctcctcgggcaacgtacgatgctaaattgtaccggtacggtcggaccataggtcacgacaaaacttcagatgcaaatgagtcatgcaatgtatgtggcatgctgcatttatcaataaacttcacttccttcagatacaatacaaacctcaaataatacttcatttaccttcaggtacaataccaacctcaaataatacttcatttaccttcaggggtgtgaattaatctcataaatcatactcgaaccataatcatcatcaatatatgattgagcatcagtataatgcaagcaagtaaagcatcaccatagagtccaattatgaaagaatccaatacttctgaatattacagtgtaggcaatagaaataacaggtcagaacgga

SEQ ID NO: 56921 - DNA, 289 bp, Zea Mays
caacctctaatccttcaatccacatgatccaaaacctccaaaagcacataattatagggaggaacaaggatcccatccttacctagggttttccctaagaaaaatctgcaagagatgggggtagcacatctccttgatcctctcttcctcttcaatccatcttgttcctcatcttctcgatccttgttgcgtgggggggggaagatctagggaggaagaagtattggagggctgctgcaatggggggagagggggcggccagccaagggggaaaagtgaggcggccaag

SEQ ID NO: 56922 - DNA, 225 bp, Zea Mays
gccccctctctcttcctctcttccactcttgcagacaccccaatccctctccttcttccccaagtgattgcagcgccacccctcaaccctagccgcccccacctcttcctctccaaggtggagcctccccgcttggagtccgtcgtgtgggtgcgagtcttccatgggagtttggagggaggaagaaggaagaaaagaaggaggaaaggaggaaccaaaggtgat

SEQ ID NO: 56923 - DNA, 105 bp, Zea Mays
aattcttggagaggaacgacgatgatgagcgacggtatgccctcatctcccctctcttctcttcttttttcttcctctcttctcttggggcaaggcacaaaaggg

SEQ ID NO: 56924 - DNA, 142 bp, Zea Mays
aaagccacgccgcggccacgaacccctccctttccccagctgctcgtccatgctctctcgccctgcttctcgcacagctcccatgccagcgcgctgctgctgctcttcgttgtgttgcgcagcacctcaccggagctccgcc

SEQ ID NO: 56925 - DNA, 959 bp, Zea Mays
ctttgcacctgctcgccggtcatccctgccccagcgcctacttcatccatggccggctctttgcgtcggcctcctctgcaaactccctggcgctcggtgctctcagcgcacgctggttccagtttggccgactgcgcagactttcttctccctggctagaactctttcttcggccatggcgcgctcgagctcctccctgctcgcgctgtcgcctcgcctgttcgtccctgcgcgctcgcccatccgggctctgcctagcgccgcggcttccagctcgctctccagccttcctctttcctacgcgtgcgtttcgttattcctgtgtgtgctgccgcgaagctctttgctcgtcaacgctccagcccggattttgctttgtcgcccagcttggctctacatctcccatggctgtctgctctagctgccgtagtccctgcgcgcatcgagttttcgtgtggagctctctgctcacgcgcagctcgctctttctttgttgtcgcgggcacgaattttatctgctcgccacagcgtgtcgagttcccacaccatcatcgcttctgtcgcaagctcgttggccacagttatcttgaccgcgttatctcgcgactgtggtcgtgttcatcgaattcgccaacgctttgttgctgattcgactgtcgtcgcttcgcgtgttgtcgagcccgtcgttttctctgccttgtgctcgcgcggtttccttctcgccagcgtgccctctcggctcgctcggctttaattcccaatcgtgtcgtcgatctcgttgtttgccatcgagtcgtcaaaaacgtcatccccggctcgatccccacctcaccagcttaccccagacttcaatcgaagatcgtcgtcattcgtgcatccccaagaaaacccaagaatcgggtgaagatgaagttagcagcgcgatattccccaagcgctcaaccaattgcctagatcgg

SEQ ID NO: 56926 - DNA, 196 bp, Zea Mays
taagtatagaaaaataataaaatatattatttctagactgggttttgaatgtgtacatttgaatcaaaggtgaaactcgtgaaaagattcagattcaaatttggaaattcaaaacaaaaagaagacaaaaagaaaaagaaaaaaagaaaaagaaaaaaatgattgtgcgctgaatgggccgagcgccacctatttg

SEQ ID NO: 56927 - DNA, 327 bp, Zea Mays
acccatttgcttagagaacatagagaaacggaagaccctatcagataattgtaaaaccttgaaggcattcacataaccaccaataaccgattagagaatataacccacattttgaatagaaagccgaagtttgcatcttccaatcgataaatcaagatagaactctgacagatttttacccgagagacagttgattggaagtcccaaatcgaaccagatggaagcttagaggtgaagacttgattgagaatccggttttccaatggcctcatcaactgccgccatcttccttccacactcgtcgtcctcagttttatggatttggaa

SEQ ID NO: 56928 - DNA, 546 bp, Zea Mays
ggtgttggtggtggtgaagagaagtccccagcgatggcggcaactttttcatcatttttcttcttcacttgaagaagacccacttgatgactcaatgtcagtgagccagtcaccaacaatgtatgccttcccatttttctttttgtggaacctcttgtgcttcccatccttcctcttgaagaatctcttttcctttttctcatcatcactgccatattctttcttgtccttgaacttgttcttcttgggcttgttgcattgatgagcaagatgaacaagctctccacagttgtagcaatccatttcagaaatgggctttcttttactgaaaagaatttcttctttcttgagtcaaacttgatgccttctctgttgagcttctttaacatcttggtggtcttcctcaccatcaaggcattattagcatcaagatcatcatcacttgaggattcctcctcaatttgtactttagcttttcctttcctttcttgatttgctttgagagccaaatcctttctcttgaaagacgactcatccttatcattg

SEQ ID NO: 56929 - DNA, 174 bp, Zea Mays
agaggaaaaaattgcattagatttaaggttcatgtgaaaagtttgtccatgataccaccgatgattgaggtaggagtgaagcctttcttgtatgatgtcttcttaaagaatgatcacatcgaagaaaatggttggaacgatgagacaatcaatctagggaaaaggaactcggtg

SEQ ID NO: 56930 - DNA, 343 bp, Zea Mays
catcccctttgcaagattgcataaataagggggcaacagggtataaacatatatcatgacaaaaacatactaagtattattaatcggctagcaagggaagataaacgtacgacctgaactgaattaaccagtgcgcacgactatataaaaaaacaaacttcctttgacaataagtttctaattaaatcatggctgcgcctgggcagcgttattgtgagagtgtaagtggtcgtgctgctactcccctcattcccaacatgtatcaagtacctgcattgagtaatgcaagagtgagatgacacatctcagcaagtaaaataatatcaaactattcaaccacata

SEQ ID NO: 56931 - DNA, 604 bp, Zea Mays
ccgcacgtcgcaccgctcaccactctctattcctcttctctagctctgtctactctctgtgtcatgcccagtgtactgctctctctgtatctcggccaccatggcgcagaggtgcctggccgaggcagcccctgacagcgcctatgaggagtagccccgtggatccttaccaccggcgagtggatccccacgggagggtgcgccgccgtcggtcggggtgccgacatgggctcttctgtgttcggcttgagtgaaaggctaacggtcactacaactgtccatgtgtgcctttgcaccttggttcttcttctacaactcgatcccatcctctgtgaatgaatgcttgtaagaaatgtgacttgatgtaatttgcggggataaagttgagtgtttatgtgatttgttgggtgcaacgttgtctttctgttcggctgttcttttgttctttcactgattttggttgttgatctgcatcgccaagcgcatgtgtgctatctttgtgtgctcgagaaagtatctctgtgcacaaggccgaccggttcccttgatgggaagatccagttaaccctcctgttggtttcccttcttttttatttactatttc

SEQ ID NO: 56932 - DNA, 225 bp, Zea Mays
gatcaccttgagttcttccttcacccctttcttcttcatcccaccaattctccaattagaggcttgcaccaactcgatggagatccaagggagaagaggtggctgcaccttggggaggaggagatggtgagggcggctagggttgggtgtgatggggggcggctgcagcaatgggggaagggaggaagagagggagaggggtgggtgcaagaatggaaaagagag

SEQ ID NO: 56933 - DNA, 196 bp, Zea Mays
atcaaaagaacaatgcataaaagcgtaaataaagattatattaacatattacacttcgaacaaacataatgtcttaacctttattcatcaaagtaaagcgaaacatggacatccatccagaggaagatgaccgggggtatcactagactagcatccatcaagttcaccatcataatcttcatctgcaaacttctga

SEQ ID NO: 56934 - DNA, 610 bp, Zea Mays
aaacggggaagcaacaaagtataaatagatatcatgataagaaaacataatcgacattaataatctgctagcaatgggaagacaaccataacaacatgaactaaattaaccagtgcgcacaactagttagaaacaaacatcctttgacaagaagcttctaattaaatcatgactgcgcctaaccagcgttattatgagagtgaaggtggatgtgctgctacttcccacttccctggatgagcaacaagcacctgtattgagtaatgcaagagtgagatgaaacatctcagcaagccaatcgttctgacgagatatttaaaccacaaatttaattaatcaacattttaaaagaatcacaattaagatcagaaatacttgtagatatagaactcagtagtcccaatataaccaataccatctcatttcctcgaataaccacactaggttctataacacttccctgcatcaacaaaacctacaaatatcacttcaatgtatgcataggagtgcaaagtgtaggtactctgtcttcatacctctgagggtataaaaccacatcatctgcaaatatcacttcaatgaatgcatatgaatgcaatgcatatgtcct

SEQ ID NO: 56935 - DNA, 1556 bp, Zea Mays
tttatcaatatacttgacttccttcacatacaatacaacctcaaataatacttcatttaccttcagatacaataccaacctcaaataatatttcattcaccttcagatacaataccaacctcaaataatacttcatttaccttcaagggtgtgaattaatctcatgagtcatactcgaatcataatcatcatcaatatatgattgagcatcagtataatgcaagcaagtaaagcatcaccatagagtccaattatgaaagaatccaatacttctgaatattagagtgtaggcaatagaaataacaggtcagaacagaagaaaccaccgctacattcacttgccttcatcgaagaagaaaaatgtactaggcatgatctggagtgtagccacctgctagtgggtataaaacttagtacaaatatttcacaaacatttgccaacgatcaacaaaacactcctacacttgaaaccaagacccagtggaaagactaccaccctaaaccacatgccatacagcagcaacactgtttgttaattttgtatctttaaaattaaaacagtggtgatatcaaaaaaataatctagaagtatctaccgaaaacactctacaacttcggtattcaatgcataattaaattctgccatcaataagttgtaaaacatctgacaagataactgactgaatctgttttagacagcagcctagttaacttcaaaattcgatatctcccaaaccactaaaccaaaaattatgaaattctgctgacagtattaacttttatccctctacaaaagtctctatagttggaatagccaattcggccatttactagatgaaacccaccagtgaacagacccactcatttttgtgaggcaaacaggaacaaccacagtaaaacaaacataactggagttttataaatcatatgaatgcactctttaacaatctggaaagcttatgaaattatctacaacttcttttaccaacccatagtttaattctgttgataaaattgactaacttttaagagaacagattctgcacagaattatgagactgaaaagctgctatagtcaaactgcaataactttctgttctgatgtccgattgaggtgttcttcgcggccacagaaagatatacaaattatctacgactcatatatagactttttatttttttgaggccactaagaccacgaaaaactggcataaacagaaactgtcgaatctgccattctgcagaaattaaattcgagatcaaaacctaaccccacatctaatccaaactctaatccttcaatccacatgatccataacctccaaaagcacataattatagggaggaacaaggatcccatccttacctagggttccccaagaaaatctgcaagagatggggatagaacatctccttgatcctctcttcctcttcaatccatcttgctcctcctcttcttgatccttgctgcgtgggggagatctagagggaggaggaagcagtggagggcggctgcaaggggaagggggaggggcggccaagagtggggaaaaggg

SEQ ID NO: 56936 - DNA, 485 bp, Zea Mays
gcaatatatggagtataaactgtgataaactgtcatgtgtggatcttgcatcatgggaaactaggctgtgatggagtttttctgcaggtacactaacctcgaaaacgtatgtgtagttgacaactagtaaaataccgagagagtcgtaagtatgccaccgatatagaattctattgccatattatgttggccaaacttgtgaggacgcataggacgagcatgcattctgattgttgcatcatgtttgtcacctatacatccaaaatgcttttctcacccttattccagtaaccagtgattgtagataatgtggtgtaatgtggtgttatgaacctcaatgaaatagttgtcctccattctttaggtaatatgtttacgtgttatatgtgttgctcttgtgcttgatgtgccgatagaaggttggtgatttgtttgcctacacctagagatgtctaaatgggccgcccggcccaggcccagtgaag

SEQ ID NO: 56937 - DNA, 1002 bp, Zea Mays
gaatggcagattcgatagtttttgttcataccagttttccgcggtcttagtagcctcaaaaaataaaaagtttatatatgagtcatagataatttgtagatctttccgtggccatgaagaacacctcaatcggatatcagatcagaaagttattgcagtttgattatagcagtttttcagactcataactctgtgcagaatctgttctcttaagagttaggcaattttatcaacagaattaaactatgggttggtaaaataagttgtagataatttcataaactttctagattgataaagagtgcatccatatgatttgtaaaactccagttatgtttgttttactgtggctgtttctgtttgtctgacaaaaatgagcgggtctgttcactggtaggtttcatcaggtaaatggccgaattggctcttccaactatggagacttctgtagacagataaaatttcttactgccagtagaattccatgatttttggttgagcagtttgtgagatatcgaattttgaagtaaactacgctgctgtctgaaacagattcagttagttatcttgtcagaggttttagaacttgtacatggcagaatttaattatccattgaataccgaagttgtagagtattttgtgtaaacactctagattatttgtttgatatcaccactgttataatttcaaagatacaaaattaacaaacagcgctgctgttgtttggcatgtggttcagggtgggaggctttccaccaggtcttggtttcaagtgtaggagcgatttgttaattgttggcaaatttttgtgaaatatttgtactaagttttatgcccgctagcaggtggctacactccagatcatgcctagtacatttcttctttgatgcaggcaagtgaatgtagcggtggtagctaccgttttgacctgttatttctatcacctacactctaatattcagaattattggattctttcataattgaactctatgatgatg

SEQ ID NO: 56938 - DNA, 1748 bp, Zea Mays
catgactcatttgcatctgaagttttgtcgtgacctatggtccgaccgtaccggtacaacttagcatcgtacgttgtccgaagaggggtacgatgcagcttcatacccatagagatatgaaggcagaggacatatgcattgcattcatatgcattcattgaagtggtatttgcagatggtgtggttttatactctaagaggtatgaaggcagaggacttacacattgcattactatgcatacatcgaagtgatatttgcaggtattgttgacgcaggaaagtgttatacaacctattgtggttgttcgaggaaatgagatggcattggttattttgggactattgagttctatatctacaagtatttctgatctcaattgtgatccctttaaaatgttgattaattcaattttttgttttaaatatctcatcgaaacaattcacttgctaagatgtttcatctcactcttgctttactcaatgcatgtacttggttcatgttgggaatgaggggagtagcaacacgtccaccatcactctcataataacgctgcccaggcacagccatgatttaattagaaacttcttgtcaaaggatgtttgtttttaactagtcgtgcacactagttaattcagttcatgtcgttatgattatcttcccattgctagcagattattaatgtctagtatgttttcttatcgtgatatctgtttatactctgttgcttccacgtttatgcaaattttcaaaggagatgttgtcaaaattttatatatgaatgttagttgtgtagtttagtagtatttcggggtgtttgtggatcccggggtgttacagttggtatcaaagcataggctttagattcttggcaatttgaagataaatttgacacacttgcacatataggaagggtatggttacaaatatctttgatatatattaatgtctttgaagtgcaggtgacaataatttcacctctccccatttctttatggtgatgtggtaagttgtttatgacttaatgcctgatataatttatctctaaatctttatattgttttattaatgcgtttgatatcgctggtcttttgtgagattgaagttgttattatgcctgtgatatacaagtatgcctatgttgttttcaccatgtttttcatggttgagttttattacaataatattgttatatatgcttgattgaggatgtttctaagaggagtgtgaattgcgtgttttgggttacaaggtaaccatcaatttgaatttaagttgttgagcggttggtggatagttccaactatctttgcaaagaatgattgtttatgtcgagaaaccagttctgaaagaaatgaatattggtacttttataggaattttaggaattttagtgaatgtagcggcggtagctactgttttgacctgttatttctatcacctacactctaatattcagaattattggattctttcataattgaactctatgatgatgttttacttgactgtattatattgatgctctatcatatattgatgatgattatggttcaagtatgacccatgagattaattcacacccctgaaggcagatgaagtcttatttgaggtttgcattgtatctaaaggcagacgaagtattatttgaggtttgcattgtatctgaaggcagataaagtattatttgatgtttgtattgttgttggaacttgctctcctgggcaagttgatccaacgggggaatgaa

SEQ ID NO: 56939 - DNA, 352 bp, Zea Mays
gtaccatcaggcacctggtttgtccccggaatattcttataaaggagggttacagactgtcattacagaaaagctattacaaatcgggcccataacacgcttctccgtgcggggcctgttacaatgggccgaataccacatgggcctccgggtcgagtgaggatgtgggacggggcgacatcgccgtaggccttcgtcttgtggcgtagaagacgaagggaggacctcgccggtcgttcggcttcctgttggcgcagcgagatagacgaaggctggagcgaagggtagcgtcttcgccttcgccccaacaattgtatctaaaggaagtgaaatttattgataaatgcagcat

SEQ ID NO: 56940 - DNA, 524 bp, Zea Mays
taagaggtatgaaggcagaggacttacacattgcattactatgcatacatcgaagtgatatttgcaggaattgttgacgtaggaaagtgttatacaacctattgtggttgttcaaggaaatgagatggcattggttattttgggactattgagttctatatctacaagtatttctgatctcaattgtgatccctttaaaatgttgattaattcaattttttggtttaaatatctcgtcgaaacaattcacttgctaagatgtttcatctcactcttgcattactcaatgcaggtacttggttcgtgttggaaatgaggggagtagcagcacgtccaccttcactctcataataacgctgcccaggcacagccatgatttaattagaaacttcttgtcaaaggatgtttgtttttaactagtcgtgcacactagttaattcagttcatgtcgttatgattatcttcccattgctagcagattattaatgtctagtatgttttcttatcatgatatctgtttatac

SEQ ID NO: 56941 - DNA, 298 bp, Zea Mays
ttccaaggcttcacgaatagaaaaaggtagtatagaaaagcaaagataggtagcatgaataggatggatgaaacatgtactaagctactatataggaggcttaacttaaaattgtatgtcatgatgcatgctcgtcctattcgtcctcacaattcttgccaacatatagtggctttcacattctatggcggtggcaatcctacttactccgtcattgatcactagtcacactttcctagggttttagttagtgtacctgcagaaaattgcattatagttgtgggttagtggttagcat

SEQ ID NO: 56942 - DNA, 618 bp, Zea Mays
aaaaaagatggtcacggatcctctgacgaactgcaccgggaagttgggtcactgcccgtaggccttgttgcacgtggggcccacgcttcagtgaccctacccaacgtcagaggtacaaatcccaaattctccactccgcgccgtcaccacttctacgggagggcgcatcccggccctccgcgcgacctccactcccgccgcgcgcgctcagccggccccgccgcagcgccaccactcctcctggcacatcttgctcctccgttctccgtgctaccaccactccgctgcgtcgccatcactcccttcctgtatcccgccacctccacgcatggccactccgacgagctgctgctgactcgcgtcatcgaagtctgaccaccgcgtcctgtccacacggaggttgaaacaggaggaagaggaggaggaaaggaggagagggcgacgagatccatgggtggagaagaggacgatatccacacgtggaggaggaagaggagatccgcatgaacaggtgaataatccatccccttgcaattttcagttttgtgggtggtggagagttcatggaaatattgttgtgcactctgtggatgtatggttttgcttcgaaatatgttc

SEQ ID NO: 56943 - DNA, 249 bp, Zea Mays
tgatgaagaggctccatgcatcgcattaaggaacatgtccattggggatgtgtgtcctaaggaatccgaagagcctccaaatgcacaagatcaaccttcctcctccacacaagcatctccaccaacacaaaatgaggatgaagctcaagttgatgaagtagaagatcaagcaaatgagccacctcaagataatgacaatgatcaagggggagatgcaaataaggaagacaaggaggaagaggaacaaag

SEQ ID NO: 56944 - DNA, 846 bp, Zea Mays
aatgagagtgcaatcaagatggccgacaatcctgtcgagcatagccgcactaagcacatagccatccggtatcattttcttagggatcaccaacaaaagggagatatcgtgatttcatacattaacactaaagatcaattagccgatatctttaccaagcctcttgatgaacaaacttttaccaaacttaggcatgagctcaatattcttgattcacgtaatttcttttgctagactgcacacatagctcatttatatacctttgatcatgtctccttcatatgctatgactaacgtgttttcaagtctatttcaaaccaagtcataggtatattaaaagggaattggagtcttcggcgaagacaaaggcttccactccgtaactcatccctcgccgacgctccaagtcactctccattcttgggggcgaaagcatgagcaccaagaaaaggattttgtctttggggagaaagtaagagcccaaagcaaaagaccggacttcgtctttggtataatcttaactcatttcatttatgaccaaaggggaagatagcacttcgagggctctaatgattccgtttttggcgattcatgccaaaaagggggagaaatgagcccaaagcaaaaggaccgcaccaccacctatttcaaaaactcagtgttgaatattttttcaattggtatcctatcgtgttcaaaagggggagaaagtagtatttcaaaaatgatatatcaaaaccctcttgaacactaagaggaggatcctatttagggggagttttgtttaagtcaaaggagaagtgttggggtcgtgcttcggtgcgccgaaggtctcacacgaagaag

SEQ ID NO: 56945 - DNA, 620 bp, Zea Mays
aaatagtaagaatataatttatgttaattaatagtatgtgaaagaactattgtaaaggaataactaatccaagttataacttgattataaattatattttagttaaattatggatggatcaagttaactctgattagaatagataatctaatcaacataggctaaacaaattagttatctatattttttacaacatgtcatgtgatagtatagggttattaaagtgtaggcaatattattatgaagataacacaacttgaacgggttaaatcagagctaaaatgatcaaaatacgaatttcagaagttctagtttaattttttataataattttatactataaatttcaaccagggacctatttgcaaatactaagggcggttttgtaaaaatagaggatccaaacattatttcttatgcactaggtggatgtcgggttagttttatagaagcataagggcttatctacaatttaccgaggccgaagtgttattgctgtttctggccacgcgatcagagatggacgccccagattatactcaacatagaataccgatcccacggtcgcgattaaatcacacttaacccaaacgatacactatgctggtcgttcgattccg

SEQ ID NO: 56946 - DNA, 314 bp, Zea Mays
tccacaaacaacccggaatgctactgtactacacttccgacgtccatatataaaatttcggcagcatcccctttgcaagattgcataaaagagggagcaacagagtataaacatatatcatgactaaaacatactaagtattattactcggcaagcaaggaaagataaacatacgacctgaactgaattaaccagtgcgcacgaccatataaaaaaataaacaaacttcctttgacaataagtttctaattaaatcatggctgcgcctgggcagcgttattgtgagagtgaaagtggacgtgctgctactcctc

SEQ ID NO: 56947 - DNA, 1267 bp, Zea Mays
cataacttcaaaatgcaagatggatgatgcgatgtgcatgtcatgcctacaacacttcatataacatgattcaaaaagacacttcaacttcatccagatgggaatcaaccacatatatcattaccaaattatgatcatccacaatattagacaattgagaatttttctcgaaagcgcaggggaactgcgcctttaattatattaagaagaggagaaatagtacatagtacaatagctctccttacggaggccagaaacaaacataaaggaacgaatccgttaggaattcagactaccgacaaaggggcagccaaaaaggagagacccttggcccctgctagcacccaaaggtttctctcctcatcagcctgctgcaggattcgagagaggctgggggtctctccatcaaacacacatctattgcggaggttccatatcttccaggcacccaacatgataagagaattcagccctttcttgaccattccctgcgctgcctcagcagcccctttccaccactctaagaaggatgtaaggccaggctgtggggccagggcatgtaacccaaatttccttaggagcatataccagaaaattcttgtgaagacgcaggagataagaaggtggttcatggtttcatcttcctgatcacaaagaagacacctttgcgggtgattcaggccctttttggccaaacgatcagcagtccagcatctgttgtgtgccaccaaccacatgaaaaaacggcactttgagggggcccaagatctccagattcttttgtagtgatcaaaggaggcagatcctaaaaacagaccattataagttgctttcgttgtgtatttaccatctgtagcaaggctgaaaacatgcttatcccttatgtttggctgtaactcaatccctgaaagggattcccaaaggtttagataatcaaccaagactcttactgtaagagcccccttaatatctgaaatccatttcctgtttacaagtgcttctttcaccgtccttttgttagcaattcttcttggaattgacttgtgcaggctaggggcaatatcagcaattcgagtgccatgcagccatctatcattccagaacaaggtgtttgaaccatccccaaccatagaaacaagagccatagagaaaaaagccctagctttgtttgggacctgtattggaagacttgcccaaggccgccccatatctgttttctgcaaccacagccatctcatgcggagagcccaacaaagctcagggagac

SEQ ID NO: 56948 - DNA, 201 bp, Zea Mays
gttctttgagacaaggacaggtgcatgtgggcccgataccttgggaggttctgccacatgatggtaggagaaaagtcgttcataatatgcttaggagaaatgttgttaatgttcctaggaaaattaatgaaccttctacaatatatcatgctttgaatgctttctatgaaatttgtagaaaggatagaaaggtgattgcta

SEQ ID NO: 56949 - DNA, 258 bp, Zea Mays
gttaggttggtgagctcggctggggggtgggtggtgggtgggttcttgtattctttgattttgtagcctgatgaatggaacctgtaaattggtgatgtgtgttgtttatcaaaaggaaagcgaaagaaataatagcagacgggtgaggtgttgccattgccaatatctagctgttctcttgtgctttgcctgccttgaagggaagaggaatgttctcttgtgagctcgacttgtcaactcctatatactaatccattg

SEQ ID NO: 56950 - DNA, 355 bp, Zea Mays
ctatcgcaagctcgttagccacatttatcttgatcgcgtcagctcgccagacctgcaactctatatacatcaccctcccgtatcgtcgtcaagctcgtcgaacctcgttcttctctgctcgctttcgtcgaacaccgaatcccggatattagacaaaaataagcgaggccccttgtattgtttatcaagtactcggttgaagacttcaatcgaagatcgtcgccgttccgcgcgtcatcaagaatcccaagaatcgggtgaagacgaagctagcagcgcaatattccccaagcgctcgaccaattgcctggatcggaaaatcactactgatctcgcggattcgagtcggctattg

SEQ ID NO: 56951 - DNA, 400 bp, Zea Mays
ctccccctttccccttggttggtcgtcctctcctcccatggcagcccctctccacggcttcctcctccctctagatctccccccatgcagcaaggatcgagaagaggaggaacacgttgaattgaagagggagagaggatcaaggagatgttcttccccatctcttcttgaagatcttcttagggaaaccctaggtatggatgaaatccttgttcctccctgtaattatgtggttttggaggttgtggatcatggggattaaaggattagaggttggattagatgtgggattaggttttgatctcgaatttagttttctgcgggatggcagatttgacagtttctgttcatgcccgttttccgtggtcttagtggcctcaaaaaaattagaatcctatat

SEQ ID NO: 56952 - DNA, 513 bp, Zea Mays
atttgtactaagttttatgcgcgctagcaggtggctacactctagatcatgcccagtattcgatgaaggcaagtgaacgtagcggtggttgctactattttgacctgttacttctatcgcctatactctaatattcagaattattggattctttcataattgaactatatgatggtgttttacttgattgtattatattgatgtcctatcatatattgatgatgattatggttcgagtatgacccatgagattaattcacacccctgaaggcagatgaagcattatttgaggttggtattgtatctgaaggcagatgaagtattatttgaggtttgtattgtatctgaaggcagatgaagtattaattgaggtttgtattgtatctgaaggaagtgtagtttattgataaatgcagcatgccatatacattgcatgactcatttgcatctgaagttttgtcgtgacctatggtccgaccgtaccggtacaacttagcatcgtacgttgcccga

SEQ ID NO: 56953 - DNA, 81 bp, Zea Mays
aaaaaggatcttagagtgtctagggttgggccaggagggtctcttaaccccttctttttttctgcccatcagagttatttc

SEQ ID NO: 56954 - DNA, 1885 bp, Zea Mays
gtccgggccgctttgagatgcgtaacaccctacatcctggtgagaatgctttatgtggtggattacaagggagctctctaacgctagaacgtagagagttggggtggatggctaagtagtgagatcgatcgttctgaaggggtgcccccaaggccttatatattcgaccgtggggcaatacatgcggatatgataacaatgcgtacctaagagatagtgaactgattgagtctatcttcctatagttctgccgacttatccttgcctggttccattgtacggggctccagcgtgggaaagtcgggtctctgttgtggttgcttgctcaacgttgttgggccatccgggctcgcactgatccggtcttatgtcgatctgcttcaccggtcattcttccctaggcccacgaagggatgaccttacgatttattgggcccttgggcttttcgtgaggtcttttatccttccagtggacccgggggatatctgtcccccacattcgtggagaagatatttataccgaaaacaacactgaggttcgattaattaaccgaatgtgaaaaaaacgtttcattggtggaaaaccgctagtaaaaatcgtgatattttcacaggcagtttctttaactaaaccaccagtgtaaaacacaaattcactggtggcttagttttgtaaaccgccagtgaaaatgtgtttccaatcgcagttcttcgagtccgagccaccaatttactaccactgccacgcgttaacggaatctgcatgtacaaattagtgggcaccgtaggcttagagtcgttttctactagtgtgggggggtggccgagttgacaagtctactagggacaactttaataattttaggtttatcaaaaatattgtgattccataaaatataattagctaaactatttagatccatgaaatcctgacataatagacataagtgctagattcaccatattgatgaacctcacaaacaggtgctccacaaactcaactttcatagggttggtaaaaagtaatcgttgtcaccattgattacacaatatacacttccttcttctttttttctttctctccttccaccgcaactttctctcttgtccgtgaaaaagcatcgcttccgccatcgtgcttagtcatgccctggccataatggctcgacacaccggtcagttgtgtgctatgtctactccgactgcgtgacaatcggattgaaaaatggctcgacaatcggattgaaaaatggatattcaaatacccaaaataggaaaaatctaaaacttcttacaatagcacgacactacccgccttagcccggtagtgccatgtctttcggtgccactcatgtgcccagtagtgtcgcagccctacagtgctactccgtgtgtacgatagtgccgctttgtctaacttatgaagatcaagatgaaacttcgaccatagttacacagggatgattcaagaccattccccaaacttgaactccaaaagattaaaccatcgaaatcatatcaagaattgcacagttgaattagggttttcaaagattggttcaaactactggtaacttgtactcctaatgaatcaacccataccacttgttggctatgattctaggggtctttagaatttcagtgcagcccaaacatccacacgaactcagattcaaaaatcattcaaaattttcaaaaaagagcctaggagagaagaaccacaacaagaactcaaattaattagatttgcaaagggagtaacctcaaaggaaccaccatggttaggggaatgcttcccaagttgaaaaaacatagatgcaaattttttctctacaacatctatggatctccctaatagatgaaaggtaaaaaaactaagtgtaaa

SEQ ID NO: 56955 - DNA, 221 bp, Zea Mays
aagaggtactactatttgcagggaagataagaggaaagaggtagtagtgccatgtgtagagcaaatagataagatgtgtagattcagtcataatgaagcttgcttatgattctgcaatttcataattgtggttgcactataactgtagtttttcccctgatctacgtaattgttggcttctaagtaaaggaaaaaggcattatgggactctttggtggctt

SEQ ID NO: 56956 - DNA, 89 bp, Zea Mays
gaggggattccaggcagctgcagcctgcagctctgtggtctgtggatgtgacagcggtgcggacgtgcggtcgcggtgattcacgaggg

SEQ ID NO: 56957 - DNA, 440 bp, Zea Mays
gcattttatggcaatacaaaaataaaataaagagaaatatattaatacctagatgagaatttaatatttaaagggaattctagaggtgtggagaaaaggaaagataaaggatataaataaataaataatatatgtaaatcaatgtctccagaattagtacctctaattgcacaaacataaaattgtaattatgggccataaaagtttgaattaaatttgaattcaaattgaatttgaaaaagggagaaaagaaaatagaaaatagaaagaaaaaaaggaaaaagaaaaaaaaaccagcgcctaggcccaaaatccttcaactcggcccattcccgaatgcatctgcagcccaacttcatcccacgctccctatcatcctttcactggcgcgtgggccgcttcgccagacctgcgccatcgctgttgcgtcgacagatggg

SEQ ID NO: 56958 - DNA, 189 bp, Zea Mays
ctcctttcctccttcttctgttccttcttcctccctccaaactcccatggaggactcgcacccacacgacggacaccaagcggggaggctccaccttggagaggaagagggggagggcggctagggttgaggggtggcgctgcaatctcttggggacgaaggagagggattggggcagctacaatagag

SEQ ID NO: 56959 - DNA, 328 bp, Zea Mays
cttggttgctttcttcttttcattctaaacttctcaagtattttgttaagcaagcgagagacacctaagtgtgtggtgatcattgcggggtcttagtgacccgtgtgattaagaagaagcactcgatcggtctgagtgaccgattgagagagagaaagggttggaatagacctggcctttgtggcctcctcaacggggagtaggttctttgcaaccgaacctcgagaaacaaatcactatgttcatttgtgttgatcttcatcactcgatttgtttcttctctctcctctatctctaaagttctcttgctcattgagagcacctagag

SEQ ID NO: 56960 - DNA, 316 bp, Zea Mays
accagcatatccttgagagtcttttctttagtcgggtaagtcttgctgagtaattccatactcagggttttatcccctgttgtttttcaggtcatagttttgtgctgctgatgatggtgttaagtgccggtgggctcggccttcttattagtctaagtaacccttctatacttcttactgaggatggtcacttgagctagcatatatttcaaacttatacttttgtaatcactccgataaaataatgtaaaatttttgtaacctgtaaaatttggtaataagatttccgctgcaaaaatgttgtgtgtgtgattgg

SEQ ID NO: 56961 - DNA, 2059 bp, Zea Mays
actacacaactaacattcatatataaaatttcgacaacatctcctttgaaaatttgcacaaacgtggaagcaacagagtataaacatatatcatattaagaaaacatactagacattaataatctgctagcaatgggaagataaccataacacatgaactgaattaactagtgtgcacgactagttaaaaaacatcctttgacaagaagccctttaattaaatcatggctatgcgtgggcagcgttattatgagagtgaaggtggacgtgctgctactcccctcattcccaacatgaatcaagtacctgcattgagtaatgcaagagtgagatgaaacatctcagcaagtgaattgtttcgacgagatatttaaaccaaaaaattgaattaatcaacattttaaagggatcacaattaagatcagaaatacttgtagatatagaactcaatagtcccaaaataaacaatgccatctcatttcctcgaacaaccacaataggttgtataacactttcctccgtcaacaacacctgcaaatatcacttcgatgtatgcatagtaatgcaatgtgtaagtcctctgccttcatacctcttaaagtataaaaccacaccatctgcaaataccacttcaatgaatgcatatgaatgcaatgcatatgtcctttgccttcatacctctaagggtatgaagccgcatcgtacccctcctcgggcaacgtacgatgctaagttgtaccggtacggtcggaccataggtcacgacaaaacttcagatgcaagtgaatcatgcaatgtatatggcatgctgcatttatcaatatacttcacttccttcacatacaatacaacctcaaataatactttatttaccttcagatataataccaacctcaaataatacttcatttaccttcaagggtgtgaattaatctcacgagtcatactcgaatcataatcatcatcaatatatgatcgagcatcagtataatgcaagcaagtaaagcatcaccatagagtccaattatgaaagaattcaatacttctgaatattagagtgtaggcaatagaaataacaggtcagaatggaagcaaccactgctacattcacttgccttcatcgaagaagaagaaatgtactaggcatgatctgaagtgtagccacctgctagcaggcataaaacttagtacaaatatttcacaaacatttgccaacaatcaacaaatcgctcctacacttgaaacaaagacctggtggaaagcctcccaccctgaaccacatgccaaacagcagcagcgttgtttgttaattttgtatctttaaaattataatagtggtgatatcaaacaaataatctaggagtatctacaaaaaatactctacaacttcgctattcaatggataattaaattctgccatctacaagttctaaaacctataacaagataactgactgaatctgtttcagatagcagcgtagttaacttcaaaattcaatatctcacaaactactcaaccaaaaatcatggaattctactggcagtaagaacttttatccctctacagaagtctccatagttggaagagccaattcggccatttacctgatgaaacctaccagtgaacagacccgctcatttttgtcaggtaaacaggaacaaccacagtaaaacaaacataactgaagtttcaaaaatcatatgaatgcactctttaacaatctggaaagtttatgaaattatctacaacttcttttaccaacccatagtttaattctgttgataaaactgcctaactcttaagagaacagattctgcacagaattatgagactgaaaactgctataatcaaactgcaataactttctgatctgatgtccgattgaggtgttcttcccgaccacagaaagatctacaaattatctgtgacttatatataaactttttatttttttgaggcgactaagaccatggaaaactggtatgaacagaaactgtcgaatctgccattctgcagaaattaaattcgagatcaaaacctaaccccacatctaatcca

SEQ ID NO: 56962 - DNA, 245 bp, Zea Mays
ttcgcaaccacgcagatcgaggatttccagtgatggcagatctacgatgcatgtttctagtgatcggaactctggacagttgacaattagtaagttattgaatgcatccagctgccctgacatgaatcgtagtttggagcaatttcgaatatctattttcctgaggaacaagggaaggttgacaagggaattgatcgagaggttcccaggaatttaccattccattcaggtgaagcacaaatgca

SEQ ID NO: 56963 - DNA, 492 bp, Zea Mays
  misc_feature (491)..(492): n is a, c, g, or t
gctagacgaacagacagttctcatcaaggtggatctccggggttagggttagcattgccttcacaggaggcagcctggtgccactagcgaacgctagagccacaagcaccacaagcttcggctcctcaacgaacgcccactatgtgctgcctccaccctcaatctaaacgagagtccatctctagctccttgcgacacgagatccaccaatgataatggatttagggaaaacagttgcatcaacacccccttgctcacttctatttgggtcacgatggaggcaaggcctagcttcaacatcccttcagtgggctcctcccaaacataggctgcatgtgcctactcatccctcatcggcaataaactgctttccctttctattatcgtcggtgttctgtggcctcgagccaccaccgtctttgttgcacccactaggccaccaccttgtcaatgactcatgcttgatgttgtccgactgccacccaagcttnn

SEQ ID NO: 56964 - DNA, 628 bp, Zea Mays
atccggactagccgtcgcacacggctgtcgtatccccaagctctgcactctggcgccgcctcctctagccctgcccgcttgtgccgacggcccggcgccacctcccgcaactccacacggcggtaaccccaactctatccgctaacatctcagcacggtgaacccgccactcgcagccctcccgtctcagatccagtttgattagttggttatttgtgcagatcctacagtttgattagttagttatttgtgcagatcctaaccaactgtgatcgctgctgctgcggcttgatcagagcgcgttctctggtgacatacctctggagattgggcggctgcagcagctctaaggctgaccttaacagcagcaagtttgaggacaactacagttagccaatatgttttctgtctatgtcctcgcgaagtactagagcagtagctacataccgtggtttgtccatatcctgttgttagatgatcaagggtgattagatacatgttctggaaccaatgttcagatgacaaattgcaaactaaacacccttttgttctctatctttttttttttgcaattgcaatgcgtgtaaagtacattatcaatgtcagccccaggcatatcaatcgtcct

SEQ ID NO: 56965 - DNA, 334 bp, Zea Mays
gttgaattgcccaacacaaataattggactaactagtttgctctagtgtataagttatacaggtgccaaaggttcaccataagccaataaaaagatcaagagaaagggttcaaacaaaggagcaaaggccaaccgaaggcaccctggactggtgcaccggactgtctggtgcaccagggaagaccgaactcaaactcgtcaccttcgggaaattccagaggcaacttcgctataattcaccggacatgtccggtgtgcaccggactgtccggtgtaacagcggggcaacggctacttcaggcgccaacgactacctgcagcgcatttattgcac

SEQ ID NO: 56966 - DNA, 593 bp, Zea Mays
caagaactcacaaatagaaggcttccttgaggaggagggcatcaagcatgagttctcttctccctacaccccacaacaaaatggtgtagtggagaggaagaatcgaactttattggacatggcaagaaccatgcttgatgagtacaagacaccggatcggttttgggccgaggcggtcaacaccgcttgctacgccatcaaccggttatatctacatcgaatcctcaagaagacatcctacgaactcctaaccggtaaaaagccaaatatttcatattttagagtttttggtagcaaatgctttattcttgttaaaagaggtagaaaatctaaatttgctcctaaaactgtagaaggctttttactaggatatgactcaaacacaagggcatatagagtctttaacaagtccttaggacttgttgaagtttcttgtgacgttgtgtttgatgagactaacggctctcaagtagagcaagttgatcttgatgagataggtgaagaacaagctccatgcatagcgctaaggaacatgtccattggggatgtgtgtcctaaggaatccgaagagcctccacatgcacaagatcaac

SEQ ID NO: 56967 - DNA, 1454 bp, Zea Mays
cgggactatggttacaatttaaccaaagttcctcttctatgtgataatgagagtgcaatccgcatggcggataatcccgttgagcttagccgcactaaacacatagccattcggtatcattttcttagggatcaccaacaaagggggatatcgagattgcatatattaatactaaagatcaattagccgatatctttaccaagccacttgatgaacaatcttttaccaaacttaggcatgagctcaatattcttgattttaggaatttcttttgctaaacttgcacacatagctcataagtatacctttgatcatatctcctttatatatgctatgactaatgtgttttcaagtatatttcaaaccaagtcataggtatattgaaagggaattggagtcctcggcgaagacaaaggcttccacaccactctactactcatccttcgccgtcgctccgcttcactctccatctttggtataatcttcactcatatgttttatttgccaaaggggagaaaatagttaggaaagggcttatatctcactcaaagtatccgtttttggcgattcatgccaaagggggagaaagtatgagcccaaagcaaaaggaccgcaccaccaccctaattttaaaaattaatgattttcaattgataaatttcaaattggtatctctttgtgttctaaagggggagcaagtagtattttcaaaatttgatatcttaaaaccctcttgaacactaagagggagaatttattgagggggagttttgtttagtcaaaggaaaagcatttgaaacaaagggagaaaatttcaaacttgaaaatgcttcgcaaaaatcctactcatttacctttgactatcttgcaaaaagactttgaaaagaataaacaaaagaatttgcaaaaacaaaacttgtggtgcaagcgtggtccaaaatgttaaaaatgaagaaaacaatccatgcatatctagtaagtaacatttattggctcaattccaagcaatctttgcacttacattatgcaaactagttcaattatgcacttttccatttgctttggtttgtgttggcatcaatcaccaaaaagggggagattgaaagggaattaggcttacacctagttcctaaataattttggtggttgaattgcccaacataaataattggactaactagtttgctctagtgtataagttatacaggtgccaaaggttcaccataagccaataaaaagatcaagagaaagggttcaaacaaaggagcaaaggccaaccgaaggcaccctggactggtgcaccggactgtccggtgcaccaccggacatgtccggtgcaccagggaagaccgaactcaaactcgtcaccttcgggaaattccagaggcaactccgctataattcaccggacatgtccggtgtgcaccggactgtccggtgtaacagcggggcaa

SEQ ID NO: 56968 - DNA, 306 bp, Zea Mays
tgaagcagcgcgcagtgcaggaaatgaagctgggctggaagcgcgacggtgctagtgggccgagagtgaatacggcccaagcgcaggaataccttattctttttttttattctttttatttccctattttgtttttctctttttcatttccaaattcaaaattccaattccaattaaatttcaacttgtggcaaatccaccctcagattaacagtacaatttggacataccaaaaagtgtgatgaacttatttatttataactttattttgtgttgtataatatttctctctttctttcttatttc

SEQ ID NO: 56969 - DNA, 554 bp, Zea Mays
attcaattagtcatgttgtttgcactgaccatctctctatgtcctccaagagcaaaaagggaagaggacaaaggagatgcttcaagtgtaaggaaccaggccactttattgtgtcttgttcacacaaagacaaggatgaaaggatgaggaggtgctttggatgcaacgataaggaccatgtgatcacttcatgcccgctcatgaagaatcaaagatgtgcattccccacgatgaccctcaccaaaatcaagaatgaacaacaagcgtcatacaaagctgaacgacgcttctgctacaagtgtggtgagcaaggtcatctatgaaaggtatataagaagtgtaaggttcctaggtaaataaattcatctcattattattcgcttaggagacccaaatcatacacttgtgctagacccatgttgaaatcacctagaactagaacaaatgctatttgggtacccaaggcactattaaatgatctttatggacccatcccaagatgggtgccaaattgtgccaactagaccatgtaggtgctcggagatggactggaa

SEQ ID NO: 56970 - DNA, 389 bp, Zea Mays
caagttttgtgatgaccatttgttgcttgtcctctaagcatttactatttttatttttctaggtattgcaagagcgtggtgaaagtacgtcatgtcatggacatgctacatttggaaatgttgatattgaatacacaattgacatatggaatatatatttccttctatagttctatgtgatattggaccacacattgctcttggtctttctgattaaaaaatggatctgctttgtacatagggggttactatgattggtctaatagtgtaatttaactttctacattgtataggctacaacttattaattttcttgatgtgatcataaaaatgttcttaaatctgtttatgatccatgcaactagcaaaaagttgttggtaaatgtttc

SEQ ID NO: 56971 - DNA, 2419 bp, Zea Mays
cagcattacttttctccatggttcgtaaaaccccgggatccacaaacaccccagaatgctactaaactacacatctaacattcatatataaaatttcgacagcatcccctttgaaaattgcataaacggggaagcaacaaagtataaatagatatcatgataagaaaacataatagacattaataatctgctagcaatggaaagacaaccataacgacatgaactaaatcaactagtgcgcacaactagttaaaaacaacatcctttgacaagaagtttctaattaaatcatgactgtgcctaagcggcgttattatgagagtgaaggtggatgtgctgctacttcccactttccttgatgagcaacaagcacctgcattgagtaatacaagagtgagatgaaacatctcagcaagcgaattgttttgacaagatatttaaaccacaaattgaattaatcaacattttaaaagaatcacaattaagatcagaaatacttgtagatatagaactcggtagtctcaatataaccaataccatctcatttccttgaacaaccacaatagtttgtataacacttccctgtgtcaacaatacctacaaatatcacttcagtgtatgcataggaaagcaaagtgtaggtactctgtcttcatacctctgagggtataaaaccacatcatctacaaatatcacttcaatgaatgcatatgtcctctgccttcatacctctaagggtatgaagccgcatcgtacccctcctcgggcaacgtatgatgctaagttgtaccggtacggtcggaccataggccacgacccaacttcagatgcaagtgaatcatgcaatgtatgtggcatgctgcatttatcaatatacttaacttccttcacatgaaatacaaacctcaaataatacttcatttaccttcagatacaatacaaacctcaaataatacttcatttaccttcaggggtgtgaattaatctcatgagtcttacttgaatcataatcatcatcaatatatgattgagcatcaggataatgcaagcaagtaaagcatcaccatggagtccaattatgaaagaatccaataattctgaatactagagtgtaggcgatagaaataataggtcagaacggaagcaaccacccctacattcacttgccttcatcgaagaagaaaaatgtactaggcatgatctggagtgtagccacctgctagcgggcataaaacttagtacaaatatttcacaaacatttgccaacaatcaacaaatcgctcctacagctgaaaccaagatctggtggaaaacctcccactctgaaccacatgccatacagcagcaaccctgtttgttaattttgtatctttaaaattataacagtggtgatatcaaacaaatactctagaggtatctacacaaaatactctacaccttcggcattcgatggataattaaattatgtcatctataagttctaaaacatctgacaagataactgactgaatctgttttagacagcagcatagttaactttaaaaattcgatatctcacaaactattcaaccaaaaatcatgaaattatgctggaagtaagaacttttatccctctacaaaagtctccataggtgggagagccaatttggccatttacctgatgaaacctaccagtgaacagacccgctcatttctgtcaggccaacagaaacagccacagtaaaacaaacataactggagtttcataattcatatgaatgcactctttaacaatatggaaagcttatgaaattttctacatcttttcttacaaacccaatgtttaattctgttgatacaattgcctaaatcttaagagaacagattctgcacagaattaagagactgaaaaactgctataatcaaactgcaataactctctgatctgctgtccgattgaggtgttctttgcggccacagaaagatctacaaattatctacgactcatatatagactttttatttttttgaggccactaagacccaaggaaaactggcatgaacaggaactatcgaatctgtcattctgcagaaaactaaattcgagatcaaaacctaaccctacatctaatccaacctctaatcctttaattcccatgatccacaacctccaaaagcacataattacagggaggaacaagcatctcatccatacctagggtttccccaagaaattctgcaagaagagatggggaagaacatctccttgatcctctcttccccttcaattcaacgtgctcctccgcttctctatccttgctgcgcgggggagatctagagggaggaggaagccgtggagaggggctgccatggaaggagtggacggccagcccaaggggaaaggagggaggggcggccaagtgtgggaggggggaagtgg

SEQ ID NO: 56972 - DNA, 773 bp, Zea Mays
ggcctccctcctctctcagcctaggttttgagagcgaggtgcctgtctgaataggctgcgcgcgagcgcatgaacgcccgacgctggtgatggtgggctttggcggactggcccagtgggtgcgttacaaatggtatcggagcccacattgccgctgctgcctgggagagctttgggcctcttaggggggtgggatgtaaggggccggtatgcatgccctgggttagtaccacctcgcctagccaagggggccgtgttgcacttataagggcgggcctccctcctctctcagcctaggttttgagagcgaggtgcctgtctgaataggctgcgcgcgagcgcatgaacgcccgacgctggtgatggtgggctttggcggactggcccagtgggtgcgttacaaatgtcagcagctctaggtgctatacaaaagttaaggatggtagctccggatgttctacggaagccaagccatgcaagacgaggagaagcaggcttctgaagctgttgaaagagggaagctgagaagagtagccgagagactaagcccaacaagaagtatattggtgtcaataggctgtaatagggcccacatatttgttagctataaaagagggaaaactgctcgtctgtaacctggcttttggctaacgatgaacttggaaaggaagatagaacatagaactgattcctgagtgtctggtgagtcttgtgagagggtgttgttaacatttggtatcagagctggttcttccacaccgtcgcaaaccaat

SEQ ID NO: 56973 - DNA, 981 bp, Zea Mays
gcaacgtacgatgctaaattgtaccggtacggtcggaccataggtcacgacaaaacttcagatgcaaatgagtcatgcaatgtatatggcatgctgcatttatcaataaccttcacttccttcagatataatagaaacctcaaataatactttatttaccttcagatacaataccaacctcaattaatacttcatttaccttcagatacaataccaacctcaaataatacttcatttaccttcaggggtgtgaattaatctcatgaatcatactcgaatcataatcatcatcaatatatgattgagcatcagtataatgcaagcaagtaaagcatcaccatagagtccaattatgaaagaatccaatacttctgaatattagagtgtaggcaatagaaataacaggtcagaacagaagcaaccaccgctacattcacttgcctttcatcgaagaagaagaaatgtactagacatgatctggagtatagccacctgctagcgggcataaaacttagtacaaatatttcacaaacatttgccatcaatcaacaaaacactcctacacttgaaaccaagacccagtggaaagactcccaccctgaaccacatgtcatacagcagcagcgctgtttgttaattttgtatctttaaaattaaaacagcggtgatatcaaacaaatactctaggagtatctacacaaaatactctacaacttcagtattcaatggataattaaattctgtcatctacaagatctaaaacatgtgacaatataactgactgaatctgttttagacagcaatatggttaactttaaaattcgatatctcccaaactactaaaccaaaaattatgaaattctgttggaagtaagaacttttatccctctacaaaagtctccatagttggaagagccaatttggtcatttactagatgaaacccaccagtgaacagacccactcatttttgtcaggcaaac

SEQ ID NO: 56974 - DNA, 444 bp, Zea Mays
ttcgtatataaaatttcgacagcatctcctttgaaaatggcataaacggggaagcaacaaagtataaatagatatcatgataagaaaacataatagacattaatagtctgctagcaatgggaagacaaccataacggcatgctctaaattatccagtgcgcacaactagttagaaacaaacgtcctttgacaagaagcttctaattaaatcatgactgcgcctaagcagtgttattataagagtgaaggtggatgtgctgctacttcccacttcccttgatgagcaacaagcacctgcattgagtaatgcaagagtgagatgaaacatctcagcaagcgaataattttgacgagatctttaaaccacaaattgaattcatcaacattttaaaagagtcacaattaaaatcagaaatacttgtagatatggaactcagtagtccc

SEQ ID NO: 56975 - DNA, 263 bp, Zea Mays
ctctaatccttcaatccacatgatccacaacctccaaaagcatataattatagggaggaacaaggatcctatccttacctagggtttccccaagaaaatctgcaagagatgggggtagaacatctccttgatcctctcttcctcttcaatccatcttgctcctcctcttctcgatccttgctacgtggggggagatctagagggaggaggaagtagtggagggtggctgcaaggggaagggggaggggcggccaagggtgggg

SEQ ID NO: 56976 - DNA, 858 bp, Zea Mays
attcaatggagtcgtggaggtagcaaagggtccgcttgagtgcggtgagatggggctcctgtggggtgtgcatgtgaaggcacacctgctggacggcgtaggcgatgtcgggcctggagaaggttagatattgaagggcgctggtgaggctccggtaggatgtcgcatcggcgaccgggggctcgtcgtcctcagagagctttgcctgagtgtcaacaggcgtggagcagggcttgcagtcgaacatgccagcccgctccaggatgtcaagagcgtactggcgctggtgtaggaagagaccctaaggcctccgttcagcatgtgatgccgaggaactggtggagaggccccaggtccttcatcattaactcgcgctgaagggcgacgatcgtgcgctgaagaagatcggcactagacgccgtgagcacgatgtcgtcgatgtagaggagcaggtagacggtgtcatcgccgcgccgatagacgaacaggagggatgtgtccgacttggccttgacgaagccaagggaggccaagtggaaggcgaagcgactgtaccaggcccacaacgcatgctttgttaggaaagtaatccttgattggtgctagtttacttattctgttttaggaaatagctagtatggtagtggatcagtcttatatggacgaatccaatcagcaagatcaggactgatagcagtccggattattaccttgtaatagctagtttgtttccttatgaaagtctataaatatatggccttagaggctaagaaaaggcagtcaataggacgccaccaaaatctgctgtgttcctctccaaaagagttcgtgtgcgtgtgagtccctgggaggttttct

SEQ ID NO: 56977 - DNA, 530 bp, Zea Mays
aataaggagtagttaaaatattgattttggatcatgcataggtttcattttgatttattcatttttgtggagcccaatctatttaaatagtagattttttgcctaaaattatccattctttaaaattgtgtattctatttatgaaaatattattataatttttatgaattacctatttaaaaaaaaagaatttcaaaaataaaagaaaaagaaaaagaaaaaagagaattttgaaataaataaaaaaagaataaaataaaataaaaaaacgcacgagcctagccccactctcgtcgtacgtgcctccctctcctacgattacaggtggtgccctctttctattttttttccttgcttctcatctttcacggttggaatttggaaagcaccgaccaccattcccgtacatgcagccgccgcagtttcttttctgataattacgccgtccatacagttcatctcccactcatgcctccacttatgtacaccattattagagctactccgccgtatggtgcccctcgatctgc

SEQ ID NO: 56978 - DNA, 1140 bp, Zea Mays
atttatttaaaaggatataatttcttatgtaaactctatattaagaactagtttaactttttttagagaatagatctttaacacaaatgatagctcacataggaatcttttaggtaatctcttatttgaaaacatatttatttaaattaataaatgagtttcctaatttatttaggatgtgattttcgagtgttacacacccccatgtgtagaacatcttcttgacctcaatgtttttatgcctacatatttggactaaagtaaattgcacttaagttctagtcaaataactccctgctttttttatgccactcttcatgaccaattccatgctgcatttaccattgttcggctttcacaatctttattgcagcacttgcatacttatcttattgcaaacaggagtacattatcattgtgtcacttctatatatgggattatgaaagctatctctttttttaccatctttattgctagcctcaataaaccctttcgtctatacaatgggagtgagagcctctcagtagatcctatttccttaatatttctggacaaagaaagaagaccattatgtcattgctttgcactatactattgaaaaatactagtaacacttttatagaaacaataaaaggtactttttcatacatacgtctcttgagattacatctaccttgctattgctggctattagcctacaccattctctccatcaggttattatacagcaactgtgtcagtatggaagttatcataccatgagtaattacttctctttgataatttactgtgtcatcacagcatatacattaaatcatttccagcaacttatgtcattaaaattgacaatggtgatgctttttggcggtaagctttggtgctccatgttgtttcctccgcttctgcttctttgtgatgctaatgaactgtgttccctacaatacataaaactgcgaaatgtaagcttaggtccaataccatagtcctacgatcctattgtaattgtttttttgtttctgttgacttacaaatgatagagctaagttggacaagcctgttagtccgtttgatgcgctaatgaattccacagtaattatgtagatttacatttgagattagggatgaaaacgttttagatt

SEQ ID NO: 56979 - DNA, 705 bp, Zea Mays
gggatttctgaagctagtggaactttgtaaaggcttcatagtgttaccctgcctcgcttccttggtagaggtgtatgggattcatgaccccttggcagatgggtaacacggcttgtgggtaaagatgcgcaacctctgcagagtgtaaaactagtatactagccatgctcacggtcatgagcggctcggaccctcacatgattaaattatggaacttaaactcaattggtcatatgcattgcatgggatttgttattaattttgttctattatttttattatggtttggtatttacttacatctagtaattgctaataaaagtttgaccaacattaaaagcaatgctcagctttaaccatttttctttgataagccttacacttcatgagctcccacctttggtgagttcatgccacattattccccacaacttgttgagctattataatgtgtgagctcacccttgctgtctcacacccccccccacaggagaagaacaggtggttcaagaggagccacgcatcgaggagttcgattcgatctaggtggcgtctcccagttgactttctggcgccaaggatggattttagatcatgctatatttatctttttattttgtaagacttccgctatgtaataagtactctgattattgtgacatttatctctatacactctatgattatatatgttgtcttctttgg

SEQ ID NO: 56980 - DNA, 534 bp, Zea Mays
tcctgaaatgctactaaactacacaactaacattcatatataaaattttgacagcatctcctttgaaaatttgcataaacgtggaagcaacagagtataagcagatatcatgataagaaaacatactagacattaataatcggctagcaatgggaagataaccataacaacatgaattgaattaactagtgtgcatgactagttaaagacaaacatcctttgacaagaagtttctaattaaatcatggctgtgcgtgggcagcgttattatgagagtgaaggtggacgtgctgctactccctcattcccaacatgaatcaagtacctgcattgagtaatgcaagagtgagatgaaacatctcagcaagtgaattgtttcgacgagatatttaaaccaaaaaaattgaattaatcaacattttgaagggatcacaattgagatcagaaatacttgtagatattgtcggcgtttcgagacaggggggtccctaagccgacgagtgagtgtgctgcgtgccccagcccagatgggtc

SEQ ID NO: 56981 - DNA, 842 bp, Zea Mays
tgttattatgcttgtgatatacaagtatgtctatgttgtttacaccatgtttttcatggttgagttttattacaataatattgttatatatgcttgattgaggatgtttctaagaggagtgtgaattgcgtgttttgggttacaaggtaaccatcaatttgaatttaagttgttgagcggttggtggatagttccaactatctttgcaaagaatgattgtttatgtcgagaaaccagttctgaaagaaatgaatgttggtactttatatgaattttgggggaagtctttacctagctagaatggcttacatgtctctcttctattgtgtgttttaatagccacaaagcctagatgtggtttaaagtggttgcatgttagtcatgctagttgtagaataaacctttgattttctagatccattgattatgtattaatatatggaggatcagatggttctctctccgatgcatgcttgtggagccattgttggaccacctatctattggtttgaatgaagccagtgcctagcctagagtttgttgtgtgtggttagtcacctattcgtaaatgatgtggtttttacatcagcttgagatgtttgtcaaatgtgtgaaggattacggggttattattgaccttgtatgtctggtactttgagtgcatcgtatgatagaatgaaatgtaagtttatgaactacagtagatgaagacttatattatgtgtaggttaaccttactagttcggatatttttcttagttgagttgttggatgaagtatagtgacattggttaccaagtattgtgttgttgtgctgtcagtgctctttgtggagcttttgg

SEQ ID NO: 56982 - DNA, 446 bp, Zea Mays
aaaacggtatgtacgtaaaagtttcatgcatcgtaaagaattgagttacaaacagcttacatattacattcaacgccataaaaatactacacactttgttcatcaaatattacactctaaatgtctttacaatagcagttaatcttctcttaagactacttccgcagcttcattcagtagttgatcaacaactttgtccataatagcttcggccatttttctaatctcgccatccccccttgcgttggggtccgttaatggctcggcgggctctgggggaagagatagtgcgatcgtattacaaagagtgaataagtccaaagtcataaagttacaacataaagtcaaaactagtagtcaatacatatacgttcttcgagatccacatttttatcagcggcctctgctacttttctagcgtcatgaatacatttttcgcttctcct

SEQ ID NO: 56983 - DNA, 356 bp, Zea Mays
ttgcattttgacactttctcgggaaaaaaataacgtttagactctagaaaattttaatgtcatttttgtaccatttgctcggcgcatagcttatgacgtcgaagtaacacagctcggcgccataggctatgacgctgagttacgtgctgcgctggcacaaccggacgccgtggcgccgacgtggcaccgagctcgacgccaagatctatgacgccgagcttggttatgtaaacaggaagcctgtctagctcagttggtacagtgcaaggctttcaatcttatggttgttagttcgagccccatggtgggtgtttaatactttttttgtctgtcactaatttatttttttgtccaga

SEQ ID NO: 56984 - DNA, 162 bp, Zea Mays
  misc_feature (1)..(2): n is a, c, g, or t
nnccatgttccggacgggctctggcgcctgtgcgctgcggttcaacggtgcaagctcgacggcgggtcgacgagtggctccaagtcacacaggtggcgccacactccaatccaaggttctccagagcaggccagtgacaagcgggcgggcagcgggaacggg

SEQ ID NO: 56985 - DNA, 635 bp, Zea Mays
agtagcaagaaatttgacgtcgtcttctaccttgttcgcaacagtagagaagactgaggatggcttcgacaaatgatgacgagggcgatatgttgagctgaacaggtagcatcacgacgtggctacattagggactcgacggggcaaggcttcaaacgtggtgcttcgacgtcaggcgtggtcttggcgcgaggatggtcatgacgcaggtaaggatcatcagcgcagcaggaagtcccggcgacgatgccggctcgacgaggcagcaacaggcgcgacagagcagcaaacagtcacgacaaccatcagcgagcgaggtgcgagcagggcgagtgggtaggggcgagaagagatgaggcttggagcttgccagaatccagtgaccgcaacgtacggcctcgcggctgtctcgcggacagagagcaagaggcatacgaggagaaagtggaggctgtgaacgacacgatggagcttgggttcatgatttatagcgacgagggagagagaacggtgccgggaggggaaaaacgcccggccctggcttcaaggcgtcattgatggcgtgagggagtaattgaggaggaaacggacgtattgaagcaccattacaggcgagggaagaaacggacgcggag

SEQ ID NO: 56986 - DNA, 828 bp, Zea Mays
gaaactttattaatattagtaaattacatctagatgatacaattacactaagaaaactttcaggctctataaagctagggtgtacacaaccaaagatagagagaaaaagagaggaagaaaacataaccatttatcatatcactgcaaactacagcacacaacagaatcttctgctgcaggagcaccgcagccatggcacccaaaggtcgcgccacacccactgctgcaggagcagccgcagccacacatgacgatggtccccttcctgggtacatggagaactagtaggaacagaaggacaacatcaggctcaagcagtacatcaccgaccccgatcgctgccttgtctccttcaccttcgacgtggtgatcgacaacagtgagttcgaatcacagtcaaacttcttttgctctacatcttgaaacattgcaatgcggcgttggatttgtttggctagcttgaatcgcctacatgttgaggaaaaggcccagtaatacgagtagggatccaacaacttacgaaagatagcaccaaaattggagctatgtgaagatggatcttgttggcgccgatctgagcgccaatcaatacgatgagaaccggcggcggtgctctctgcagaggcacgaacggttcgcggccaggggctagacggtttgtgacctggtgcaggggttagggtcctgtctgatgagccggacggtgcgcgcgtgcgcaggggcgacagagtttgccggtggcgcctggatctcacttccgggagggaccccgtcggggaggagagatcctaggccttgtcttgggaccggcaggccacccaagacgcc

SEQ ID NO: 56987 - DNA, 248 bp, Zea Mays
cttggctagtcgccccctctcccccattgcagcagccctccaatacttcttcctccctagatctcccccccccacgcaacaaggatcgagaagaggaggaacaagatggattgaagaggaagagaggatcaaggagatgtggtacccccatctcttgcagatttttcttagggaaaaccctaggtaaggatgggatccttgtttctccctataattatgtgcttttggaggttgtggatcatgtggat

SEQ ID NO: 56988 - DNA, 201 bp, Zea Mays
cataaaaccaaacccaaactaatagaaagtccctgaggaatcaaatacaatggttcggtgtcgtttcaacgatcatatagccctaggaaattaccatatcaatgttttcatgtccactgcatatctggtcagtgggcaacaactccatcccatcctcttggtatatctattgtggacaaaagagatacaagaattaaagaa

SEQ ID NO: 56989 - DNA, 298 bp, Zea Mays
ctttctttatcatctcatggcgtgtcaaactgtcagcaaaagttagcagtttgtcgagtatactcttcttctactacgacactgttttcccgacctttcctgcttggttgcatgcgttcagttgtgctattgtatttatgaataacaaacataacacatgcccgagtagagagatctcgagcactgcctgccacggcaaatatcgatcgagagccacacattcgaggaggaaggaagaacacaagcagtacgtaaagagccacacatggctggccctatctatcgccatgcacatcgg

SEQ ID NO: 56990 - DNA, 361 bp, Zea Mays
gactgttcttccacgccgccgatgagactcgtcttccacactggttcgcgctctcgactgctcttggttcgtgctcgacgcaaatggaggcgccaccaggtcttgcttcacgctccttggaaatggaggcgcctccggccggcgccgatgtagtccaagctcccccttttctcgttactcctcaggaccatggtagtttggtaagagatttctattgtttttgctatatttctgcgtcggcgcaatgagtactagtggcactagcggtcggagtcggtactatcatgcgaactgtgcagggccggccctgagcctatgcaagggaggcgacggccgggggcccaaaattattaggggccca

SEQ ID NO: 56991 - DNA, 1060 bp, Zea Mays
atgagtttaatgtgtgggagttcagcatctgttatgcaatacatttagaaagatagtgcattttagcaaaaaaaaaatgtggacaatacatttgtcagaggaactcattattttgagcaattccaggcttttggtattcttgtttacattttggtgttagatactgaaatttattgtagctctggatggtatactcctttccttgatgcgctagcaccaggggaatatcaactattggattttagacactattagaaagcacatagtacatgactttggaattgttcagtcaatattgtcacatgaatttggatgggtgaactgaatgcatgtttctgtcactatttcagtgactatttgagtttacagaactatactatttgagtttacataactatactttacagaatctatgacaaaacgcaggcaaaagacattgttaggagtaggggcacagacaccgtgggcgcctcgcttgacacgagcaacattgtttatggcactagcagaatacgtccgcgccatcgatcatccaacacatatgatccgatatgttttagcattaggaacattatagatttggtttggcaatactgatgtgtgaaagaatctcactcttctatttttattgtaggcacatagattaaatagagtttggaatggtcttttagacgccattagacacatgaaaatccagtgttgcttggtgttgggaagaaccattatcatttttgggaaaccattgtttttgttgtgtttttcctcggcttctatttcctgttatgatatttgttagataaataagtatgaaaaaatgaagacaatagcatcacagtacaaatgaacatagtatcttttctttgtttcattgaggggacacttgtagctgctctttctatgccctaactctacacagtttgggcacttgaattttcctcgaataattttctttgttttcacattgtcagttgtagccttcttcttaccactatcaccctcgagacaactcttgatcctattcttcctttgacgtccgacagctcttttaccaaggggtgca

SEQ ID NO: 56992 - DNA, 147 bp, Zea Mays
gcagtagatccagcttttggagagaggatcaatcactagagccacaagtgccactagatacagctttcggagaggatcagtcactattgccacaagtgccactagatacagcttttggagaggatcagtcactagagccacaagtgc

SEQ ID NO: 56993 - DNA, 413 bp, Zea Mays
gtcctgtccaagcggtggcgtttctctgcaacggcgcaagcgacgaagcccctcatcttgatgcgccaagaggaggtgtagctagctagctagctgagatgaacaaaatcctcggtgtcgcctgatgatcttgtgcagcaacaagcagcaggaaaggcaagagaaggcgagctttgtcgatcgtcgtcgacgatcagtagactgactgtatgtatgtatatatatggtcccttgatcctccggcaagctatagctatatatgtggatatgatcaacccttgtatgtatatgagagagagagatcgagttcagctgttgtgatgtatatatatatgcttgcaacacaggagtctcccaagtggcaccaagcagcaggggaagagagacctgagaggacaaaatgcatgagagag

SEQ ID NO: 56994 - DNA, 280 bp, Zea Mays
gtagcatcttcgtcaagacccggttcatacagattgaaggatatggacgacaacgacattcctagatcttggaatgcggatgagcttcggcgatattatgtgtaacttgatgtaattttttatgtttttttttctttttcatggcacccttttcctttctgaagggggagaaaggtttttaatggggccatcatatgtaatttcctctcttagatctaataagagcaaaatcccccaaggaatgtaaatgtaaaagctgagaacgcaccatcgagtgccg

SEQ ID NO: 56995 - DNA, 543 bp, Zea Mays
cccctagatgccgaggtagccaaagtcgaggtggtcgcggtcgggagacacgtagcagaagcctgttcttcaggaggggtcgacgttcgagcgtcaacgatcggcgagggcgacacaacaaaagagcactagcaggccgaccttcttgcttctttgatcgtccggatgtcgaggagccccgccagggaggccgacggtagcacacgcgtctgcgccggtcatggtgcccgtgcccgtggcagaatataaggggtaatgacggatccggccaggaaggccacgacagcgacggatccggccgcgaagacgcgatccggccaaagggacgacagatcgagccgagaaggtcgcaacaacggtgaatcaggctgggaaggccgcggcagcgacggatccaacgaagacgatgaaggggagggcgacggggcggttccagtcgggcaggggcctgcgccggtcctggcaggaaagggttgacacggcgacaagagaggcgctgctaggcggctcagacgagggcaggggggcgtgttgatggcgccg

SEQ ID NO: 56996 - DNA, 1513 bp, Zea Mays
ggaaccctagcaagcagaagccgccgccgccgcgggcaagctataaatacggccctcctgaacgtttctacttccaccatctcttctgtccgccgccgccgccgccgccgctaggaaacgacgtctcgtctcgtgccttcaatctctccttttgccgtcgtcctgtgtttatcgcttgatttcctctgttatcccgctttcttcctctgtaagggcaaatgatgatgcaaagtcatgcaccactctgaatgaggggattatcctctctttgggctgacaaacggacttctacccatttttcgtctgagccttgtgattacatccgatttctttattgtctccctggcttttcttttttcttgctgcttactgtgacactgatcttattgcgtttgattaatggagctgtggagtgatctcggagaactagatgatgtgggtctgccgatccaaccatgatgcggactgaattttatttgaggtcaaatgtaatggattctgatggttctcgagtttatctcccttctgacattggcatatttctttcttccctcgaatgggtcatggagcgaaaattagtgcggctttgtttttgatctcttgctttcaattggtttgttggttagaaagctcaaagaaacaggtgatgaagccaatttgcagagcaaaggggccagataagtggcaatctttgcattgaaggttggccacaacgaaactgcagttctccgtgccgctcagatttctctgttttgtgacggcctcgaacaagctgccacattatcatatcttatatgttatccattttgttttggtttttatcttcttcgtatcgtgtctccagttaaaagctacggaaactaacatgaactacataatacatatgtacagtatgtagcgcatatcgcatgacaaccgaacactacatgccacagatgaaagacagatagtgtcagtaaagaaacagacggtaaagccaatttgcagagcaaaggggccagataagtggcgatctttgcattgaaggttggccacaacgaactgcagttctccgtgccgctcagatttctctgttttgtgacggcctcgaacaatctgctacatggtctcttatctgtgatccaatttggtttttggtcttttttccatcctagttaaaatcaaacatgatgaactatactaaacattacgtgtcgcatgacattggctttgaagcggcagttttaacagatgaattactgctcatcattaaagaacgagttaatatcagtaaagaaccgagtggataaatcagagcagatcagtaaagaacggttaactagggcccgttccaatcgcaactgctctttggtgcctagtaccgcagtgtggtatttaattatggttgaacggtatttgattatggttgaactgaagaggtgattgttatcgatctatgagtttgagaatgattatgcacacattgaaacattgattttcaagaatctacaactgaacaaaacataccctaata

SEQ ID NO: 56997 - DNA, 2608 bp, Zea Mays
tgaccagccatgggcgcgcctggaaaggagtggcggcggcggaggcgccctgggcggcgcgaccggtccttgcgcgacagagggcgcgcacggcggcgtcggggccgcggctggacgcggccaggcgcgggcagcagggacgcggcgtagcaggggcgcggtgccaggcagtcagggccgccaggaggagggcggcggcggcggaagccctgggctggagtctggcggtggcggctgaaaccctaggatagggtggcggcgccagaaaccctagggcgagggcagcggcggctgtagggagggtggcggcgccagaaaccctagggctagggcagcggcggctgtagggatggaaaccaggctgataccatattggagtgaatattccatagattagggctaacccaacagattagctatatagtgtttacatgggccacatgggcctagccttaacaggcctaacactctaacagatacaaagagtaaaaagggcaaattaaaagagcacacctaaaaaggacaccagacttttacattgcaacacacgtgatgggtctgaaccaacttttggtattcacaaatagacaagctctgcagacttgacaatcaaagataggaattcagaaggcgtatgatgaagggaaggatgcaaagtaaaggtattggataggtcaattgaagaactcgataacgtgtatgtgttttagaatgcaaagtaagttgtgttccttcgtttatttagaagttggttaatttaacaaaccttgctgcaagacaaatatatgttacaataattgttccaagataactgaagaggcattggagctccaaatattacctttaatttaataaacctgattttgtagcaaggtttgccatcatcaatcaaaggtgctataacattttcacaaatacatctgacatgacgttatggtcgctagatcggtgagggactggagaggggtatcggtgggcaggaacaccggccgggggcctctgcccacgaccgagcaagaggagggttttcccttctaattcttgcctactttatttctcatccattgattacataaataggccagttggccgcccctatctagctagagatccttatctcctaaaaactctcaacaaactaactgataaccttcctagataatctcaactaatctcctaaataatctcaactaatcttctaatcttatctctaactatccttatctccttaaaactctcctaaaaactctcaacaagtactaactgataaccttcctagataatctcaactaatcttatctctaactatccttatctaatcctccttagagggcccatcgctgctgctaccgcagcccctccgtgggcctccttaggccctgacactacacccctcctggacaagcagctcgtcctcgagctgcagcatgacgagtgctcaaatactgagtctacttgacctaaaaccagacacctagaagacaagccttttacatctcggcttatcttattattccgaatctgaatttttttgttgaccccataagataaggcggacaccctccgcgcattggacttgtacgtgtgcagccacctggatcccatggacaccatcttgacgaaaggggagcacatggacgggcacctggaataggtcgcaacaataaccagcgaaggcgccctcgtggcggccggtagcggaatgtggtggcgctaagtagtgcgcccttgccgatgacgaggggggtgccttccttaccgccgctgccgtagagttgaagttcgtgtcccgcgggacacgtaccatgctcacacttggagatagcggcccgatgccgctgctgatggccatccgacagggcgaggtcgcgcccccgtgtaccgaggtcaaccgtgaccaaggctgcctcgagcatctgccggcgcatctcccgcgctctccgtcgtgcaaggaagccacgagcagcagcttgtatgcccacagccgccgacgtctggagccgtgcggacaacgccagccggtgctgctcatgttgcactgctaccttgatttgcagcagcccttgctcaaccttctggagcgtggcttgcatctttgcgagatcagcccttacgttggtccacaagtcccccatcgatggagctggtgattgctgagtcgtggctgcccctagtggcgtcgccgatggggacgaagatgtcgtcaacaaagatgatgtgacaaaatttggcgttgtccttgaagatgggcacgccggcgtccaggatgtggtgacaaaattggcaggcgatgctgcccatggagatagggacgccggttgccaggatggcgtgacgaaggtggcatacggcgcaacccatggagatggggacgtcggttgccaggacggcgtgacgaaggtgacatgcggcgcagtccatggagatggggacgtcggttgccaggatgacgcagcgaaattggcagcagaagccatgggatcagatcgaaacccaagctagccgataccagatgttatggtcgctagatcggtgagggtctggagaggggtatcggtgggcaggaacaccggccgggggcctctgcccacggccgagcaagcggagg

SEQ ID NO: 56998 - DNA, 922 bp, Zea Mays
tgaagcaaaagcaaatgcccaatgcgtgattataggagagcgtgaacagtacagggggtattgttcacctatttataggcatagggcgcagcctgtgtataattacatttatgccctttacaatgaactacaataatgacacagaatatcatgggtctttaagtcatttcatctttaagtcggttcaccccttcatcttgagacatgtcactgtgccgaagctttatagtcgatagcttcagcgctgctttgaagaggatctgccgaagttgtttatttctttaggatcttcggctacgaagcatacccccaacaccttcggttttgctcatcttgagtaagatgacgtacttcttcagtggcttcgtcaatcttcctttgtaggtcagctagccgagccatttttttccttcttcttttgcacttgctgatgaagcatctccatattcctgatctcttggtccaactcatcctcctagggcgttggactggtggccttcctcttctggcttcgggcctctcgaagagaaagggtctcctggtttaggtccagtggctgcagagcagcagcccctgtcgctgaagctttcttcggtggcatgacgaaggtcaatgcttgctaaaggtggtcgaagaggattcaccggaggtgggcgccaatgttggggacttgttctgaaatgcttcaagttaagaacaaggcaacataaagaatgttaaacgttaaagtccttcgtccttcgaagcattatttcccttaggatataatgattttcggacgaaggttatgaaggacataccttcataaacacaacatataataacgaagaaagaaccatatacaacataaaagataatataaacattcatgtattactatctgctcatttctattttattacaatggaaaaatagaaatgat

SEQ ID NO: 56999 - DNA, 82 bp, Zea Mays
caacactccaagaccaccttgaattttgggagaacacactgacacccaatccgccagatgaaatttcttggactgtttaccc

SEQ ID NO: 57000 - DNA, 256 bp, Zea Mays
tacgtgaattaaccacgtgatgcggagaaccagaactgagtcgaccacaagatggtgctgatggacgaacctgaagttggataagctgaacgagtgccaagacaaaggatggtcgccaagagaacgtcgtctaacaaacactaacgtagtgtttattacaggcaagccccggtgcatgcaaccccttccttgtgtttttaaataatttttacacactttaagtctagcgaaatgtgcattaggtttataggagttg

SEQ ID NO: 57001 - DNA, 2304 bp, Zea Mays
atatattactattacaaaccatgaacaagttcgaaatcaaaaagttacaacgaagagccagaaatcactaattaatacctatttgcccttcgggctctgtgcttttctcaacagcctctgctacctttctagcatcatggatgttttttcgcttttttgaataatttcttgggccatttctcggccgccattgtcccagatgtcggtgaaaaaatttccaccgaccaggcttgcttcggccgaggggtcttttatatcttcggaggacaaggcagtttcggattgtgctaaagatttcatatgctcacagcctttcctctccaaaatagtagcaatccccctggcgcccgagaaagcacatatgtctccgcggctattcaagatttcctcgaaagcctcaacttcgtgactgatccattcaatcgggccttctggattaccccttgtgaagttttcttcgctagagaatgcgccaacgctggcgaagctggattttattttcttagcacattctatggatttgtcatagcaccttttcttggatgcacgaagctcttcaacatttctttctaaatgatttgcccattgatcactaagttctcgttttgtctcttcaagtatgcgttcttctttagctctggctagctgtttccgaagatcctcaatttcgcgtttttgggcttcagcttgagccttagaagtagcttcgtcttcctttattttatccaccaatgtcagcagaattttatcttttttcaaagcttcgttcctcagcttaataacctctgttcgtaggttgttgaaagcaatattatagctctcgtcttctgtaacaccccaggatccacaaacatcctgaaatgctactaaactacacaactaacattcatatataaaattttgacagcatctcctttgaaaatttgcataaacgtggaagcaacagagtataagcagatatcatgataagaaaacataatagacattaataatcggctagcaatgagaagataaccataacgacatgaattgaattaactagtgtgcatgactagttaaagacaaacatcctttgacaagaagtttctaattaaatcatggttgtgcctgggcagcgttattatgagagtgaaggtggacgtgctgctactcccctcattcccaacatgaatcaagtacctgcattgagtaatgcaagagtgagatgaaacatctcagcaagtgaattgtttcgacgagatatttaaaccaaaaaaattgaattaatcaacattttaaagggatcacaattgagatcagaaatacttgtagatatagaactcaatagtcccaaaataaccaatgccatctcatttcctcgaacaaccacaataggttgtataacactttcctgcatcaacaatacctgcaaatatcacttcaatgtatgcatagtaatgcaatgtgtaagtcctctgccttcatacctcttagagtataaaaccacaccatctgcaaataccacttcaatgaatgcatatgaatgcaatgcatatgtcctctgccttcatacctctaagggtatgaagccgcatcgtacccctcctcgggcaacgtacgatgctaagttgtaccagtacggtcggaccataggtcacgacaaaacttcagatgcaagtgaatcatgcaatgtatatggcatgctacatttatcaatatatttcacttacttcacatacaatacaacctcaaataatacttcatttatcttcagatacaatacaacctcaaataatacttcatttaccttcagatacaatacaacctcaaataatacttcatttaccttcaggggtgtgaattaatctcacgagtcatactcgaatcataatcattatcaatatatgattgagcatcagtataatgcaagcaagtaaagcatcaccatagagttcaattatgaaagaatccaatacttttgaatattagagtgtaggcaatagaaataacaggtcagaacggaagcaaccactgctacattcacttgccttcatcgaagaagaagaaatgtactaggcatggtctggagtgtagccacctactagcgggcataaaacttagtacaaatatttcacaaacatttgccatcaatcaacaaaacacccctgcacttgaaaccaagacccagtggaaggactcccaccctgaaccacatgccatacagcagcaacgctgtttgttaattttgtatctttaaaattaaaacagcggtgatatcaaacaaatactctaggagtatctacacaaaatactctacaacttcag

SEQ ID NO: 57002 - DNA, 1393 bp, Zea Mays
cttcaatccacatgatccacaacctccaaaaacacataattatatggagaaacaaggatcccatccttacctagagtttccccaagaaaatctgcaatagatgggggggtagaacatctccttgatcctctcttcctcttcaatccatcttgctcctcctcttctcgatccttgctgcatgggggagggggagatctatggaggaggaagaaatggtgggcggctgccatgggaggagaggggacggccaaccaagggaaaaatgggggagggtggcggccaagagagggggggttggagggaaaaggggtggccccctagggttttgtgggagaatagaaccgacgccccagatgacttctgcttttgcatccaacggcccacaaccctttcccacatccacgcaccgaagatcaacttttggtcaacattttttttgggatattacactctaccccccttaaaaagaattcgtcctcgaattcggccactccaagcaaaacacccaaggtaccccatatagcaccaccattcaaaacatgggtccattattggtcttaattaacacaagaacttctaccttggactaattgtctaaggaaactacataacctgacatcaagcatgaaccaacatgcaatgaagctcaaagcaagtcatagatgcaatcaacactacaatttcacaccatcaaattgggacgcaactatacatcaacatcaatgtcttaagacaacactcttttatgaaggggtaatatgcactaagcacaacccttaccaacttcaataattaattttaattaaatggtgaaacatccacacccgacgaatgtataagaagatcaaacacctcacctcaaagcaccacgaaacaagtagttctattgaaacaaaactcctaatcttcctaaaccttattcttgccatcatgaaaagataatcatgtaatctaacattctttgcaccccgcaaaagggagaaaatctacagaactaatggagcaataaagccaacaagaagcgaataacattctgcacggcataggtcatcgaagaaatgccaaaagctccacaaagagcactgacagcacaataacacaatacttggttaaccaatgtcactatccttcatccaacaactcaactaagaaaaatatccaaaccagtgaggttaacctacacataatataagttttcatctactatagttcataaacttacatttcattctatcatacgatgcactcaaagtaccagacatacaaagtcaataataacccataatccttcacacatttgacaaacatattaagctgatgtaaaaaccacatcatctaggagtaggtgactagccacacccaaccaactctaggctaggcaatgacttccttc

SEQ ID NO: 57003 - DNA, 1936 bp, Zea Mays
caatgatagttggagctatccaccaaccgctcaacaacttaaattcaaattgatgattaccttgtaccccaaaacatgcaattcacactcctcttagaaacatccacaatcaagcatatataacaatattattgtaataaaactcaaccatgaaaaacatggtgaaaacaacataggcatacttgtatatcacaagcataataacaacttcattctcacaaatgaccagcgatatctatcgcattaataaaacaatatcaaaatttcagaaataaattatatcaagcattaagccataaacaacttaccacataaccgtaaaggaatagggaggggtgaggttattgtcatctgcacttcaaagacactaacatatatcaaagatatttaaacccatacccttcctatatgtgcgagtgtgtcaaatttatcttcaaattgccaagaatctaaagcctatgctttgataccaactgtaacaccccaggatccacaaacatcctgaaatgctactaaactacacaactaacattcatatataaaattttgacagcatctcctttgaaaatttgcataaacgtggaagcaacagagtataagcagatatcatgataagaaaacataatagacattaataatcggctagcaatgggaagataaccataacgacatgaattgaattaactagtgtgcatgactagttaaagacaaacatcctttgacaagaagtttctaattaaatcatggttgtgcctgggcagcgttattatgagagtgaaggtggacgtgctgctactcccctcattcccaacatgaatcaagtacctgcattgagtaatgcaagagtgagatgaaacatctcagcaagtgaattgtttcgacgagatatttaaaccaaaaaaaattgaattaatcaacattttaaagggatcacaattgagatcagaaatacttgtagatatagaactcaatagtcccaaaataaccaatgccatctcatttcctcgaacaaccacaataggttgtataacactttcctgcatcaacaatacctgcaaatatcacttcaatgtatgcatagtaatgcaatgtgtaagtcctctgccttcatacctcttagagtataaaaccacaccatctgcaaataccacttcaatgaatgcatatgaatgcaatgcatatgtcctctgccttcatacctctaagggtatgaagccgcatcgtacccctcctcgggcaacgtacgatgctaagttgtacctaggggtggtaatggatcgtgatccaaatgcctcttcacaatttgttaaggccctaaataatttgtagttcaaaaatgaatagaaacaaagcccgatcctaatccgattcaatccttaagttttatagtgtaaaatttgaggcccattgtcagccctagttgtaccggtacggtcggaccataggtcacgacaaaacttcagatgcaagtgaatcatgcaatgtatatggcatgctacatttatcaatatatttcacttacttcacatacaatacaacctcaaataatacttcatttatcttcagatacaatacaacctcaaataatacttcatttaccttcagatacaatacaacctcaaataatactttatttaccttcaggggtgtgaattaatctcacgagtcatactcgaatcataatcattatcaatatatgattgagcatcagtataatgcaagcaagtaaagcatcaccatagagttcaattatgaaagaatccaatacttttgaatattagagtgtaggcaatagaaataacaggtcagaacggaagcaaccactgctacattcacttgccttcatcgaagaagaagaaatgtactaggcatggtctggagtgtagccacctactagcgggcataaaacttagtacaaatatttcacaaacatttg

SEQ ID NO: 57004 - DNA, 205 bp, Zea Mays
atcttgcccctaacttcctagcaactattttcctatcctttctacaaatagcaaaggaagcattcaaagcatgatatattgtagaaggttcattaactctcctaggaacattaacaacatttctcctaggcatattgtgaacaacatttctcctaccaacatttctatcatgcacatagaaagaactagaagcaaacatgtcatg

SEQ ID NO: 57005 - DNA, 436 bp, Zea Mays
aaagttgcactttagggttttggaaatattatgaagaagagaaaaagagaagatatataaaatataaaggaagtttatatatttccaaaattattaccttaaggtcacaatataactcaaagataaatttagtacaagatttgaatgtaaagttgaattcaagttggattagggattagaaaaataaaaaaaaggaaaaaaaataaaagaaaaaggaaaggattacgtgttgggctggcggctcccatttcggcccattcttttcctgatcaacgcgcagcccaacttctgcccttccgcgccgacagctgggccccgggtgccagcctctccttccgcgcccgtcgccacgcgcatgtggagcagcccggtcaacgcgcgttttccctcctgctcgctcggcccgtgcgtgcttctgctcgctgctgacgctgtg

SEQ ID NO: 57006 - DNA, 424 bp, Zea Mays
ttttcagccatacctcatttatacgttgtcctccgccactgttcggaatacattcacttaactagcaccaggaacactgtccatccctctgcagtacagaacagatcaacgtacccctggatgtgtttttgggttctatagtatgctctatataaagttcatacagtcatacatgtttagcttagatatttatcattatatgagaactgtggcattattctatcccatttggtgatgttttcaagttagcaaagccttatttaaatatacttgagctaatagttagctgctaaaattaattgaaggtatccaaacagactagctagttcagctattagctacttttagacaattacctaatagatagctaattccactagcaattcttttagtcaactaactattatgtctagtgcattcaaat

SEQ ID NO: 57007 - DNA, 286 bp, Zea Mays
aacccggccccgtcctctgtttctccgctgcatctaatcactgtcgccgagagagagagatagagggtggcggtgtgtgccgccgggggcctccacggttgtggttagaaacgagtcgatgatggggcctcggggcatgtccgagatgtcgcgaagccatgtggcgtgtgggcgatgtggtggctgtgcgcgggagccctagttcaggctgaattcctcaccggaatcatgttggccgtagatcagcttcgattggaaacagcgttgtcgacaccacggatccaag

SEQ ID NO: 57008 - DNA, 221 bp, Zea Mays
cgatgtgagcggagagggccaaagaaggtgccccgatagaggcactaggaaggggggagatgacacgggctcgaccgctagggaggcgatcacaacacgtgggaagacaagcggtccaggcacgtgacggcccacctgagggtggagctcgacgcagtcccggagaatagggttccaggctggatcgaaggacacgaacatgccccggatgagctggtcgt

SEQ ID NO: 57009 - DNA, 67 bp, Zea Mays
aatcgtgcgaagcgaagggtgtggatcaaaacaacccacaagacgatgtcgaccgatgagcctgaag

SEQ ID NO: 57010 - DNA, 337 bp, Zea Mays
gaacggaaggattgttaggccggagcctggtcatggataacgacgactgaccatcggacaccgattcacacggcataaacatggaagaaggctgcttcattcccaacatgattttaacacttgacgctcctaaactaacactactgctgggacgccgttttctctggcacagaactgtttcgacgccattttttctttttctttttttttaaaaatatggctgctgtttcctagagcacaaaattgtttttgagtttttcctttacaaccatatctacagcatttttagggttatttttttatctactttattatagactgcacagactgcacgtag

SEQ ID NO: 57011 - DNA, 437 bp, Zea Mays
aatttttatgccaatattaatgtttgacaatagcatggtatttttatggtaaattttggcttcgcccatgatgcaacctaactacttgttagtccatcttatagtagtccatgcattaagactgtgtctaatagttgacctatatagtcatccaaaacattgtttttgtattgtagactatactattcgcagtgaagtttgaatataggtacaaggatgagtaagttgatagagataacctaacatcatatgacaacatggcttaaatctaaattctaaatggactaacgactagatcggataatccatgcccttagtgtgtttgtcgtattggagtcttaccaaaattaagtattattcatcatgatttttttgaactttagagctctagactttagtccatcttatattagagttttagtactcaaaagtataga

SEQ ID NO: 57012 - DNA, 476 bp, Zea Mays
tgttgtctatttcagaatagtaaccaaaggcctccttatagtcaaggcaagaatctagcattttgtatgttgaaccccaccttgttttaacatcaaggcacaacccttgtcctactttaacagaatattggttgcaaacttctacaaacttgtacatacgggttggagacctcttaaagtacttcactgtgtttctaagatcacttatcaatgaatcaattggttgcaacccatcattcacaaccaaattgactatatgggcagcacaacgaacatgaaagtacatagggtcaaagctagagttctttctagcaagaaacttggacttcagatttgtaatagcagaatcattactagaagcattatcaagagtgattgtcaagatcttatcctcaattttccattcaaccaaacattcaaaaacagcctgagctatgacaataccagtgtgtggaggatccaattcaataaagttc

SEQ ID NO: 57013 - DNA, 498 bp, Zea Mays
gctaatgatgggtcgcttcagggggtttgtcaattctatggagctaaaagagattcctttgattggcagaagattcacttggtcaaatcagagggaggtgcctactcttgtgaaattagatcatgttttctgctctgcagactgggaggatttttttccagattgttctcttcacagtaatgctactgctgtctcggatcactgtcccctaactcttagaattagagagggggcgtggggaggagaagatttcactttgagagtttttggccaaaaatcccggggtttttggaggtggtggctgcctcgtggagtctacctctgcaggatttttgtccatttgagaagatatcactgaagtttaaaagattagctaagtgtttgcagtcctggggtcacaaagaggtggggaatgtcaatgcccagttgggacttgcccgtgaggttttgcatcggctggagatggcgcaagatttcagatccttatctagggaggag

SEQ ID NO: 57014 - DNA, 467 bp, Zea Mays
ctgggttgctggggcaggaagacgaggtgcctgctgattctgcctctgaaattgacctcctgactgattgttctgacggttctgatactgatgctgagggtactgcctttggaactgctgatgctgctgagatggacgctggttttgcctgaactgctgaggttgattgcctgagaaacgaggacgattgctgcttccaggctggggtccattgatcttgcgcttacgatcttccatctccttgcgctttctctccatcatgattgctctatcaatcaggtgctggaatgtcgggaaagtgtgattcatcagttggtactgcagagggtcaaccaagcctctcaagaaacggtactgccgcttggcgtcggtgttgacatcttcaggagcatagcgagacaactgcagaaacctgtctcggtactcactgacagacgatggcccttgcttgagagccaggaactcct

SEQ ID NO: 57015 - DNA, 820 bp, Zea Mays
gctcgcagaggtgatgagggatggagataaggccgacaggcaacatggagacgtgcgtccagctcttgaaaagataatgccgacaacggataaactagaagctagaaacgatggggataagtctagaggaagataaggacgtgtgggagtaagacatgccgcttcagggattttggccacgtaatagtaatgctggcggtggatgaaatttccaaggaaatcaaggaacatacgagagacactttctgggagccatttttttacgtaggatgaggattagttggagatggacacttagaggtaagaaaattcagattttccttctccaatctttaaccaatagaataccccaaataagtaaaaatctgggatttgaatccgagcgagatgcaaacagacccatcaaaacaatatcaattttaatgtttttagactacgctaacactggtaggtatttttaggatcagacaaatttccacagttgtagacagtggaaccgattaattacgaatactcagttcggttttaattatcgtggtccaattaaatctcgcatcaacgcccttgtcgccgagcttctaataaaatttactcgggtcaaaattcacaagagtgggtcgagattccaaattaatgttccccttatccataaatttttaaacagacacaacactcgacatttcgcaaaataaatacgcgagatcgatatgacatcgaacttgtgatcctttcaaaagcgacgacacgcatcgtttacgtgggcgagaggctgtgcgctgtccagacaccggttaacgctcgccacacgtcacaatgccag

SEQ ID NO: 57016 - DNA, 328 bp, Zea Mays
cgttgcttcttgaggaggtgacacaacgacaacccttgtacttggagaggcatgcagtagacaacatacgtcatgggaggatggtcgcacataattgattgattaggtcgagagcgtgcgaggcagagacgatgatggtgaaggcaatgtcgaaggtggagcctctcgatcggtggtggtgaggatgagttggtgtaggtcgtcgtgcaggccttgaggtatggcacacacgtgcgtttcaggtacgtcgcagggcacgatgcagcatagtcgaagaagatgaagatgatggtgttgtcgatgctaatgtttaagatgcatgtggtcg

SEQ ID NO: 57017 - DNA, 231 bp, Zea Mays
atttatatagagtacatgacttagaagataaggtaacccaccgatacatatggtagtctacgagatacaacatctaaactactaaatgtactctaacatatatcattgtacaagacacaatatctaaaataccaaatatactctaacactataaagtcattgaacaaattcataatgcaatctacaatacaaagcagcatttttcatgaccatatgcacaatctattggag

SEQ ID NO: 57018 - DNA, 1447 bp, Zea Mays
cgtcacaaagctgcaaacgcctgatgaatacgattaagtcaaggctcggtccactcaagggatgtgatctcgcctcgcccgagcccagtctcgggcaagggcagccgaccccggaggatttacgtctcgtccgaggaccccctcaagcaacggacacaccttcggctcgcccgaggcccagtcttcgccaagaagcaaccttggccaaatcgccacaacgaccgaccgtatcacaggagcatttaatgcaaaggtggcctgacaccttatcctgacgcgcgcccttcagtcgactgatctgaagtgatcgcagtcacttcgccgctccactgaccagtctgacaagaagacagcgccgcccgcgtcgcttcgactacagccgacggtctccgtctcgcccgacccaagggctcggactcgacctcgacctcgaaagacatactcgacctcgacctcggaggagcctccgcctcgccctacccagggctcggaccgaccacgtcacaggaggggccatcattaccctacccctagctagctctggctacggggaaccagaccgacgtcccatctggctcgccccggtaaaaacaaataatgatggcgccccgcgtgctccatgacggcggcggctctcagccctcttacggaagcaaggagacgtcaacaaggactcgacagccccgacagctgtccttccgcaaggctccagcgctcctccgacggccacgacatcacacgaacagggtgccaaaacctctccggcagccacgacggcatgtacttagggcactagctcttctctgctagaaacgttagcacactgctactcccccattgtacacctggaccctctccttacgcctataaaaggaaggtccagggccctcttacagagagttggccgcgcggggaaggacgggacgacacgcgcgtaggcctctcgctccctcccgcgcggacgcttgtaaccccctactgcaagcgcacccgacctgggcgcgggacaaacacgaaggccgtgggtttcaccttttacgcctgtctccccccttcgcgctccgtctcgcgccgacccatctgggctggggcacgcggcgacaatttactcgtcggtccagggaccccccgaggtcgaaacgccgacaattggcgcgccagataggggcctgctgcgtgttgacgaacagcttcccgtcaagctctagatgggcagtctccagcaacctttccagcccgggacggtgctcggtttcgggagtcttgagttcatgtccatcgatggcagctacgacatgatactccttcccccgccacgcgacagcgacaatggcggccaacaactcgcccgccggcggcggaatcgacaacgtcttccccacgtggcggaagaacaatattcgggtttgtctcgtcgcctcccccgccgacggaggaggaggcgggg

SEQ ID NO: 57019 - DNA, 245 bp, Zea Mays
gtcccttgacctatctctgtcctattcattctttaattcacctcccgcatcacacatttatgcctaaggattgactagctttgttatccatgtccttgtttacctatttgggttggattattattgtttagctttatgctattgctcaaactctaatcaatgaacatgatgagattatctatgatacgctgttttcccttctcttattatgatgtcgtacttgtggtcttcaagggggctcgagc

SEQ ID NO: 57020 - DNA, 355 bp, Zea Mays
ctctcatgcatgttccaaggcgagcgggggcagcggaaggcgagcggcgacgtcgggggaaggcgagcagagactggaacctatgcgtgctacgatgaggatccacacagcagcttgagcttgcttctcgccttctctcgcgagcaagtttttcattgttttcttggaccgttaggtggaaggagccgtccgttagtttttctttaccgtttgccatgacacgggatgagaggagaaatttgtgactgtgccactcaattttggttgtctgttattataacatctcgtgtctatgattagtgggactatctatgtctatgatttatacgtccgatgatatactagcgaatggcga

SEQ ID NO: 57021 - DNA, 1084 bp, Zea Mays
tccacggtcggcagctcctgtacgcgtccctctctcttccgccgcccgcgcttgatatttttcccggcgccgcccctgggctcttaaagaggaattcagccgtcgctctctgcaggtgactgggcgcctggaagcagctgcatttttttcttcctctccccgacgtccttctcatggcgtcttccagttcctgctcgggtcccatggccgcgcgcagctccaggctcgccgtggccgcgtaaactcctgtgtcgtgctctgctcgcggagccctcctctgccggctgagctctctctctctccctctgcgctcccagcatctctctgtggctgcgcctagctcctgtccatccggcttcttcctgcgtcgcggcttccctaagctccctgccagaccttgctcgagctcgccgtgtgggtggaacctgcgtgtacgctgtcatcgacaccatggtcgtctccctgtgcgttgcatccctcatctccagccgacgcactaggaatgggtgtggagtatagaagaaagtgaagcccgaaatggcgctcgccaggcgctcaacaaaacatctgaaccaaagttcgtcgtcatcgttctagctgatatccagacgaattgtgatgtggtaagccgattcgttatgatgcgtcacgatgcccgatcttcacgacgtaggatcaatcttcagataactagcttcaaagaagccaagataacttgctgcaagcagcgataactagtgcaacctgacaaataaaactcgaagtcaaccaccgtctttaaccggcagcctgaatcgaggattcgcccaaccacactctcaaagaaccaaccaacacaacctacaatcaatcgaggagacctcgaagggagtaggagcaccaattgggagcggatgaagccgccgcttctgcaatcccgcgaaggaattcacaagagcaaaggggtagagatcactctcaatatttgttagcacacagctgaacaaaggggttctgttttagattatcataagctgccttacatcttagacataggggggtatttatactagtaacaaccatccttagcgaggtataaacacaa

SEQ ID NO: 57022 - DNA, 102 bp, Zea Mays
ttcctgtttatatgcattcatgtgcattatgcatatcattcaggtacgtgaattaaccacgtgatgcggagaaccagagttgagtcgaccacaagataatgc

SEQ ID NO: 57023 - DNA, 270 bp, Zea Mays
gacgaacgagaggccgcttgatgaaggcgtccacggcgtcggaacacgactgcacggggcagcgcgcggccggcgacgacggaagagagacgcggagcactgagttgccaaagcccagacctacgtacgtacgtatttatgcactaaccggaacgagtccgagtacgttggcctatatgggatatgcatggcatccgtttttttaatctactataaacccgcatcggactcttgctgccggttccaacatctggtatccatggatgcaaa

SEQ ID NO: 57024 - DNA, 503 bp, Zea Mays
tatgtttataatcttgtcccggacccctcaaaagtcaggaacggccctgataggacggtggatcaacgcttgcagaggaatgtatagaagtataaaaaggtgaaccaagtgacaaaggcaccacattgaaaagctctaggtgatggaatttacaagtatctgcatatttacattgtcttgtttttaaataatatgcacagtccttttcattctaatgtggatatcctaatgtgtttacaagtagacttgcatgtcctaatgtgtttaaataatatgcatcgttcttgtttttaaataatatgcacagtcctttttaaataatttacaagtagacttattttcagtaaagcaaacaaacatatgtagaagacgacatataactggcaacgcaatatgaaccgagtaaagtggatatccgaatgtgtttagctgcaacccccttgaattccagcctttttcctgggatgggtgaaatttgcaagtaggaccaaacttgcatgttt

SEQ ID NO: 57025 - DNA, 311 bp, Zea Mays
ggaaaagagtacagccagctcctaattgttcaagtgttcattaagttcattacatcagtagaaaagtaaaacatagcagacagaagtaaactaagaagagtccaaccaactcctaagacctaagttgagggaccagtttccacatctttgtctttccccctcttgtttgaactatcttcaacatcaaggtacatgttctcaaaggttgattcgagttccttggtctccttctccacagtattctgcatatgcttatctgccagctcccaatccttaatacaagataagacctcaaccatatctgttgtaag

SEQ ID NO: 57026 - DNA, 409 bp, Zea Mays
ctaagtatcaatgttggtgtgacgcacgcggggagtcctcgtccgaagggtcgtctcaggtgccttgctcctttaaagatgctcttctttcctgtccaagacctactgtggcaccctctcgtccctctgctcccccggggttcgctgttccttcaacgactgtgaagacaagtttctgtcggattcctgaagctctcagccaacctggggtggggaggcagagtgggggtggctggcaggtggttgagcgccggaagcagaatcgtgttttgccttgctctcgtcgagggtccccagtggatctccgaggcaagtgttttaactgtttctctgcctcccacttcgctggtgtgtgtcatcgccccactcgttgttttcggtgtctcaagtttggtcaccaggctgcgtg

SEQ ID NO: 57027 - DNA, 404 bp, Zea Mays
cgtcgctgctccatggctggctccctgagctcggcccctggcttctatgctacgcgcgcgcggtttcctctctcctcccttcatttctcttcagccgtcgcgccctagttctctgctcggccatggaggtcgcggttccctgatctcctgctcgcctggccacgccgagctccatccagggccggagtctctttgctcggatttcgtcgggcccgcgagctcccctacgcgctcgtactccagctcggttttccttcaccgcggctctccctgacccagcttctctctccccatggccacggcacccctgctccctggtacagcgcgcagcttgcctgctcggctgtagccaccgcgcgttcccctgccctcggcttcctgcatcgcgtggtcgcacccctccc

SEQ ID NO: 57028 - DNA, 531 bp, Zea Mays
gtcgaatcaaaccaccttcgagggggttgttgatagtttcatttggcatatcccagttggctaccaatggccatatcctataggccacatgctcttgaactaggtctcttgtcccgatgaaggaacagactatgccgaaggcctttcggcattcttcggctgcttcatcaatttccaccttcggcttctggaggccgaagcgttgccagatagggcgcatgataatatctttaatgtcttctcgtgcctttaaatcatttttacataaaaccattccttcatccagtccctaggccatcttttccggaaggttggcatggggcagctcgagccagagcgagcgacgaagctatagcagccaaaattgttatgatattgttctttgccccagggtttcgtctcatataacaattcatgcatactgcagaaactttttgcatttggctccaagccctggctcctcatggcccagacgaagattcccattcttattattgcttcgggagtaatttgatgaaggtagacctgata

SEQ ID NO: 57029 - DNA, 858 bp, Zea Mays
cttacatattatttagcatttaaatatgcgtacacataagaagctaaaacttgtcggtcaaaatcagcaaatagcacgaattaataaggaaaaacagtatataatataaccatatcataagcttataataaagttgacaaaactcaattattacaatctaaatatttgatttaaccgaggtcaattaccatgagtacaagaatcaataccttgcttaagttttcccttagtcaaagaaaatagtcacatttgatagataatatctcttccaattgaaataccatcataccatataaagtagtgctaccacatttctgattatagtccaagcaatgagttatagaaagataaatggaagtttattgtcaattttgaggtaaaccattggcttaataaagcatccagagaaatacaattttaggctggcgttactctagtttgtgcatacatgatccgggtagccaattgttgtactttattttaaaatcatgtaacgacgggctatgtgaaatgcacttttaccgtgttcaatatatttgatactttctcgaatatttatcatctgctagttcattttttaattaaatcgcgacaaataaaaaaagaacggagcgaataatttttgtaggatttcaatatggcagatgtctcatttttcatcgaagtacacaaccggaatccggctttttgccgagtgccaaatgatttgccaagtgtttttcggcgcatgccgaaggccaaacaaaaaacactcggccaagggtttctttgccgagtgtttttttttgaaactcggcaaaagctctttgctaagtgtttttttccaacactaggcaaaggtaatttaaaaattgtatt

SEQ ID NO: 57030 - DNA, 408 bp, Zea Mays
gttgacgccaaacatcttcgtgccgctctttttttgtgatgtggtacctccttgcttttgtcatcgtattgcttgcccagccacgttgtgtgtagccttattgctgtcactcgggggctgctcgatgaaatgtctggtatagagttgaagcgtcatctgatcctgtcgtcttcatcgtcgtcgtagcaccacctcgacagccacgcaccaattgtcaaacttcaccttgccgctcttccagcctcagcctatggttgcacgccttgtgcctcacgttcgatctgctcgacgcgggcatgccttcgacggaatctactttgttgtgtttgtcgtctgtgtgctactcgactctggggagtgggtctactctcttttgggcttttggttatgtttatggacaaggtggtg

SEQ ID NO: 57031 - DNA, 1260 bp, Zea Mays
cattgacctttccttgaaacaatttctatgttgtttgtgaaagagatcaagcaacatctgtcatttccgttggatcaaaaggatataccacttacatgtgtggtcttatttcttttgatcatggtagtgactactcatacaagtttcctttgcatcctttgtgtaaaggtgaagccttggagctttttagtgttggaaaacaactgattagctctcaaaatagagatccgtttcccctgctgctgaaatgcaggagtttgttcattcgctttcttaattaatccatgtattccctaaccaagtggataattcatcttgcatgaagaaacggatgcacaacatgaccaaatggatttttacccgaatgcatgaccttttgcttgcaaatgtgaactctcaaccccttggcttaccaatggtactgagaggatttgcttaatgtcaaaagtagttcaacaagttggttttgactaacttgtaactgcccgttgaacgaatgctgagtttagagatcgttttatcgagttgtctaaactcactttggttcaacccaccacaaagaaagtacttaccaaagtcaagttaagttgaccagtaaccacttaattatcactctagtcgcgcctcgaccgtctcacacatgcttttcctgcatgtgtgatcatgccgatccatgactagtgctagataaaatggactggttgcaaagttcgcatctatagatccctccactggtgatttttcttgaatcaatatcacctttcgtggacttggattccctggctaacacgagttgaccgtggtgttattcaacattcacacccgtctcgtgtgctatgaacttactgtaaccacttgttggtaaacctcttcttatgtgttttacccaagatggtgcatctgattctatttgggtaaagttacataattgccgcccaacagactcagatagtacagtgtcatcagaaaaagcaaattgcacacctggaaccttatgtgttcttctggtgggcaaagatgcaagttgaaattgcacactatgtggctagatgtgacacttgcaaacgtgtcaaggccacatatatgaagactgctggtccattacagtctctaccaataccaacatggaaatgggaagatattgtatggacttcatcgtgggattacccaggactacaaaagggtatgactctatctgggttattgttgattggcttacgaaaattgctcattttctgccagtcaagacagattacccag

SEQ ID NO: 57032 - DNA, 1229 bp, Zea Mays
ctacttgaaagtttcaccaatgaagggtgtatcgcgtttcggggttaaagggaagctagcatctaggtacattagtccattcctggtgattgagcaatgtggaccagtggcgtaccgacttcaactacccgaaacattgtctgctgtgcataatgtgttccatgtgtcacaattgaagaagtgtcttcgggttcccgatcgaaccattgaagtaacgaatgttgtccttgaaccagacttgacatactctgaacaccctattcgagtcttggaccaaaaggacagggttacccggagaaaaactctcaagttttataagatacagtagaaccagcattcggaagatgaagctacttgggaaactcaagacttcttgaataagaatttcccaggctttctagcctcatataatttgtaaagtgtatatagttattgcaataaaggaatgaacccccacaccacccctgccttgtaccagaaataaggaaatgaaagtattccgcgtttcctttttccattacttaccctaggacttttaatctcgggacgagattcttttatggggggaaggatgtaacacccctggtgttactataactaaaacttgagcatgacatcataagcattggcattgcatatgttgatacacttagagtgcattcactaggtaaaaatttcaaacaagttgtattgctttagtgttttgcaaataggaccctggataggaagctttaaccctaaataggcattaaaggggtaagacacaacccaagttaagaaaacctaaaggctttaagggaaaagtcataaaatgaccctaagaataaacttgaatcacatttatacccctaaggtaccaaaaaccctaattggagccctggaaaaccctgaaaccaaaacctaggggcttatgtgcaaaagtgatgaacctttggactaaagtgtaaaaactactatgtttaaacatataaagtcatttggttcacaaatatgtgaatttgcaagttaaaccctaaattttgggcttatttgcaagaatcacctcttaagcactatagagcctaagtctgaaattcagtttagttggttcaactttggagccctgtatcttttaaaatatagggattttgcccaaagtgaccacaacaagattgtagaccaattaatggaaaacaactttgcttaaggttgtaagctcacttgttaagaaaaatccagagatatttaag

SEQ ID NO: 57033 - DNA, 1353 bp, Zea Mays
gcaagctatcgcacccactctcatctcttttcgttcaccgtagcgctgcaatttaggttttcccccaaattgaaactccacgccgccgtgatagccctcccgtggccaggcgaagctggtatgattatgcacttttgaatcattgttttagtagctctgggcacccgtggtgctcatcgtggcagcaaattgatctattcagatgagatcaactgggaacgtgagctcgacgccccggtttccgccctgagcgtgggcagaacactttcttggagcgccattcgaaattgaggatcgttcttaggtcaccttaggtccgtaaagcctctccgatagttagcttgaacaatcttcgccgatcatggccggaacgaatcacggcagggatgagcggggagcgtgccgtgaccagggaggtgtgtggggaagaaaagaaagtagagggacctttccgtaaattgtcagtgaccctggacaacagtaaagaaaccagattccagttagtaaaaaccctgagggcgttttcgcaaatccgccagagcgcacgcgggcgcgcgtgggcgcccccctgttcgctgtgctgttgggccgactgggctagattcagcccaacgctatttacactttttcctttttctttttcagtggagctttggaaatatgtagaaaattacagaaaaatcctaaaaatatgagaccaattttcctaggcttcttattttccatagtatttaataaaaatagtttcatgaattttagtttaaataaggaatttcaaggcatttaaaatagcttaaatcaatagttctggatttttagaaaacaaatggtaattccaaaaatgcccaaaatttttatatgagttttatacactatttagaggccttgggtagaatttgggttgatttggaccttgtttgacacttagaacccaaaaccaccccctgccctgtgaactcctttaccgactccggaaacccaaagttctcggagttccgtgaaggaaagttgtattcaagacatagataataagtttatattatctttgcattctcatgagcattccatggcattcattcttatatatatatacctaaatggttatatttagaaaacggagaagagaatgaagtgactgaagagaagacaccaccacctttggaacctcaggcaaggacttggctctacttcgacatttgcgagtccgagcctgactcacctgtgaacgaaggcaagccccggtgcatgcaacccctttccttgtattttaaatacttttcgcacactttaagtctagtgaaatgtgcattaggttcataggagttacttgaaaccctttgatgcattgctttc

SEQ ID NO: 57034 - DNA, 572 bp, Zea Mays
agcaatgcatcaaagggtttcaagtaactcctatgaacctaatgcacatttcactagacttaaagtgtgcgaaaagtatttaaaacacaaggaaaggggttgcatgcaccggggcttgccttcgttcacaggtgagtcaggctcggactcgcaaatgtcgaagtagagccaagtccttgcctgaggttccaaaggtggtggtgtcttctcttcagtcacttcattctcttctccgttttctaaatataaccatataggtatatatataagaatgaatgccatggaatgctcatgagaatgcaaagataatataaacttattatctatgtcttgaatacaactttccttcacggaactccgagaacttagggtttccggagtcggtaaaggagttcatagggcagggggtggttttgggttctaagtgtcaaacaaggtccaaatcaaaccaaattctacctaaggcctctaaatagtgtataaaactcatataaaaattttgggcatttttggaattaccatttgttttctaaaaatccagaactattgatttaagctattttaaatgcctt

SEQ ID NO: 57035 - DNA, 560 bp, Zea Mays
actacaccatggaggaagcgtggggatagatgcttatgggaatgttagttttgatggtatgaagatcgtgaccatgttgttcgatgaaagaccatcttttgacaagattttcgctcgagcttgtgaggagtttagttgcaacataaacgaccctagaatatcaattcagggtttgttgtaccaggtcgaggagccattcacacgacaccagcgtgcgtacgtggagtactcaaacgagctcgactcacttactccttcaatggtgagttgttcacttttatcttttttcttaagcagttggtaaaatgactataaacttatatgtgctttctaaaacttttctaggtgacctggcaaccgtatcttgatccatatttcgccagcatacagttgagcagcatgtgctcaatagacgaggacatctacctaatgaggtgtcccctcatttgtttttatgctgttgagtaccacttgcccccacagagtttctcgacagtttggattgcgacaggagtttccggtggagcccttctcgacttcaatagaacttcataagtgag

SEQ ID NO: 57036 - DNA, 234 bp, Zea Mays
atgaatgggaacaacagggggatcttaactatgtcaacgaacaggcacacacaaactaccactttcgaaggtatttgatttggtatgctggtgtgactaggtgcaagcttaagggacagtggacaactgcagactatgcgaagcaagaatcgtcagacgacgaagacactgcgttcgacatagctgctcggcacgggtcccaaatttgaggctgctccaatccttgacagagtg

SEQ ID NO: 57037 - DNA, 286 bp, Zea Mays
gcgggttgggccgcctgggccgggggagagaggaggggaagtgcgggcgcgcgtgggttgggccggattttggcccagccgagggaggggggagtttttctttttctttttctttttctaattcctttcttctcctttttctatttttgtttcttttttattccttttttctttggagaccaaaatattttctaagtgatcttgagtgagaaacatagtctatgtgaggtgctctaattatttcaagtgtatgcacatgagaaggggttctaagggtagggttaag

SEQ ID NO: 57038 - DNA, 1892 bp, Zea Mays
tgcaggtacccttaggatgattggttgatggtgtgacttagcctccatccctgccaccgggatagatggtcgagtgggttaccgcttccgcaggagaggaccaggaggagtagcgtggccaggcttcgccatgttactcgggttttctccgttagttatttccgctgcattaaaatttatggttattatttctgaaactccgataatgtaatcactaatggtacttcttaaatttgtggtattatgctttattgtatttctctgtgcctcaccttcgagtgagctaatggtattcgatcctggttaagtggctttatcggactagatccgagggactgacggtttattcctattaaagtgtggtctagcctctaaggcgggacttaggcacttaagttggaataattcgggcggttccgccacagcattggtttccaacagggaagcaatgtcaagcttaatgcccccaagagattgtccaactttgttaagggcaaagctcccatggttcaggatagtgtgggttacattttatatcctgctaactatcctgagcacaaaatcaggaaaattcatgctagaaaacctcacactgtttctcatcatgcatttatgtataaaaatgaggcttctagctctaggcaatcaactcatgttaaattacctaaaaagaaaactcctgctacatcaaatgagcataatgtttcatttaagacttttgatgcttcatatgttttaactaacaaatcaggcaaagtagttgccaaatgtgttgggggcaaacacaagggttcaaagacttgtgtttgggtacccaaggtgcttgtttctaatgtgaaagacccaagatcgtttgggtacctaagaacaaggcctaaatttgttttgtaggtttatgcatccggtggttcaagttggataatcgatagcgggtgcacaaaccacatgatagaggagaaaatgatgttctcctcctatgagaaaaacgaagatccccaacgagctatcacattcggggatggaaatcaaggtttggtcaaaggtttggctaaaattgcaatatcacctgaccattctattttcaatgtttttcttgtagattctttagattacaatttgctttctgtttctgaattatgtaatatgggctatgaaagttgcctagagggggtgaataggcaagttaaaactttttcaacaaaaactagaaacaaactgggtaaaaccggctcagtcggtgtcaaaaccggttcaaccggtttgaacgagctcaactaaagaataagatataaaatgaattgatctcgatattcacctagttaactttggaaatgagatgttctagataatccacagggttcaaagtagtagatctgagaagggcacttctcaaaatccacacaccaaaaagatatgaacaaatcttccatggaagggtgagagaacgaagaacatgaataagcacaatgaacaagaacacaagagacacaagatttatcccgaggttcggtcacaccaccaaggtgccctacttcctcgttgaggcgcccacaaagagccgggtctctttcaaccctaatcctcccttcgccgaccacaaaggtcaagcccacaactaatctttgctcaacgagcgggtaatacaaactttcttgtggtcttccacaagatttggagactcacaagagacacctagtcgtctaggagctagaagctccaagagtaatgaatccacaaagaactcgatgtagtaccaaagctcgaatgaagaagagcaagagagatttggagatgaagcaaaaaaaccacagctctcaaactcactcaaagatttctctccaaagatttgaaatggggaggcaagagatgtgtgagagagagtgggaggtgtt

SEQ ID NO: 57039 - DNA, 276 bp, Zea Mays
gtttcctccccttaaatatgtgcatttcaggaaataacacttttgtactcaaatgccaaaagcacatatttgggtcaaagtatggagacaacttatatcatactattcatggggtgcagtgtgtcataaaataaacgtgatgctcatgacatagtatgcactcatcaattttctacatcttatgtttttcttatgacttccccttttgttaattatttctcccctttttaaagtcttctaacacttagttacataagactaaaggtaagctttaat

SEQ ID NO: 57040 - DNA, 835 bp, Zea Mays
atattacactaagttctcctcaagttttagtgtgcacatatatatgaattcaattgatacttgttgagagtacttatttgcaacttaatgtaccattggcataaaaggtgtatcaattgaacataatcatgcaacataaggaatatgtgcactatttaatcaattaagttctagaaaggagaattcataagctatgctacttagacatttgcaaaccaaaagaatatgatacatgtttaccaattttagatgacgttgaagtagcatatacaagagaaactcattctcctatgaaatgtataaaagatacatttattggagcaaagaatctttgatacccatcaaatttgtagtggaagtgattgtctttgcccgaaggttcttttctaatttgagactacacatataatagacttgaaaatgaagttagtctcaaagattcaaattataaaccattctccccctaaatgtgtgcatacaagtgatgaatactcgttttaccttatgcacttggacttgtgaggctaggggaataagttctataatttgaaccttggtacaaactgtgacaccgcagtgtcacctagggtttctttcaaataccaacccaagaaccattatttcatgtgaatcaaagtaagcatgagcatcaaattaacataagtaagaaagaatccaccaagtatatacttaaaagtatcatgatcaaaacaattaagtctttaaaaaaaagggtaagaatgtgcaaccctaataaaaaccctaagtgagccctataagcaaaatgcaagaaaataagaaaaaggggatgaaaagtttaaaattttgacttgag

SEQ ID NO: 57041 - DNA, 1490 bp, Zea Mays
cagagaacttagaaaacccataacttgatgaatttttaataaaaagttgtcaaactaattttgctagctcctgaatattatgaactatcatttaaaaatgataaaccctatgctttctgttctgaatttttgagtttaaaattaaaaacagaaacccaccaaacctagtttaattaaggaaaattagtttttcttctgtgctgaacttaggaaaatttgtagatgatcaaacctcatttagacactgtttaaaaatagtaagaaccccagcattagaaattatgatgtagttattcatttaaagctatttttcctaaaacttagagaaaatcagaaagacattggaaattattgaacagtgattaagattatttttcctactttgcttatgtaacagagaacctaggaaaaatacagagaccattgatttggaccagttttaaattaaaatgttttatttagccttatttggactgaaaatcaattattagagtagcaaaactataaccaaagtaaataataaaaatccagtgggcttacaaccaccagagccccactacaaaaataaagagcacctcagcccaactttttaagtaaggaaaataaatacaaagtgataataaggcatttttcaaataaatcatgaacaacccctattaatgtgataatgggcaaccaaaaattagctaagtccctgatgagataaactaccagagaaaaatgcaaacccatgaaaaagaagcaaactcacacctattgctagtgatatgtgagaaaggccacttaattcaaataatgcataccacccttcccttaagcaaaaagatgccaaacttcaaaatgattgctcttgcacaaaataataaccaagaaaaataagaactctgttgtttgatatttttcaaatatagtggtagtagaaagcacccatttggctagaaacttgagaaaaccatagaaaaataattaaaaggtattaatgactagaaatttgtatcaagtcatgttataacacctaaaagccagaaaaaatgagttttagagaattacccactgttaaataatagttgtagttcaaagcaccccttctgccctaaaatttggtaattttgtccagagcaaaccattcactttctgatccccaaattttgagacagagaatcctacaccagtacccagccactgtaatttttgcagaatttttagaattttataaaatcaacttgtagttcaaacctactccaaaacattaaagagaataaaagaaaagggaagaagaaataaacctcaccccaataagtctacttgagaacttatcaattctccctaagacttaaaaagaattcagtggaaccccaaaaattaaacctactacttaccttagctaagtttaaaccaatttaccaagtataccacccaagggtcttacataagtaaagttaactttgttgaactcaagaagatcatacacctttaaagttgtaatttct

SEQ ID NO: 57042 - DNA, 686 bp, Zea Mays
gttttatttagccttatttggactgaaaatcaattattagagtagcaaaactataaccaaagtaaataataaaaatccagtgggcttacaaccacgagagccccactacaaaaataaagagcacctcagcccagctttttaagtaaggaaaataaatacaaagtgataataaggcattttccaaataaatcatgaacaacccctattaatgtgataatgggcaaccaaaaattatctcagtccctgatgagataaactaccagagaaaaatgcaaacccatgaaaaagaagcaaactcacacctattgctagtgatttgtgagaaaggccacttaattcaaataatgcataccacccttcccttaagcaaaaagatgccaaacttcataataattgctcttgcacaaaataataaccaacaaaaataagaactttgttgtttgatatttttcaaatatagtggtagtagaaagcacccatttggctagaaacttgagaaaaccatagaaaaataattaaaaggtattaatgactagaaatttgcatcaagtcatattataaaacctaaaagccagaaaaaatgagttttagagaattacccactgttaaataatagttgtagttcaaagcaccccttctgccctaaaatttggtaattttgtccagagcaaaccattcactttctg

SEQ ID NO: 57043 - DNA, 197 bp, Zea Mays
aaagagagaggcatgtagtgtatcaactttaaaaccgcgcgcttctgatgatgccctggtgggtccgagactttttggttgtggaaggcaggatcggttgctgtcctcctgtccatttcctccgatccctccctgtccctgttgctaggggataaagtttagcggtgtcgatcaagaaaaaaaaagaaaagaaaaaa

SEQ ID NO: 57044 - DNA, 926 bp, Zea Mays
ctcttgctagccttagaaatgaaaatgaaaaattgattgctaaggctaaagattttgatgtttgcaatgttactatttctaaccttagaagtgaaaatgatatattatatgctaaggttgtagaattaaaatcttgcaaaccctctacatctaccgttgagcatacttccatttgtactagatgtagagacattaacattgatgttattcatgatcatatggctttaattaaacaacaaaatgatcatatagctaaattagatgctaaaattgccgagcatgccttagaaaatgaaaagttaaaatttgctagaagcatgctctatagtgggagacgccctggcataaaggatggcattggcttccaaaaggggggacaatgtcaaacttaatgcccctcctaaaagattatctaatttagtaaagggcaaggctcccatgcctcaggataacgagggttacattttgtaccctgtcggttatcccgaaagaaagattaggagaattcactctaggaagtctcactctggccctaatcatgcttttatgtataagggtgagacatctagttctaggcaatcaacccatgcaaaattggctaagaagaaaactcctaaggcatcaaatgattctaacatctcatttaagacctttgatgcctcctatgttttaactaacaaatctggcaaagtagttgccaaatatgttgggggcaagcacaaggggtcaaagacttgtgtttgggtacccaaagttcttgtgtctaatgccaaaggagccaaaaccatttgggtacctaaagtcaagaactaaaattgttttgtaggtttatgcatccaggggctcaagttggattatcgatagcgggtgcacaaaccacatgacaggggagaagaagatgttctcctcctatgagaaaaaccaag

SEQ ID NO: 57045 - DNA, 545 bp, Zea Mays
gtcatgaccaagattaccagcagtttatatccttcatgtagtaggggatattttgagggtctctatcatgcttgatagttagcccgacatactcgtctcccatttattacttctcgggctgagcaggcttttgacctggttcattgtgatctctagacctcccctgtacttagtctctctggttataaatactatttggtgattttggattattttcccattttctctgaacttttcctcttcggttgaagttcgacacgttcaccatcctcacacacttcttcgcctggtttctacctagttttgttgcccggtccatgccctgcagtgtgataatggtcgcgagttcgacaaccacgccacacattctttctctcactaatggtgtccagttgcgtctctcgtgaccctacacctctacccagaacggccgggccgaacacatgattcgcaccaccactaatatgatccactggcttctcttccaagcgtctctccctgccagttactgggtagaggccctgcacaccgccacacacatcaac

SEQ ID NO: 57046 - DNA, 347 bp, Zea Mays
atcaatccattttaaaaagaagtactagtaattaaataataattaagtattatagtaattattagtctaaaaataagtacttcatttataaatatttttggtaattttttttatgatttttagagttctttaaaaatgaatttcggaattaaaaaaaaaaagaaaaaaaaacctaaaactaccccagcaggccggcccacctagaggcccagctcccaaaataccccaaaccctagcttaggcacgcgcgcgccctgggaagaattcccagccgccgccgcccctgcaagctccctctctctcctctattctctctcccgccgcaatctctcctttccttccctctt

SEQ ID NO: 57047 - DNA, 215 bp, Zea Mays
ataaagataagtaatataaaggattagagctgtttgtgcaatggctgcctcattaaaaacctttctaggtaaaaactcactcctcgtgagaaaaccctagaaaggaaaaaagagtacagcccagctctgatttaataagttcatgtctaagagtacagtttacatcaccagatgtccagatcactagaatagagtaggaataggaagaatagtag

SEQ ID NO: 57048 - DNA, 119 bp, Zea Mays
gtggagatagagaagttgcctgcgcgccgagctggtttaggagggtttagtagcattcgagggagtgatacgtacttattatcggcgtcgatcatcttgatggcgcgtttgctatgaac

SEQ ID NO: 57049 - DNA, 137 bp, Zea Mays
ttcagatggaggttacgcgtatcccaaatccatccgcgtactctctgctgctttgctgagcgtcaagtgtacagctgcatgagctgtgtgttgcggtgtggatgatgttgtaagctgccgactcgtgtcagtacgcg

SEQ ID NO: 57050 - DNA, 439 bp, Zea Mays
ttttcgtaaatcctcacgtggctgcgacctgatcatccaacaacgttcagaggatattacaagcgtttacttacaccttctcggcagtttcctcgcgacggagaccgaggttcagtggggcctgacgatcctgacagctccaatgcctaccgccagttttttttttttttttttttttttttgttcttggcatattccagatttccgggcctttcacagtttcacgcatcgcaacggcgacggatagcgacgcggtactcgttgacgcttaaacgcttgctacagggaggacgacatcacgtgagaaaccaatagagacacacctatgactctcctttgttggattggaaaaaaaaaacagagagagaaattctttccatgcacagcacatgccactctcttctctcaggtaactgtagttagagatggccaaacggac

SEQ ID NO: 57051 - DNA, 245 bp, Zea Mays
ccttaggatgatttgttgctggtgtgacttggcctccatccctgccaccgggatagacgaccgagtgggttattgcttccgctggagaggaccaggaggagtagcgtggccaggcttcgccatgttattcggttcttctccgttatttatttccgctgcattaaaatttatggttattatttcttaaactccgataatgtaatcactaacgatacttactaaatttgtggtattatgctttattg

SEQ ID NO: 57052 - DNA, 336 bp, Zea Mays
caatgatctattgtaacatcccagtttttaccccaagcttagaaaccctaaaactcctaacccccttttttaattatctcttaaggcccccacctcataagacatctcattcatcatatgcatacaccatggttgttagtagcacctcacatagaatatttttgacacccaagaaacatagataagtatttgttcaaaagaaaaggagattaaagaaaaagagaaaaagaaatagaaaaagaaaaagaaaaagaaaaaaggaaatctcccccctcggctgggccggatccagcccacctctcctccccgcgcgctcgcgctcctcccctccctcgc

SEQ ID NO: 57053 - DNA, 518 bp, Zea Mays
gaaccggcggtcatctccgtgtccgacacatcctcctcttcgacggtgtacgcctcgtcgtcgaacaggccgagcgattcgtcagcgaaccgctcgtcgacgccgtgctcccacggcgcgggcggcgaggcatcgggcatctcgccggtgtcctcctcccccatctcaaaagcttactccataaagtttgagaaaaatgtgaggaattggagagtcactggagaaatgagcaaggatcaaacacaatggcgaaaaaatggggttctggagacgacgatggaattgggggaaaattatgcgaatctcttgatcaaaaaatttgcgatttgggtatgaggccggggagaaacggtcggtgtttgggggaaatgctagtccaagattaacggtggtggcgcggtgcatggcgtgggagtggcggaggaagagagaaaaaggaagcggccgagcggggaaggcgaagaaatggcgtcgctgcgggcgcgcgatcactggtcgcggctgcttttttagctagg

SEQ ID NO: 57054 - DNA, 267 bp, Zea Mays
aattttgtgagaaaaaaaatcttattttataaaataacaatgagttgttaaataattatttttggagtatgcattttgatttgtaggtacttattaaaactccattttattgatttccttttcgtgcagcccaatccatttgaataatagttttttttactaaaataattagtacttttcaaattgagtattttatttacgaaagtattttttattcatttatatttatcttaagttgaaatagagaaagaagagcaataaaaaaag

SEQ ID NO: 57055 - DNA, 226 bp, Zea Mays
gaaaacttgacatttgcttggttttatttcatctgggttgaaacttgaaatagttccttgagatttggatcaactttgcttcccgttgagtacctgctatcacaatttgaatctggttttttattcatgaacacttcatttttttgggtttccttgtagacaaacgtagggagatgctactttttttttagagaagtgatcatggaccaaatcctatagatcgttt

SEQ ID NO: 57056 - DNA, 292 bp, Zea Mays
agaagagataagtccagatcaaagagacctggacagattacaaggcctcctcagggaggccagaaacacaggaaactgaaaaaatccatcaaactcaacctacaactccctagtctccaggaattagggcagcaaggtatgaaagacccttagccccggccatctcccaagactgcctctcctccctagctaacttaattgacagatctaaactaggaatacaaccatcaaaaacacaactattacgaagcttccacgttatccatgctcctaaggccacaagagaattaag

SEQ ID NO: 57057 - DNA, 614 bp, Zea Mays
gccgacttagccgagtatttaccatctgccgcaatactaaaaatatgcttatcttccacttcaggctgcaacactatttctgaaagaagctcccaaagattcaaataatccactagaactcccacagacagagcaccctttatatcagatatccattttctattggaaagagcctcaagcacagttcttctatttgcaatccttttaggaatgatggcaaataatctaggcgtcagactacacaaattctatcccaagatccatttatctgtccaaaacaaagtgtttgctccatttccaacctcagagaccaaaacagtggagaagaaagctcctgccttttttggaacttggatagggaggtttgcccagggtttttctggatcagttttatgaagccataaccatctcatacgaagggcccagcaaagttcctttaaactagaaatacctaaccctcccaaatggaggggtctgcacacccttccctaggcaaccagacaatgtcctcccctgacttctttgcggcctttccaaagaaaaccctttctaattttatcaattgcctccaaagcccattgaggaaaatcaatggccatagctaaatatatgat

SEQ ID NO: 57058 - DNA, 66 bp, Zea Mays
cctaaactcgtcgccagccccacatcccagtcgtcgcccgtgctggctagctccgctccatcggcc

SEQ ID NO: 57059 - DNA, 414 bp, Zea Mays
ttcgtcccccccgagtcctactatatacgcgcggccgtgcgctcgatccatacctccttccaccgctgacgccttcctcgagcgttccatcccatcccctcacccgaatcccactcggctactccccacttccctttaagaacgcgcccctccccaccggaggttaccgcccacccatcaatccatcatccatcgctcggtaatcgatcgacccgaacaacgccggggtgctggtgtgagggtcaggatggtggtcggattccgccgcacgatctcgttcccggcgcccaggtccccggcgccgccagcggggcccagcgccgccaacaacaagtccgtcgcctaccgcgcgcggtcggcgagcctaccgtgccggttccacccgctggtgctccagctcgacgacgacgtcgc

SEQ ID NO: 57060 - DNA, 245 bp, Zea Mays
tgaaaccctaatccccccttattatcttctatcccaaaactcccttagatttttcccatcatatgcatacaccttgtttgatcacaagcacctcacttagattttattttccaacacctagattatccactaaatgatttgttcaaaaaaaggaaacaaaaatggaaatgagttattaaaaataaaaagaaaaagaaaaaattctccttccccctgctgggccaagtctggcccatgtcgcggcc

SEQ ID NO: 57061 - DNA, 118 bp, Zea Mays
tagcagaattaaaactccagattgcagagctgcaacaaaaagggtacatccatcccagttcgtctccctggggagcacccgtccttttcgttaccaaaaaggatggaagtatgagaat

SEQ ID NO: 57062 - DNA, 438 bp, Zea Mays
cttttctcgagccccgtctgaatctcgagggcgagattcctttaagtggggtaggtttgtaacattccaaaattctaacccaggtttgaaaccctaatccccccttattatcttctatcccaaaactcccttagatttttcccatcatatgcatacaccttgtttgatcacaagcacctcacttagattttattttccaacacctagattatccactaaatgatttgttcaaaaaaaaggaaacaaaaatggaaatgagttattaaaaataaaaagaaaaagaaaaaaactctccttccccagctgggccatgtcgcggccgcctcctccctcccccgcgcctgcgtatttcccccttcggcccattagccgacccgctcgcgcgcgaagccgcccgcgcgcttccctcactctctctcactgacgagccagccccac

SEQ ID NO: 57063 - DNA, 99 bp, Zea Mays
cacccttaaagacatttgttcatttataaataacctccattcttgctataaagatctcagtttaaaatttcctagaaaaggcaccacacagccccaaag

SEQ ID NO: 57064 - DNA, 250 bp, Zea Mays
ggagtatcccaaatctgcttcagactgaaaaatcagcaggactgaatttttatcttaagtctgatttccaaactgaacactgcatctttaggctcctttttataccaatttaatatagatttagggcttaaacacttaataaacgttgttctcctatagttactctacaagtttactatagcaaccttttgccaaaatcccccagattaaaacatacaggggtccagaaatagtaaagcaaactgttttt

SEQ ID NO: 57065 - DNA, 309 bp, Zea Mays
acttgtctaagagatgacttacctccacttgcctaaacaaaatcctcaaactaagtcctatactctaatacacaacatcacagttattgcaaaaaaatttacctaatgaatacgttataggtatatcaagcaagttaatgcaagtgcatatgatgtcatgccaggttttagtttctcgtaacaccaggggtgttacagagccgactcgggtcacggagaacaagaccggtgtcccatctggctagctccgccagatgggcaatgatggcgccccacaaactctgtgacgacggcggctctcagctctct

SEQ ID NO: 57066 - DNA, 695 bp, Zea Mays
ccgcaggatgccatcgaggtcgcgattttctcttgtcgccacctcggcttgcacagctcgccccgacgcctggcctcctcgcctccccgccctctcgcatccgaaaactgtcgcgtctttcccttctcccactcccgcgcggcaatttctcttcgtgcagataacgctcgccattgatggcaatttcggttcctgattcttcacagattcaattcagcgcatcaattaaccatcaaggagcactaattcgtctttatattcctcccttcttctacctataaatactgccaccgagctccttgcttcacctgctgctccgcatacgcctcgtgcccctgttcgctggccgcgcgaagccaccgccgacgctgctgttcgccgacgctaggacgccccggtcgactgccgccgttggtgactgccccaacaagcccctcggccgcgcctctgtcgattgtcctgctgacgttcttctccgccgccgtagccggtgccccgaacgatcaacgcccttcatttttcccctacagttcgtcacgttgcagtcgtcacgttgcagctcgtcatgttgcagcaaggtagaagaagacagactcgtatttaggtctctggtttcttgttaaattgcgtctacatttcatacagtgcaaaaagtatttaaataaaaccctgttttgctacccactagaaactac

SEQ ID NO: 57067 - DNA, 297 bp, Zea Mays
gcgagattcctttaagtggggtaggtttgtaacatcccaaattctacccaggtttgaaaccctaatctaacccccctcttctttttatccatcccaaaactcccttagatttttcccatcatatgcatacactttgtttgatcatgaacacctcacttagattttactttccagcatctagattatctactaataagttgttcaaaaagaaaaaaaagaaacaaaaatggaaatgagaattagaaaataaaaagaaaaaagagaaggctctcctcccccctgctgggctgaatccgg

SEQ ID NO: 57068 - DNA, 156 bp, Zea Mays
tgtcctttttcacttttaccaataaagatgtttaatctgaagatttagctaaataccatgcatgtcactagctccatacattattatatgataaactagaacccagtacagtttagcagattgatgcaccagaagtgaatttaaaaactttcaaaa

SEQ ID NO: 57069 - DNA, 542 bp, Zea Mays
aaaaatttatcccaaaatagaactttcttactctactcgaagtgctgatcgtaatagaataaagatcagctctagtagatcacaatggagttgtagtccctatctcaaaagatcctacacttcacaagcaacttataccaaagttaagtagataagtgcaaataagaaatgaaatgagaaatagaacagatagacaaagacactgagatttatcccgtggttcgaccaagcctgaaatgcttgtctgcattcatgttggagttagtcaacttggcatagagtctatttcaatttcttcctccgtttgctcaggtttgtcacaaggtgatatattgagacttctccctatatctatcagtgtttcggtaaagcagaaccacaactaacacaggttgatagctcgatgattgatgaactcaacactagcaccttcgctcaagatcacgcttgctagctcttgcccacaactacacttctctctcttttggctacaacacgcgccaaacaataaatctatcacataatacaatagagggatagag

SEQ ID NO: 57070 - DNA, 339 bp, Zea Mays
ccttgctccaccttctcggcctatgctatggcccataagggcaaggcgacgtccgacgtcacctacaacctggatgatgggcccgaggcctacaccaaccccgccgtctatagccgccttcatgactacactgccatggcgcaggaggtccatggcccagactatgatccgagcaccgagccgatcgaccccgatgtgctcatgagggtcggaggaggcaagagacatgggcggtactggattgctgacggggcaatcgactcgtcctccactcccactctgtctcaggtgagagcaaggagcacgggctcgagtccagccatacgacctcggcacgac

SEQ ID NO: 57071 - DNA, 155 bp, Zea Mays
aacgaactttcagagctcgctctgctgctgtagtcccatgaccaaacaaccggaaatattcgccagttaccaaacaacatgatctcatcccatccatcgcctacccgctgaggagagaccggtgcaccaacaacagtggagacttcaaacgccgt

SEQ ID NO: 57072 - DNA, 445 bp, Zea Mays
cttttttttaaaacatatgcttccatatagattaatatttgcagttcactttttgttaacaggataacaactcacttaatcaagcgtgtactcatacatttgttatctctttccattgaggattcctatggagctacgatatttggtgaaaaaaaaaacaaagacaatgacacaatatgttccatgcatattaaaatgttcagtccagatgttattaactgattaaaggcttagttaagccagtgggtactcatacattttctcatttatatttatatcgattatttcgaacgaggaaaaatatgtgttaaggactttgaccccatggaaagcatcagaaaacatgtgttaggacttagagtttatggtatatacttttacttgtatactattttctgtttattttacatttacataaatatatatagtgtacattcatactaac

SEQ ID NO: 57073 - DNA, 939 bp, Zea Mays
cccatacttatttacaattaaatgagcagagattttcttcagttatgtaatagaatatcagtccacaaaatcctttttctttgccaaaattcaagtaatgattcaagatcgcaataacgaagtggtagaaactgaaacgggagacgtcataagccttcaagaaaagggtcatcaaagagggcaattggaaaggtgacacaaacaagtgggagaagatggcaacatgtattgaaaagttggccatggaggtgtgtggagcaaccaaagagagtgaaggaaaatctaaagatattaagtaagtacagaagactattaaggaaaagaaagaatgttatagatgtatgtagaatgaaaggagtgcgaacaacatggagaagtacaaggtagaaagaagaccgcaaagcgagctgtaagtgtggcaaagggtaggacatactaggatctttaccagtgattgagtataaaggagacaaggacatatatagtatgacgacggtccgtgagagaaatacaagggacttaagcaagttaagtgcatcaaggatgaaaggaagcaactcttggtaaacgaggatgagatcagagtcagacatagatggtgagagtaaaaaggatagaccagtgttgaaggcttccagatgagtggggcctgggaaaggaataaccaaggcaagcctacccctagcaaatgtggaaaggttgtttcgaacacgtgaactggtgactcagtctgaactctcaccagcagtgatttcaaatcgtccgactaatcgtgattagtcggtttgagcggttataagcactcgattacaggagtcgattcgattagaagagtcgatcgtctttatcgtccgactaatcgtcgatatggtacgattagtcgccttaatgggcgatcagccgatcaacatagatccagtcaaggtagtccaacaggcg

SEQ ID NO: 57074 - DNA, 991 bp, Zea Mays
cagcgcttaagtgtcgacttagggatgctttaacaactatggttgtactaattaccgaggaattaagttgatgagccacactaggaagctaagggggagatgttcgagcatcgtctgagaggaataacaaggatctctatgaaccatttggtttcatgcccgaaaggtcaaccatggaagccattttcttaataagacaagtgatggagcagtataagaagaaggacaaggacctacacatggtttcatcgacttagagaaggcttatgacaaattgtcaaggaatgttatgtgatgggctttgaacagacatgaagttccaaagaagtacgttggactcattaaggacgtgtccaacaatgttgtgactagcgttccaacaagtgatggagacacatatgacttcctagttagaatacacctacatcgagggttagcttggtgtacctttttgccttggtgatgggtgagatcacaagggacgtacaacggaatatcccttggtgtatgttttttgcgaaccatgtagtgctagttgatagaagtcgggtaggagtagatagaaaaatggagttgtggtaggagactatggagtccaaagattttagactcagtagaactacaacccaataaatgagagatgactttggcactacaacacatgaaaaagagatgttagtttggaaggtcaagtagtacccaggaaggacatctttcaatatttaggatcaatactataaaaaattgaatattgatgaagatgttagccatagaatcaaagcaggatggagtattgagccaagcatttggtgttctatgtgacatggtggtaccacaaaagctaaaaggtaagttctataggacgatgattagcctactacgtcgtatgatgcagaatgttggcctacaaaaagacatcatgcagataagtgttgcaaaaatatgtatgttgcattacatttatggtcatacaaggaatcgagtccgaaac

SEQ ID NO: 57075 - DNA, 896 bp, Zea Mays
cccccctctagggcgactttcaacactctaccccccttaaaaagaattcgacctcgaattcggccactccaagcaaaacacccaaggtaccccatatagcaccaccattcaaaacatgggtccattattggtcttaattaacacaagaacttctaccttggactaattgtttaaggaaactacatgacctgacatcaagcatgaaacaacatgcaatgaagctcaaagcaagtcatagttgcaatcaacactacaatttcacaccatcaaatttggatgcagctatacatcaacatcaatgtcttaagacaacactcttttatgaaggggtaatatgcaccaagcacaacccttaccaacttcaacaattaattttaattaaatggtgaaacatctacacccgacgaatgtataagaagatcaaacacctcaccttaaagcaccatgaaacaagtagttctattgaaacaaaactcctaatcttcctaaaccttattcttgccatcatgaaaagataatcatgtaatctaacattctttgcaccccacaaaagggagaaaatccacagaactaatggagcaataaagccaacaagaagccaataatattctgcgcggcacatttcatcgaagaaatgccaaaagctccacaaagagcactaacagcacaacaacacaatacttggttaaccaatgtcactatacttcatccaacaactcaactaagaaaaatatccgaactagtaaggttaacctacacataatataagtcttcatctactgtagttcataaacttacatttcattctatcatacgatgcactcaaagtactagacatacaaggtcaataataaccccgtaatccttcacacatttgacaaacatctcaagctgat

SEQ ID NO: 57076 - DNA, 167 bp, Zea Mays
gttagtggttagcatcttaaactaagccacctgatagtccttagttttaaccacatactatttgcacttctactatcaagccttgattatagattcttaagtttataaaaatcatttagactcaaaatcattttgaagtttaacaaaggattactttaatatccatg

SEQ ID NO: 57077 - DNA, 490 bp, Zea Mays
acatttactttgcgatcaattcttgaaaaggataagttaaatggaacaaactatacggattggatccgtaacctgagaattgttctcagggctgaaaaaaggaagacgttctagacaccccactgccagaggatcctggtgaaaatgcaactgctacagctaaaaccgcttacaagaaagcaatggatactaatcttgaagtgagttgcctaatgcttgcttgcatggagcctgagttgcagatgcagtttgagacaaaccatgaggtgcacgatatgatcgtggcgctcaaggatatgttccagactcaggctaggacagaaaggttcaatgtgtccaaagcctttctggaatgcaagctagcagaaggcgcagcagttgggccacatgtaatcaaaatggttggttacagtcagaggttggagaagctaggcttcccaataagccaagagttggccactgacttcattttagcatctcttccgcccag

SEQ ID NO: 57078 - DNA, 473 bp, Zea Mays
gaactctactctactactggtggcagatgccatgccgatgccgtgcgtgcctgcgctgcgctcccggccccatgatggcatcacaagtatttccccccggcccggcggttggggttgggttgggcgggcgtggcatgtgaacctatcctcctctctttttttttctttttttttttcaaaacgctcggggtccctcccgtctcgcgtggttggacgtaacgtaactgcttgcgattcttcctcttgttctcgtcgtggtggactggcgctagtggtcgttgctgtcatgtcatgcatggcgccttcgtcgattcggttcttgctcgtgtgcttgcgtttctctggtctggtgtcaaacatttggtttgatcgacctatcgtctaggaactaactactcctggttttggtttctgtgtttggtgcgcgtacgtacttcaatatttaacgatggggttgaaaagtatgagacagt

SEQ ID NO: 57079 - DNA, 139 bp, Zea Mays
ccaaagtgcataacttattataataattggaagggtgaagcctttccataaaagatacacataaacattctaagcttcaaggcctccacatgaagtaactaaccaaaagataagggaataaaacttctcctgcaaaaaa

SEQ ID NO: 57080 - DNA, 279 bp, Zea Mays
cctccatccctccaccaaataaattggagtcgaacttaaaacaataaaaaccaacggttcatatcgctcgataaccctctcacttactcaaatccaatgaaaattattatttggatcatccctcatctctccccctcccccacgaccccgctgccctgaggccaacttcatcggtcagtgtaaacggctgtgtaaagtactgtagattgtactatttacagagtgaagtttgaaatagagagtgagataggggtaggatagggagtctgctggagatag

SEQ ID NO: 57081 - DNA, 228 bp, Zea Mays
gtcgggtcggcaggcacggcaccgagctggctgggatcctctcccgcgcccgcgggccgcggcgaagcgccagacagccagtctcccatcacccccaacagcgcccttgtcgtctccgagcggggagcgtcacgtcccgttgctttcccggtcatctcagcgggcaacggacgcttaaagtttcactgacgaacgacagtccggcgaggttaacgcgccgtccgccgc

SEQ ID NO: 57082 - DNA, 379 bp, Zea Mays
ggaaccctaatctactctgcgcgtgcgcggaccgtccgacccacaggcgcggaccgtccggaccgcggaccgtccggaccgcggaccgtccggcctcagggccggaccgtccgcacctcattttggtgctcaacactcacgaactaatgatccccacgccacaaacttctcaaatagcgtgcgagaccagcccgctccagtgccgcgcgtttcctgcttggatttttcgcgcgcgacgacgactcccccaggaagctactagctcgtcagctcgttgcccgctgtggcatcttgttgaagctacaagccgagctgctggtgtgcatcgctccgggcaggtcgggcctggactcgaccggctaccggagccgctcgtccg

SEQ ID NO: 57083 - DNA, 387 bp, Zea Mays
cacctccgcaccgaacccgttgtactcccgctgtacccgccgccgagcttctcggcatgacgcgaccatggcagaccaatcctgcgtgcatataagagaactaggctctcgcgccgttaacctacccgccacgttcagctccttttcgtttcgaccgaccgctcatcgtgcgcgccgtgaggaagggaagccgccgcaggggagctttgcgccgttgtcacctagccctttggtgttgcgccagctccttctgcaagcctgggggaggaagatcgcggccgtgccactcagaatttaccaacagcgctgccggaattgctcgtcggggcgacctccttgcctccgacccgctccgcaccatggactgggcaccttcgcggccgaatc

SEQ ID NO: 57084 - DNA, 829 bp, Zea Mays
gttttcacatgaaaacagtaagaaaattaatttcccatttaatcctatttcaagcacattaaacctttggaaattcataatctgaaatctataactccaaaattagtgattcctgttcctaggttcttatttcaatgtgtagatttttattgtgtattttattcacatgtttggtacaatgttaatttttgctgtactaagtatgtattgtgttgacgcgagtagacgagcaagccagtgtggattctgaggttcagcaagtagaagtagctgagcaggagctcattgaaggcaagttgtgcccttcatcacttactttttcccatccatgttcttattaattataatgatctgcataggttaaattttgatgggatcctttaggttaccacagttttgattatctttataccttgttcaccattgaaatatttttgggtagtacctgctattgtgaagtgtcccgatcctctgggactcaaatgtgatacaattactagtcccaggaggctagtaaacacatttatacatcagatgattccagatctgcttaaacgagacaaacctatcaaggtggcgaacaactttaagagttggtccacaactcgggacatatcatcagagtggggctgaagcagccctgttgggggccttcggcttccgaaggtcctcaaaaacatgatttaacagtgtttctagagtgtaatgtgtgaacaggtaccttcggacttatgtcaaagagggagaacctcaaaagatacgaaggttggcagtgccgaagctgtgaagcaggaaagcttcggcatgttcgcagaaaagggaaccgact

SEQ ID NO: 57085 - DNA, 823 bp, Zea Mays
acgaaatgggcgtggagcggtggcgggagtagcgtgtaccctccgtggcaagaggctggacggtggtgtatctgtgctctcggtttgcgtgaacctgatctggtcttaagaaccctggggtcgagttgacatatgcaaggattaagtgctacatatgtcgtgtgattagagatcctcagctgagtaaatcgattcggatcgccgttatatccccggagagtggagacttgatcactgacctacaacctaagtcaggatgtgaacttcatgaataaaaatgatgttgtattgatgagatgatgaaattagactagaggcaaacagagtctattaatatttaatctggcgttaaaatgttgaaagtaaggactcactttagtaagctatttctgcaaaagtatctaagttgattcttgctaaagcctctccttgattcctatttatccagcatacccttgagagtcttttccttagtcgggtaagacttgctgagtaattccatactcagggttttattccctgttgtttttcaggtcatagctttgtgctgctgatgatggtgttaagtgccggtgggctcggccttcttataaatctaagtaacccttctatacttcttattgaggatggtctcttaagctagcatatatttcaaacttatacttttgtaatcattccgataaaataatgtaaattttttgtaacttgtaaaatttggtaataagatttccgctgcaaaaatatcggtgtgtgtgatttgtattacttaatcccgcggttctggttgtaagtggtttatccgatgtccttggggcaatcggac

SEQ ID NO: 57086 - DNA, 1089 bp, Zea Mays
aaagattgcataaacgaggggcaacagtgtataaacatatatcatgacaaaaaacatactaagcattattaatatgctagcaaatgaaagttaaacataacaacatgaactgaattaaccagtgcacacgactagaaaaaacaaacatcatttgacatcgagtttctaattaaatcatggctgcaactgggcagcgttattataatagtgaaggtggacgtgctgctacttccctcattcccaacatgaatcaaatacctgcattgagtaatgcaagagtgagatgatacatctcagcaagcaaattattttgacgagatatttaaaccacaaattgaattaaacaacattttaaaggaatcccaattgagatcagaaatacttgtagatatagaactcaatagtcccaatataaccaataccatctcatttcctcgaacaaccacaataggttgtataacccttccctgcgtcaacaatacctgcagatatcacttcaatgtatgcataggaatgcaatgtgtaggtcatctgccctcatacctctgagagtataaaaccacatcatctgctaatatcacttcaatgaatgcatataaatgcaatgcatatgtcctctgccttcatacctctaagggtatgaagccgcatcgtacccctcctcgggcaacgtacgatgctaagttgtatcggtacggtcggaccataggttacgaccaaacttcagatgcaaatgaataatgtaatgcatatggcatgctgcatttatcaatatacttcacttccttcagatacaaaacaaacctcaaataatacttcatctgccttcagatacaatacaaacctcaaataatactttatctgccttcagggtgtaaattaatctcatgggtcatactcgaaccataatcatcatcaatatatgattgagcatcagtataatacaagcaagtaaagcatcaccatagtgttcaattatgaaagaattccataattctgaatattagagcgtaggcgataaaaaaacaacaagtcaaaacggtagcaaccactgctacattcacttgccttcatcgaagaagaaagatg

SEQ ID NO: 57087 - DNA, 1068 bp, Zea Mays
tcgcttcatgaagccccatcttgcttcttctctctcttcctcttgtgacgacgcttcaagcgtgtcgtcgccactgcttcctccacctctcgctttcgtttcctcttcgccttgatactggcgtcttcaggaagaggggcgaagaaaccgtgacattaattcctaatcccctgcaaaggcgcatgacaaagcaaaaaaagggggagaggaaaggtaagactcaccaggtcactcaacctcacctggttgaaaggtaggggaccactctcgcccatgaaatctgacattatattcactgtgacggcgaggacgcgcgccaccacctcctccttcgccaagatcacgtggagtggcgatcagagtcacctgcgccgatgaactgccacatgacgctggagggccacaagtggatgaaggcaacgttgctcgaagatgcagacgagcctctcgccgataaggcccccgcccacgctgcttggcgatggcggtcagcatatagtcgatcttcgacctaaactcctctgtaccataagtccaatgggcctgggcaattggggtgcaactgatgaacgcaggcgcgctccccctaggttccgaacatagaaccactcgccctcataaccgcacaccgaggaaggaaagggaatggataggttcgacaccatgcgcgatccacagagctggacattgaaggagccggcgaatgactggccaccccggcctaggctcacccgcacgctgaaaaggttcttccagagcttccagggggccatgatgaggtaagacttgcatagcgtgatgaagcacgctatctgaaggatggtgtttgggtggaggttttgcagctccgacctgtagtagaacaggatccccagaacgaacggatgcaaggggaacccaaggccgcgctcatagaaaagagaaaagaaccaccacctcgccatcccacggcgccggagcgccaccttattcctcaagctggcatccaaagactggccggggggagggaggaaccctttcctctccagatcttcaagacgactccgagtctgggagcgtgcgggaaag

SEQ ID NO: 57088 - DNA, 695 bp, Zea Mays
ctctgctcccttttcgtctttcgatcgaaagtggaagaagaagaagaaaaaaaaggcacggcggaccgaagaagcgacggctggtgtttcggccggcgacgcgagtgcgggatgcattgtatttttgtatatataaaacacacacacacgcacacgcggagtgcagtgcgttcggaaaatggaaatcccggcgcattacctcacctcggatctccattattctctatgcttccagctgacacagactgtgccgccaggaactgcgacgtgtgacggccgcgcgcgctagtagtgggctctgacagtgtgcctgactgacagaagaaagagtggatgatggcgcatgcatgggcctgactgaagcaccgagcccaccgaacaattaaaccagcctctcgctttcggattcctctaaactaatgaaagactcttttgttcgctttacaaggcagaggacgctttttggatgatctgtcaggagaggcgcgtcagcgtagtatattttgcctaagggcatgttcggttatcatgaatttaatccctaggtggaattaatccacaagaggattcaatggatcccctgcttacactctttccctggatggtttaattccatattcaacagttccctgtctctctatttttttgttcggttagcctcaatcgccaaagtagagaatgatgtttttcagcct

SEQ ID NO: 57089 - DNA, 810 bp, Zea Mays
atctgcccctgcatttgccccacatggccagaaccaacttttcatggaaccagataagccttgtgggtggtgaccaattgatgataatccctacacagcagtcacaaacattgaccaaagaggaaagatctctaccaggagaaaggaatttaactaagcaagagaagattaggcaagtaattgtggaaaatgcatgaatcaactagctgacaatagaaagtaatgcaagaaacaaacgatcggcaactccacatgaagaggcataaacctgatccatccccacatctgttctattcacaaagagaatcatgactgctttgttcccctcacctatgcaacagaactgaaaaagaagccaggaatcaatggctgcatacagatgcaaagccgctttggtggtttccacgcactatggctgcagatagatccagatcacaacgccagcagtgcccccaaaaaaaaatttctgcatcccacctctgctaggctgctagcacgtatgaccttggcaccttctctgtgtgctgccatggccagtctgccggatctgaatgtgcttgagaagaaggaatgagaggctgcggcgagaaacagaagtagagagggatgattttaagtctcgtgaaaggattggtccgcaacagatggtgggtgaggataatgggccccattgattacccaccccacccaaacacacactaaatctaagaaattataagattcattgcccactttgctataagcatagataaatttgccaataaaatggcaggcacagatgaggaaagttagtaaaagaatgaatctagg

SEQ ID NO: 57090 - DNA, 614 bp, Zea Mays
ataaggagcttcttatggaaaggcaggagggaggctagagggggtagctgccttatagcttgggataaaattgttagaccctttgagcttggaggtctgggcattcctgatcttctcaccatgagttgggctctacagttaagatggctgtggctctagaagaaatagccttctaaaccttgggctggtataaacctcaacatttcctctcaagcaagagctctctttcaggctgaagtgactaccaatattggtaatggagctacaactttgttttgggaggataggtggattcatggcagctctattgttgagattgcacctttgattgctgctggggaggcaaaaagtataaaaaagtgcagaattgttcagcaggcccttccttctctcgcctgggtgcaagatatcaaagggaacatgttgctggctggcattctggaatttttgaagctgttagattcctgtttagggtttggggttctacccatgtaattactctctcacctctgtgtaatgggccaggcccagttaactcaagtctattaatacaacacccatccctaagtcaggtttagggtttcccacatggtatagagctaggtaagtttctc

SEQ ID NO: 57091 - DNA, 201 bp, Zea Mays
gccccctccccgacgcgactgtcactgctcaacagcgtcgcagttcccctctggccttccccgcccttgctgctcctacatggaccgaggtcgtcgcttcctcgtcggcttcctcaacgttgattacgactatcgccaccatccaaggtcgttgctgcctccccggaccgagcgcgtcgcgactctcaccttgggggcaag

SEQ ID NO: 57092 - DNA, 551 bp, Zea Mays
cccacctcgactccttggtccccactggctggaggatgggaccacgcctccctcaccgccgcagttagcaccatggcgatggccccaccctcctctgactgggtcattgaccccaccctcctctgactgggtcattgactctggtgcttcctaccacaccacccccacaacagacatgttctctcgctccaatcccctccattcctcacatccctcctcgatcgttgtaggaaacggttgcactctgtcgatcacctcagtaggtgccttggttctccctgggccgttctatctcaacgacgttctcgtagccccacatatcactcatagtcttctttctattcgtcggttcaccatcaacaactcttgttccattgagtttgacccctctggttttttgtgaaggatctggccaccgagacccccctcgcccgctgtgacaactcgaggcctctctacacgctctggccttccaccactgacgtgtctccacctcccgtcctggtctccaccacctcctccaccaattggcatcgtcgtctcgaccatcc

SEQ ID NO: 57093 - DNA, 399 bp, Zea Mays
gggagccccacctcaccgccctcaagcggatcctacgctacctccgtgtctccctcgattacggactcctactccgatcatccccgacgtcagagctcgtcatctacactgacgctgactgggctggctgccctgacacgcgtcggtccacatccggttatgtcatgttcctgggcgccaaccttgtctcctaggccaccaagcagtagcccgtcgtctcccgctccagcgcagaggccaagtaccgcatcgtggccaacagcgtggcagaggcctcctggctacgccaactgctacacgagctccacagcccccttcagcgcgccacccttgtctattgcgacaacgtcagcgtggtctacgtctccaccaatttcgtgcatcatcagcgcatgaagc

SEQ ID NO: 57094 - DNA, 647 bp, Zea Mays
aaaggacatatataggatggctagggaccgtgagagaaagacaaggtactttaatcaagttaattgcactaaggatgaaacgaagcacctcctggtgaaggagggtgagatcaaacatagatgacgagagaattttgacaaattgttcaatggggagaatggagtcaaccttttagttggatgactcttgatgacaccaataggtgtttcactgttttgtgcgtacgatccaaggatctgatattagagagacattaaaaaggacaaaaggggtaaggcgatgagcttaaatggtatcccaatcgggacatggaaatgcctcagggacatagctatactatggcagtggctaaccaagttggagaaggcttatgacaaaacaccaaggaatattatgtcgtgggctttggagaaacataaagttccagcgaaatacattggacttattaaggacatataccgcaatgttgtgattagtgttcgaacaattgatggggacacaaatgacttcccaattagaataggactacatcaaaagcaactttaagcccttacctttttgccttggagatggatgaggtcagaagtgacatacaaggggatatgccccgatgtatgcttatagcggacaatgtagtgctagttct

SEQ ID NO: 57095 - DNA, 51 bp, Zea Mays
actaaatagattctaaacacattaaatgaagtacacaaagtctaaaatgct

SEQ ID NO: 57096 - DNA, 147 bp, Zea Mays
ggcgtgcgcaagcagccgcagggaaagggaagcgaatcaaagcgcgctcgacaagccttccaagtacagactacagagcagagcagggcagggagacggcgggcgatgggggatgatcctcgcccaggcggtggcggcgctggtggg

SEQ ID NO: 57097 - DNA, 265 bp, Zea Mays
cctccctttcccttgttattgttgttcttctttttaaactgtgctgtttgaacaggtttattcgcgttctctggtttgttctggtttttcttcttgttaaacttgcggaagtttctcttctgcaccacattagcagtagaggtctccacaccttttccattgtcctttgatctagctctttcctcaacatcaagagtaccaatgagctcctccacattgaactcttgtctcttatgtttgagagaggtagcaaagtccttccaag

SEQ ID NO: 57098 - DNA, 352 bp, Zea Mays
gaagaatcatgagaaagaataacagaccattttttctccttaatcagtgataccgtagatattttttcttctcaacaccaccaaacttagatttagtggagcatctattgaggtgttttactaatttagtgaatctataagtagatctatagatttggtggagcagatccaccggtgaagctgatggagacgaagatgcttggctaaaaagtttagatggtgaagctatcatgaacaggaacaggaacctattgatggaagagttggagtaagtgtttacgtagccggcaaacatatgtattattagccttgacctttctaaaagttggttttcatcattgaatgctagttt

SEQ ID NO: 57099 - DNA, 278 bp, Zea Mays
attcattagtggctccccgttcatggatggttcattttttatggataaatttaagagacgattcgtaacacactactaaaacaggaccttacacacatattatacattaattgtttttagaaaacagtaaatatatagtacagatattttagcttgcgtcacggagggtcggccgaagcgagccaaccctaacagtttccacaaattatgccggccatatgtcttgatagccatacagcacccatcaatcgaggatggatgtggcatatatagccaac

SEQ ID NO: 57100 - DNA, 214 bp, Zea Mays
aagacttcatcctgaactatggatcttgatttcgctggcgattcaacttgatctttgaagagttgagttggtgcttatcctttcttgatgacgttgatcctctcttctccggtcttggtcccattgattcgaggttagtgtattttatcggactggggaatatggttaagatatatatggatgagatagactacatgatgtaggtcaaaagttt

SEQ ID NO: 57101 - DNA, 60 bp, Zea Mays
gtccacagcaaaaaaaaaaaaaaaaaaaaaaaaaaaaaaaaaaaaaaaaaaaatcctgag

SEQ ID NO: 57102 - DNA, 439 bp, Zea Mays
gatcgaccggtcgctcggtctgcatgctggtgcctggtctggtggtcatcaccaggcgccttttgatccgtcaggcaacttttttgacggatctttggagagaagctagcgatggcgacgtcgcgacgatgctgtgcgatcactggcgcactaccggccggaagtccggccgggtagagatccagcgtcgcttacaggatgccacacacgtatgcaaaaggttacagggatcttttcttcctacgaccgaggtggaggacgctcgaccagtggtggtctggaatctggatgggatccgggatgatcttacacggaatgatgatctgttcactttcattgctgaaagatcagcttttatctaagcctggcgtggtcgctaaagctagcatgggaacgcagcggcacactcgttacacgcctttctatctacacggtttcg

SEQ ID NO: 57103 - DNA, 95 bp, Zea Mays
attttccggcgcttcctcttgagccttcgcatcctcttcttcttccacttggctcgcatcgcgttggagcaggtggagcgcgcgctcgagctacc

SEQ ID NO: 57104 - DNA, 150 bp, Zea Mays
ctggtagtgtcgggcgagtgtggaggtggtgctgcgcttgttcagcgtggacttcgtgtgctctgttggtgtgccttagcacctgtgtggtgcagtgcatctgatctggttgttgtccaccgtggtctggttcttgggctccctgctgcg

SEQ ID NO: 57105 - DNA, 282 bp, Zea Mays
aacgtcgtaaaactacagatatacacgttatggctaaactcacgtctcacagtcatataatagaagcatgtgcagagacggagccaaaacgaatgagaggactaaatgaaactgctaacgtaaaagatcttttttgcattatatcatatatatacattttaaattttagaggagtctttagtggagtaggggctggagccccgtctacttcactattacttgcgttactgagcataagtacagacagataagtaaaaaaatagggattaatattgtatttct

SEQ ID NO: 57106 - DNA, 880 bp, Zea Mays
gtcgaccttccagcaggagcgccaagcatcgcgcgggtgcccgcgatggggagcaagccggccggtgatgccgccgagggggaggagtggaagtccatcagcggcgagagacaccggtatgcgggccaaggcggacgaggagagtagcgaaacggcggtcggatctcactgtcactcagctgcctcgtcttcctccctcaagctctcgattcactgatgctactcgatgagcagggcagggcggttgacaaggaggttattttgccggccatcagaccccacaaatcaccgaccactaccgcagtaaacaaggcacagaatacgcgagtataaaactcccagggagatacgcaccggagatccaagtgatgactggaatgatggccgccggagacgccagatgcggacgacccttcccccggcaagcgctactccaccggcgagcctcacagcggcaatcggcacgagctctctctcacgggtaacagcgcgtttcactctccctccctgatttctctctgcaggcaacgcggtgcatcccgactcgtgggcaactgcggcggcgatgtcatgcgcatggcgatccggggtcttatcccacgacgcggcggactcggtcagtcgttcctcaaatcatgcgtggcggcggagatttcggtcatggccgttgcggaggcgcgggatgacacgcgggtcccagcagcagcggcgtgagtgagatgaatgcgacagacagacgaggtcccatattccagtgaagcagatttgcccaacgcgtggatggccactgacaggcatggcccgcctgtcggcgcacgtcagtggctgggctgtacagggcaactggttatctgggccgagaccaagagtttgagcccac

SEQ ID NO: 57107 - DNA, 662 bp, Zea Mays
cactgatccccactaattgcccacgaaaaattcccagaaatccctagaactactgctgttcgtccacccactaaatttctggacagcacctctaccaaatcgcataggtaaacatgtaaccaattggattgcagcacaaatacaacaaaatgatcacgaaaatcaccttgggttcctccttttctccttcttttcttccttcttcctccctccaaactcccatggaagactcgcacccacacgacggacaccaagcggagaggctctaccttgatgaggaagaggtggggggggatagggttgaggggtggcgttgcaatcacttggggaagaaggagagggattggggcagctgcaagagtggaagagagaggggaggggcggccaaaggggtgggggagtgagagggaggggcggctagggttaagggggagaaactaatgggctccccaccgccggatcgagatccatggcccaaactcgctctcacgtctgctcccgaccccagcgcacaaatccaacaagtattctactgttttattggtgaatgcttcctataaaactccaaccccaactacatagatcacgaaagaaaagggaaaaatatatttaacttcttttcagaaaattgggtatcacactctaccccccttaaaaagaat

SEQ ID NO: 57108 - DNA, 369 bp, Zea Mays
cctagaactactgctgttcgtccacccactaaatttctggacagcacctctaccaaatcgcataggtaaacatgtaaccaattggattgcagcacaaatacaacaaaatgatcacgaaaatcaccttgggttcctccttttctccttcttttcttccttcttcctccctccaaactcccatggaagactcgcacccacacgacggacaccaagcagagaggctctaccttgatgaggaagaggtggggggggatagggttgaggggtggcgttgcaatcacttggggaagaaggagagggattggggcagctgcaagagtggaagagagaggggaggggcggccaaaggggtgggggagtgagagggag

SEQ ID NO: 57109 - DNA, 613 bp, Zea Mays
cagagcagaggtgtccaaaaaaaaactgggcagcgcccaacagaggagaagtgaccggactctgcatgcacacccaaaaaaaaatctgcatgcacacccctgctgaccagacagaaaaagtggcacgcagacaagaagcgactggaaaaaaaatactctgcgcgcgcgtgaagagacagaaaaaaaataaaaaataaaaaaatctggcgcgcacaggctgtcctgctgtcctgctgaccggcagcaagcaaagaaaaacaaagaactgcacgcgccgcaggaaagtgacagcacaggggaaaagtagcaaagcttctgcatgcacagccaaaaaaaaaaaagtttggcgcgcacaggctgtccagcggagcggcagcaagcaaagagaaaagaaaaaagaaaaaaaaagaatactgcgcgcgccagggaattgacgggtcaaaaaaaataaaaaaatgctgcgcgtgaagtgaccggaccagcagctggcacctagacaaaaaaaaatattttgcatgcgcatgtgactgtagctgagcacccgtcagaaaaagaaaaaaaaaataattttggacgccctgcagctgagcggatgtgactgcgcgacaaaaaa

SEQ ID NO: 57110 - DNA, 316 bp, Zea Mays
cctgtgcctaaactccaattcgaatgcagtggcgagtagcggtaaaggtagtgtattgccaagaaagatgctcaccgagattcagagagtgcccagatcctccgagggtgctcgacggaacacgacgtccgacgatgaattccggtccccgcagcggctgacccctccccaatcggccacgagcgcttcaccagcaacaccacgaggctcccaaacttgctgcagatcctcattcgtgggtcgtggacgaggtcggcgctagcggtgctccctgctctcagctcacctctgctctgccgcttgggttcggttttgg

SEQ ID NO: 57111 - DNA, 99 bp, Zea Mays
ccccgtgctccccacattcccaccccatgtccggagcccgtcgtcgttgcgttgcctcgttggttgtcaaccaggaccaaacgcccagcacaccacctg

SEQ ID NO: 57112 - DNA, 2496 bp, Zea Mays
aaaaatttacactacaatctgatgtctgaacgtagccttgcagtgtcacttcaatatagttcaccattgtgcctttgttatttttcatggtattgatgcttccaagctagtggttgtcaaggcctaaggaggccctcggaggggctgcgacagcagcagccatgggccctccaagggggattagataaggatagttaaagataagattagaagattagttgagattatttaggagattagttgagattatctaggaaggttatcaattagttcgttgagagtttttaggagataaggatctctagctagacaggggcggccagccgacctatttatgtaatcaatggatgagaaataaagtatgcaagaattagaagggttctcccttctcttgctcggccgtgggcagaggctcccggccgacgttcctgcccatcgatacccctctccaatccctcaccgatctagcgaccataacatctggtatcaactagcttgggtttcgatccgatcccatgccttctgctgccaattttgtggcatcgtcctggcaaccggcgcccccatctccatggaccgccccacatgtcaccttcgtcacgtcgtcctagcaaccggcgtccccatctccatgggctgcgccgcatgccaccttcgtcacgccatcctggcaaccggcgtccccatctccatgggcagcatcgcctgccaattttgtcaccacatcctggacgccgacatgcccatctttagggacaacgccaaattccgtaacatcatcttcgttgacagcgtctccgtccccatgggcgacgccactaggggcaaccacggctcaacaatcactagctccatcgatgggggccttgtggaccaacataaaggctgatctcgcaaagatgcaagcctcgctccggatggttgagtaggggctgctgcaaatcaagccaccaatgcaacatgagcagcaacagctggtgttgtccgtatggctccagacgtcgacggctgtgggcatacaggctactgctcgtggcttccttgcacgacggagagtgcgagagatgcgccggcagatgctcgaggcagccttggtgacggttgacctcggcacacgggggcgcgacctcgccctgtcggccggccatcagcagcgacaccgggccgctatctccaagtgcgagcatggtacgtgtcccgcgggcgacgaacttcaactctacggcagcagcattagggaaggtactcccttcgtcatcggcaagggcgcactgtttagcgccaccagattccgctaccggccgccatgagggcgcctccgctggttattgttgcgacctattccaggtgcccgtccatgtgctcccctttcgtccagatggcgtccatgggatccaagtggttgcacacatgcaagtccaatgcacggagggtgtccgccttatcttatggggtaaaaaaaatcagatccggaataataagataagccgagatgtaaaaggcttatcttctaggtgtatggttttgggtcaagtagactcggtctttgagcacccgtcatgctgcagctcgaggacgagctgcttgtccaggaggggtatagtgtcaaggcctaaggaggcccacggaggggctgcgacagcaacaaccatgggccctctaaggggggttagataaggatagttaaagataagattagaagattagttgagattatttaggagattagtttgagattatctaggaaggttatcagttagtttgttgagaatttttaggagagttttaaggagataaggatctctagctagacaggtgcggccacccggcctatttatgtaatcaatggatgagaaataaagtagacaagaattagaagggagaaacccttctcttgctcgggcgtgggcagaggcccctggccgacgttcctgcccatcgatacccctctccaatccctcaccgatctagcgaccataacagtggtgaactgttttgctgaaacatctatataagattagataaaaaaacagtttgaaacattatgtttagtgtctagatgttgtagattaattttccctaagtttctgttgactgctctttgttgcctagcctgaactcgactagttttttttggccttgtatctcataatcactggtcatgtcagctgtggaaggctagttgctctggtctattgtttcccatgtggaggggcagggttcttctgcctcctttgttcagttcctgttctctctcttcatgaaatgatgcacaattctcttgcgtgttcgagaaaaagaagtttagtgcctagattagtgttgcacaatcacatttggttcatgagatgaataaaacataatcagtggttctatcgaggtactgcatttattcccagtgaatgatgctttgctttcatccccagtgagtatatttcttctgaaaccagctgtctgttatacatgtatctagtagggcgtttgacctaaaataac

SEQ ID NO: 57113 - DNA, 935 bp, Zea Mays
gttttctgcataactatgtgttttctacattgtaaacaaaactccatccagtctgtaggaagggaaaaaaaaccgaatgcataactgctggcaggaacaaactttctgaaaaaggcaaacggactaggataccaatttcgtcgccaatactaatacatcgtcgaaaaaaacaatcagaacaaacagggacgacctgtcctcgacctcataggcgtattcattggttcattgtggttcagtctgatcatttctactccactttgacccttctatatataccttcagcgagacttgccttaatgaacaacacggacatctgttgtttcaccatccatccatcaccacgcaattgctgttggccgattcatggggacaaggcttctctattttgctcacgtgaagaaaaacttgccaccaaccaagcattttctcgtcagtattggtacaaggtatattttcgcgtgcactgtctatgaccatctgaccaaacgagatagccggctcagcgcgttgaacaaaagatggttcagctttgcagccctgctcgcactgaaagaactgctgagcatctgctgctttggtagactacctttgcttgcccaacctaatccctattgcagtgcattacagcagaaaagctggtaaccttttctttgtttgggcatctgttttaattttggtttctttcgtcatggaaatatagatgtagttggttatttgttcttgtttggtgaaattttaggatgtccgttaatattcttatttgctatttggctatgcctcctttggtagactgctgcatggtagtcttgagattgacggcgaatgtagtcgatgactaagttaccatggttttaaaggcggaactaggcgcccagccaccgcctgaacgcctagacgacttaggcggacgccttactagccaaatatcaaac

SEQ ID NO: 57114 - DNA, 131 bp, Zea Mays
aattgggagcgtgcagtcagttgagttacgacaggcaagtcgtcgccggccacgggctgctcctcgagccagcttgcacatctggtcggggtgtcaccgtagctctgcgtacgtacccatggcgtgggtcc

SEQ ID NO: 57115 - DNA, 107 bp, Zea Mays
tgcaggctgcctcgtcgacgggtgcactcgcaaggtcgattgcgagctgctccagcaactctaccatgctccagctcgataacaccagttcctcacctaccccttag

SEQ ID NO: 57116 - DNA, 526 bp, Zea Mays
tcagctcccacatgagccgccagcactgaatctgacctacaaagtacaaactagctagcctgatcttcatcgtggtatggcactacatccctggctccctgctgttgtaatagatgaacatgctcaatcaaagcaacccaagcattcaaaagtatccgtttttagttcttacttttgcctgatccagaaccctaacccgccccaaagatcacccatacccatcaagaaaaaaggcgcaacgaagtgggttgttatcgcgagagagcccagcactggttattatggtaagtagtagacttgggtcgtaccatcgaaagcagaaagccccctaagtgtgtggtatggccctgctgcttgtggtaggctgccaccagaatggcagaatccatcacccttcttgcatatccctcccctagctgtccactccaattgatgccctcatccgcagggtgccctcacaagtagggttgctggtatcccatgggctttagggagaaatttggaattctgccattatgaaactgtt

SEQ ID NO: 57117 - DNA, 408 bp, Zea Mays
cactttgagaggaaccgatcccctaggcgctcggagcgactaaccctaatcggtacacctgtaaacagggacagcaagtgactcgggatccaacgatccacggccaagaaacaatcaacaagaaacaaaaactgcaaggattaagtgcacagagcactatcaatataatccatggactggtttttcagtcaaaggtacagaaattaatcacagaaaataacagaaatagcgcaagggctcagatctacgttttatcaactcataactcgatcccgaataaaactttgataccattgttagaatctttggtgcttaggatcataacctaagtccttagaatatcaatccgtgtctaaaatacctcaatgatgagtagatctattctactgaggggtataggtaaacata

SEQ ID NO: 57118 - DNA, 94 bp, Zea Mays
gcggttccttaagaaaaccgtcactacaaatcatggatttctactggcggtttttttaaggaaccgccagtagaaatacgatttctagtggcgg

SEQ ID NO: 57119 - DNA, 211 bp, Zea Mays
ctggaggctgcactggccgcgcgatcgagtgggccccggcaaaccagatgagatgacgatgacggtggatcggtcgctagctagccaagcatgtaggctggagtaatcctctggatttggatccttttccgatcgatcaaacgaggttggtgtactcttcaagttgtttcatgccatgcttaattacgagtgtgtgtgcgtctactccact

SEQ ID NO: 57120 - DNA, 197 bp, Zea Mays
gacaatttttagtttaaagtgtttttatttacctaaagatgataaaagctttgtcgaatattacactcactaaaaagaacgtataacaaaaataattattgtcaaaaagctctttaccaagttttctttttgtgccgttcattggtttttatcgagtgccgaaaacactggacaaatgaaaaattgataaaaaaaaa

SEQ ID NO: 57121 - DNA, 316 bp, Zea Mays
ctggaatttcgagtgctgcagatactacttgtattgttcgcccaaagagattataataataagcaatctgttgacgtccaccgggaacgtcctactcctacgcgctcctctttgttcctgcttgtacgcgtcgttggactgtatggagggaaataaatttcagagaaaaaaaggtatattccgtcgggaattttaaagtttgggaaaaaatatattacaataagaaaaacagtattattaaaaaaactacatttttcctgagtatgatggcatagaccccgttaaaattgaagtgtatttgataggtaaaaaaaat

SEQ ID NO: 57122 - DNA, 340 bp, Zea Mays
gtagtttgttaactcatgtaagtagcagatatatgcagtatgtttatgcttcgcaaaaaaaagattaaaacgatgttgaatctgatttagttcggaaaaggaacaaaactggtgaatatataatattgtatatgtagatgttatacaaattcttaacattattgcctacaggttagccggtcaagactggtataatactcctactggagaaggcaagtggcaataaccaaaaactgccgacaccatggatgattcagtagcactgcgcataattaaagttggaacatatttgtgaaataaactgagaagtaggaccacttttatgctaacgagaagaaaa

SEQ ID NO: 57123 - DNA, 89 bp, Zea Mays
gctgcggctgcggctgcccgaggaagggtggacagttcggtagcgcgttcgtgcgggggtgaacgatcgatcaaggcaaggggtctggg

SEQ ID NO: 57124 - DNA, 442 bp, Zea Mays
ggccgggcgagaatggaccggcgaatctttgggcctggaatagataagaatcctgcacgcccgtgcccgtcattgttgttggtttttttttttttttttttgatggcaagaatccgcagcaaccctatcgcccacacatattttaatcgcgcacatgctctattttcttcctctcatctcctctcctgtgccaatcgctgcggttgccactcgtgtgttgacagctgcattgctccgaggccacatacacattagacttcaataattacgagacaaaataaataataaatgttatgtcccaccgaatataccaaataaaatacatatacatcaggacaaaaatgtatgttttaaaaatataacttatggtgcatttaactattaatcttgtttgatggtgtacatgttagaaatataggcattttccgtaacattttaattc

SEQ ID NO: 57125 - DNA, 349 bp, Zea Mays
agcaagtgttatatctcctgagtcctaagcttgaagacgctggcaacctcgatagatctactacaatcgggtcactcctgttttttttttttttttggttgcacggattggatgtctttgtccttatggtgttttgtccgttacagttggccaaattatgcatccgttgtaagccagctttatgtatgctactaatgaaatcagttaccgaatttacatgatgtgcatctatctttttgtttctgttttgaagataatctgtgcatctttcatgtgttctgtgtactaaatgctacctttcaggtttcgtatttagatataataattctatagactcgaaggatctttc

SEQ ID NO: 57126 - DNA, 192 bp, Zea Mays
ctgaaatttcttcctttgtccacgttgggtcgttggccttgtcgttggagggttttccttcaaactggcggtcggcggagcagcaaaactgtttcgaaaagaaatcagcaatctacggttggaattggaacaaaggatgcgtgcgcgtttgtttgcccccttgcgggtgcaccgaaccagcatatgataaaa

SEQ ID NO: 57127 - DNA, 286 bp, Zea Mays
gtgatacaataggttttttgttgttgtggtcagaggcggagctacgctacgtagaaattaaggggtgcacatgcacccaaaaaatggaaatatagtggtttggaccaaagttttaccatatatgcatcacctgtaaattgttatcatgcatcctcaaggtatatgtatcatcccctgacttactctagcttcgctactggttgtggttatcagtatatgataatatatgtaggtatttacctgttgccatcttaagaagggatccaattaactaggcgaggctgac

SEQ ID NO: 57128 - DNA, 436 bp, Zea Mays
aaaaatttcagattttttggacacccgagcgaaaagttatgcccgatttacggaaggtacctcaagttatgttctagtgatgcgaccgggatgaaacaaccgtatcctttctccttcgttatcttttttttctgttttttgacgtgaccgaaggagaaaaacaaggaagcggccgttgactcggtttgtttttttttctctgtttttttttcgtaaccgaaggagaaaatcaaggaaacggccgttgactcggtttgtttttctgttttttttttgacgtaaccgaaggagaaaattaaggaaacgatgttgactcggtttgtggcgtgatcaaacgggagatggtggcggcgctagggtttgaatggtggaagaacacaatgcaaccagcaacaaatgacgcgaaaacacacaaattcaacaatgcagattattg

SEQ ID NO: 57129 - DNA, 1707 bp, Zea Mays
cttttaaaaatgatgttggttctgtttgtcttacttctgatatttggtctggcaaggcaaaggaggattacttaagcgtagtagctcattttgttaattctaagtgggaattagaaaaaagattgcttgcacttaggctcattgatggcaagcatagtggtgctaacattgctaatcttgtagctactgttattgatgagtatagtttaactgaaaaagtgtttgctataactttggataatgcttcctcaaataatgttgccatgaaatttctaagacctttcttgtgtggttaccttggtgtacctgttcctgatagtagccttggtattgatgcatctgatgatgatttgtctactatgttcttgcatcaacgttgttcatgtcatgttattaatctaattgttaaagctggtttggatcctatcagaacatatcttgatgactttagaactactataacatttttaaatgcatctaatcaacgtatagctgcatacaaaagctattgtatgagtatggctattcgccctcgtaaatttggtgttgacatggatgttagatggaactctacctatttaatgattaaacacttgttaccacacaagtccaccttctctgtttttatcaaaacccagtatcctttgaatgaagatgggactcctttactcactgataaccattgggcaattgctgaaaaagtgttatctttcttagaattattttatgaatcaacagttgcattgtctggtgtctactatccaactgctactttaatgttgcatcacattctgaggatagctagacatctaaatgcatttgagaatgatatattgctaagatgtgctgttgttcctatgaaagataaattcttgaagtactggagagacattccaattttatatgcagttgcttttattttggatcctagagctaaaatgaggggttttaacaaagtccttatcaagttatctagtttaactggtactgattactctaggcttccatttgatgttcgtactaagctaaccaaagtatttcagttgtatgagaccaaatttggtgacacacgcatgcgtggcgcccaccaaccatcatcccacttatctggtaagaaaaaaatggcatgggatgacatttatggtgatgatgaccttgatggtgagttctctactcctctgggaaggagatcaggttcttcttcttcaacccctcaagctatctctactgttgcatctacctctgagttagcttcttacttagacagtgatactatcactgagtttgatgaggacttcaatgtcctttcttggtggcatcagcataagttaacttatcctattctttcactactagctaaagatgtcttgacagtgccagcttctactatttcctcagagtctacatttagtcttgctggcagggtaattgaagagcgtcgacgtcgtctagctcctgatatggtagagatatcatcctgcgtcaaagattgggaacttgctgatggtcacctgcaacacagtgtggaggaagacacaaaagaacttgaagatgagcacgacaacctgtggcttgatgatccagcaacacaatcagctagggatgattgaaatgcttagtcttgcaacctactagtcttaatgtcttatgagttgtaatggactgtacactgtaatggactgtaatgatttataaacttaggagctg

SEQ ID NO: 57130 - DNA, 480 bp, Zea Mays
cccgcccggcatcatgctactagctctcagtactactagtgactagccacatgcatactacattggctttgagattcagatcggcagcacggagctgtttttttttttgtttttttaacgaacgagggaatagaatagttctccagtccacatgcacgcatataccactagcgctaaatggagcattattattagcaggtgagagatcgatcttcggtcggccgcgcatgcacgcgcagcaagtgttgagtttctgatttgaacgtcatttcgtttcagaagattgatagctcggactcggatcaagtcgtcgcgtcttgtcagtagctcgatcgatccttgacttgttatgtatgcatgtatatgtatttagcagctagctggtatatatgctcatatttgtcaggcactcgctcgcgtacgtattaggaaccacgtcgtggtcctctctatctattcgtttttactcaacttctgttt

SEQ ID NO: 57131 - DNA, 195 bp, Zea Mays
cgtcactggacgacggagcatatggcaaactttgtctgctgtataaggaaggaaaggaagcgtgctgatgagtaagcatgaaccatgattgccagtttaatattctcggtgatgcatgaataatgtagcagatgcaaatgacgagttgagtatggctacagttagtaggcggagtatattatatatagagacaga

SEQ ID NO: 57132 - DNA, 686 bp, Zea Mays
aaagcgtgcaagagctttgataaatttttttttctttattttcctgaatttttttgaaattttttgacatttttttggctggcctcagaatggtgtcaacaagctcccgtaaaaatttcaaattttttgaacaaccgagcgaaaagttatgcccggtttaagaaaggtatctcaagttatgtttaaaacaaccgagatgagacaaccgctttgtttcctttccccttttttttgtttgttctctggttctatcctttctctttctttttctttttctttttttctttttttttctttttttctttttttgtttctgtttttttacataaccgaaggagaaaaacaaggaagcggcgttgactcagtttgtggcgtgatcaaacgggagatggtggcggcgcgctagggtttgaatggtgaaaaaacacaatgcaaccagcatcaaatgacgcgcaagcacacaaattcaacaatgcaaattattgaaagaaagtgcgaggctcaaaagggtgctgggataaggtctaacctgaatttttatgtggttttgtggactgtaggagaaaaaacactcgataaactcaccgatcaacctggaaatctgataccacttgatatagctgagttgcctgatctttcggtgagtggagataattccgatttggccgaagatgacccttgcgatc

SEQ ID NO: 57133 - DNA, 323 bp, Zea Mays
ctcttttgttcctccaaaatcttcaaaaacaacctattacctatacatagagttggagttaactcgtcattgttactggttataagaaagcaatataaactctagagcagacctgctccacccagagttttatagtagagttactctttaagtccatagagcgccttagagagcttgtacacatggtcagggtatctgtcatcctcgaagccaagggttgctccacatacacctctcctccttgattggctcatttaggaaagcactcttcacgtccatttggtagagcttaaaagaatgatgagcagtataggctaatagta

SEQ ID NO: 57134 - DNA, 864 bp, Zea Mays
cttcactatattatgagagggtgtacatgtttcttatatagaaaagtgagacccataaggggtaaacatggtatttgcccacataactcttcgtcatggtttgttaagagcatctccaagagatccttaaaaccttgatcctaagactatctccagcagactcactattttactccttatctcactcactattttaaactctactatgtaaacagttgaatctacaatgcaaaacagtactttacacggctgtttacatggcctactggaaatggcctaatccttattttaggctaaaaagaggaaaaaatgttcccaacagtaactatgcagtctccctaagtaactatgcattgtttcaatgagtgagatcggctttgcttgcgggctagtaagttaaaccctaaaaatagaagactaaaaagaagatgctttctgcataaataaaacaagattcaagcgatgttggtcggccgaccgatgggctccaatagagggaggttggtgatggctcactagggaggggctccagttgagggaggccgacggcgaagtccatgttcggagaggcgaggtgcgagggagcaagcgcgcggtggtagagcaagcatgcgagatttggacaaagagcgttgcagggacgaagtagggagatctaggtcgtcgattgacgaagtggaaacacaactccgatttgtgatggcgaccgagagcgtgcttccgagcggcgacacgagtgcgagagtgggggagaggaaatcgcgttgcgccatgtaggggagctctaaatctagcgagagagagaagaattccgcgggataggggagctcgaaggggaaggcgctgcagcatgtaggttacgac

SEQ ID NO: 57135 - DNA, 144 bp, Zea Mays
gcgctctcgaaggttagttctccgatccccctgcaggtttggcttggctataagatgagctgagatagattattatctaatctagcgtatcttcgtctatcatcacgcactccatgctttttgtcacgaaaactgttagccggc

SEQ ID NO: 57136 - DNA, 503 bp, Zea Mays
aaaagcccaaccagcccccgctccatcgctctccttccgcacttcacttggaagccatggcgtaggcccagggagatctagctagagtttcccgcatcggcctccgccacccaccgccgccgccccgccccgccccgccaaaggaacggaggatggaagccccgggctcgccctacgcctcctcgccggaatccgcccccaagcgtgcccctcgctccccaccgcagcagcagcctccctccgaggaaggaggtaactgccacgcgcctccctctcccttctccgtcccgtcgcgcgagcggggtgctggcaggttcgctctccccggcgtctgtatgtacgtggcccatgagctcgtgtgcctggatccgtgagatctgggcatccgcttcccgccccgatgcctcgagatctgtcagtagccggcgccagtgtcgcgtcgccatcggcgcgctgcgatttgagctgcgtttcccataggatcgccttcacggggttgccct

SEQ ID NO: 57137 - DNA, 74 bp, Zea Mays
atacaagaacctggcatatgtgctctctttcctgccatactactggcgagcaatgcagtgtctgagaaggtact

SEQ ID NO: 57138 - DNA, 2711 bp, Zea Mays
agagaaaatagccagtttatccatcggattcgatccttccgtttgcagtatggatccccaccgccgctcaccggaatacaactccctcctcctcgccggcccgcgcctgggtcctctgaagcaagcccacgcgcgcctcgtcgtctccggccacggcgattccttgccgctcatcaccaagctagccacgctcgcggttgcggccggcgccgcctcctacgcccgcctcctcgccgcctcccacccggcacccgactcctttctcttctgctccctcacgcgcgccaccgcgcgccgcgggctccccgccgccgccctcgccttctaccgctgcctactcgccgccgccctccccttctccagcttcgcattcacctccgtcgccaaggcctgcgcggacctgtccgcgatccgcgctggtatgggcatccacgcccacgccgtcctcctcgggctcggctccaaccggttcgtgcagacgtcgctcgtcgtgctgtattccaagtgcggccagctggatgttgcgcgcaagctgttcgacgcgattcgtgacaagagcgtagtcgcttggaacgcgatgatttcagggtacgagcagaacgggctcgctggaagggcgatcgaggtgtatagggagatgcaaatggccggggaagctccagattccgcgacgtttgtggccacgctctctgcctgtgcgcaggctggcgctttggacttgggacgtcaggtggacaagctcattgtttctgagaggatggagatgaatgtggttcttggtgctgcacttgtgaacatgtatgccaggatatggcatgcacggacatggcggcgaggcagtcaagctattcaatttgatgagacagcaagggccaccacccaatgatgtcacttttgttgcggtgctgtctgcgtgcgcacatgctggattggtaagcgagggccgggatgcttttgcttcaatgaagagtgtctacggattggtccctcgtgttgagcactattgctctatggttgatatgtatggaagggcaggacttcttgatgatgcgatgcgatttatacatgattcgatacccggagagcctggacctgaagtttggacagctatgcttggtgcatgcaagatgcacaaggatttcaatcttggagtggaggttgctgagcgattgatcgccctcgagcctgagagtccatctcaccgtgtgctgctttctaatctatatgctttgtctggtaaaatgaaccatgttgagaaggtgagggatacaatgattaagagaagattgaagaagccaataggatatagcttgattgagattgctggtgttgctcatttgtttcgcatgggtgagaagtctcaccccaaaacttcagagatttaccaatatttggagaaactgatcgaaaagattactgatgttggttatgtgcctaaaactgactcagtgttgcatgagttggaagaagaggaaagggagtttgcattaagataccatggtgaaaaactggctgtagcctttggactcatgatgacttctgggtgcaccactccaatcaggataattaaaaacctgcggatatgtgaggattgtcatctagctatcaaatatatgtcagccgtggagaatcgagagataattgtcagagatatgcaccggtttcaccatttcaaagctggaaagtgttcctgtcaggaatattggtgacgaggcctctctcgcaagctaaaaatctgaggaacaagagctgcaactcagcaacattgggagtgggacaccagcaacaacacctttactacccatcaaaattcacaaactgatgctgccaaatagagagcattaaccatggatgtaggaggatcttatcctaaaacccagccttacaaacggaaccataaaaaagaagattttgcatcaaagttgataatagggattaataggacatgttggaaatataccatgggacgtaacaagtacgtatgttggaaatctactatggggtataatagctgacgatatgaaaaagctcttctctgattgcaaaatgtttgttcatccgatctggaactgacaagaagatagacgaaccaaacggttgtgtggatgttgatttttttcctgatggcacatctcttgatgttcatcttatatggatatttggcaccttggccgttgttgttggagttagaacatttgtaaagggtcctttgtgcatatagcatatatggaagaggtacacatgaaaattgaccccccaaatcacaatatggtatcgcgtgctagggtttggcctcacaaccgctgcccgtaggcactgcagccagccatgcactgtcgatccatcaacgccgggtctgtgcgtctggccgccgcctgcgtggggctgctctcacgccgcatccgcgttgttgggggactggtcatggtgccgcctccacgtcgtcgaggagcgcggtcgtcgccctccgcctgcgtggggctggcgggcctcagatctgaaggcggtccaggtccggccgtggcgtgtggcctgcgggcgcaccaccgccgccgctgggaggctgctgccgacgccgtattaggacgcgaagccgaggcggaggagggaggccggcatgctgaagtgcgttgggtggacgatgtcatgcgcgtcctccgcaccatgtgagaaaagctgctcaaagcaagcctagtgcatcttcatccttg

SEQ ID NO: 57139 - DNA, 2657 bp, Zea Mays
agagaaaatagccagtttatccatcggattcgatccttccgtttgcagtatggatccccaccgccgctcaccggaatacaactccctcctcctcgccggcccgcgcctgggtcctctgaagcaagcccacgcgcgcctcgtcgtctccggccacggcgattccttgccgctcatcaccaagctagccacgctcgcggttgcggccggcgccgcctcctacgcccgcctcctcgccgcctcccacccggcacccgactcctttctcttctgctccctcacgcgcgccaccgcgcgccgcgggctccccgccgccgccctcgccttctaccgctgcctactcgccgccgccctccccttctccagcttcgcattcacctccgtcgccaaggcctgcgcggacctgtccgcgatccgcgctggtatgggcatccacgcccacgccgtcctcctcgggctcggctccaaccggttcgtgcagacgtcgctcgtcgtgctgtattccaagtgcggccagctggatgttgcgcgcaagctgttcgacgcgattcgtgacaagagcgtagtcgcttggaacgcgatgatttcagggtacgagcagaacgggctcgctggaagggcgatcgaggtgtatagggagatgcaaatggccggggaagctccagattccgcgacgtttgtggccacgctctctgcctgtgcgcaggctggcgctttggacttgggacgtcaggtggacaagctcattgtttctgagaggatggagatgaatgtggttcttggtgctgcacttgtgaacatgtatgccaggtgtgggcttgtgaacaaggctcgtgagtggttcaatatgctccaggaacgcaatgtggttacgtggacctccatgattgcaggatatggcatgcacggacatggcggcgaggcagtcaagctattcaatttgatgagacagcaagggccaccacccaatgatgtcacttttgttgcggtgctgtctgcgtgcgcacatgctggattggtaagcgagggccgggatgcttttgcttcaatgaagagtgtctacggattggtccctcgtgttgagcactattgctctatggttgatatgtatggaagggcaggacttcttgatgatgcgatgcgatttatacatgattcgatacccggagagcctggacctgaagtttggacagctatgcttggtgcatgcaagatgcacaaggatttcaatcttggagtggaggttgctgagcgattgatcgccctcgagcctgagagtccatctcaccgtgtgctgctttctaatctatatgctttgtctggtaaaatgaaccatgttgagaaggtgagggatacaatgattaagagaagattgaagaagccaataggatatagcttgattgagattgctggtgttgctcatttgtttcgcatgggtgagaagtctcaccccaaaacttcagagatttaccaatatttggagaaactgatcgaaaagattactgatgttggttatgtgcctaaaactgactcagtgttgcatgagttggaagaagaggaaagggagtttgcattaagataccatggtgaaaaactggctgtagcctttggactcatgatgacttctgggtgcaccactccaatcaggataattaaaaacctgcggatatgtgaggattgtcatctagctatcaaatatatgtcagccgtggagaatcgagagataattgtcagagatatgcaccggtttcaccatttcaaagctggaaagtgttcctgtcaggaatattggtgacgaggcctctctcgcaagctaaaaatctgaggaacaagagctgcaactcagcaacattgggagtgggacaccagcaacaacacctttactacccatcaaaattcacaagagcaagaggacgatgtcgaaaacatttcatttccaaaaagtttggtggagagcaactagattatccttttgtaagtttgtattatgcttagctagttgagtggttttttctttaaaagtgtccattcaatacttattttaagtttactttgcatttggatctaacttgttatattttttctattgtgatatctatcaaaattagagttggagacttggagtaggactgatgatttttgtaatggattgttggatggagtctacatggctgaacctgaatggcctggacctgaatggacatcatggtcaattggtcatggctgaacctgaatggacatcatggattcatggtcatggttctcttatttgtatttgtttatgttctatttttggtggacaacaagcatggatgaactgttctgtaatctactttttagtttttggatgaagaaatgcaactatgcaaatgcaagtatctgtattaggtgcaatgaactatgcaaatgcaagtatctgttctgtttagacaatatatgttgtcatgctgctatgaatcatggagacttgagtacctgacacttcttattttgtattattgtattgttggatgcatcatatttatatatttcattagttggatgaataactataagtatcaagtgcaactgatgaactattaatgttatatttcctataatctagaattctggactgcatttctattctggcttgtgagcctataacgagccgagccgag

SEQ ID NO: 57140 - DNA, 2732 bp, Zea Mays
gtttatccatcggattcgatccttccgtttgcagtatggatccccaccgccgctcaccggaatacaactccctcctcctcgccggcccgcgcctgggtcctctgaagcaagcccacgcgcgcctcgtcgtctccggccacggcgattccttgccgctcatcaccaagctagccacgctcgcggttgcggccggcgccgcctcctacgcccgcctcctcgccgcctcccacccggcacccgactcctttctcttctgctccctcacgcgcgccaccgcgcgccgcgggctccccgccgccgccctcgccttctaccgctgcctactcgccgccgccctccccttctccagcttcgcattcacctccgtcgccaaggcctgcgcggacctgtccgcgatccgcgctggtatgggcatccacgcccacgccgtcctcctcgggctcggctccaaccggttcgtgcagacgtcgctcgtcgtgctgtattccaagtgcggccagctggatgttgcgcgcaagctgttcgacgcgattcgtgacaagagcgtagtcgcttggaacgcgatgatttcagggtacgagcagaacgggctcgctggaagggcgatcgaggtgtatagggagatgcaaatggccggggaagctccagattccgcgacgtttgtggccacgctctctgcctgtgcgcaggctggcgctttggacttgggacgtcaggtggacaagctcattgtttctgagaggatggagatgaatgtggttcttggtgctgcacttgtgaacatgtatgccaggatatggcatgcacggacatggcggcgaggcagtcaagctattcaatttgatgagacagcaagggccaccacccaatgatgtcacttttgttgcggtgctgtctgcgtgcgcacatgctggattggtaagcgagggccgggatgcttttgcttcaatgaagagtgtctacggattggtccctcgtgttgagcactattgctctatggttgatatgtatggaagggcaggacttcttgatgatgcgatgcgatttatacatgattcgatacccggagagcctggacctgaagtttggacagctatgcttggtgcatgcaagatgcacaaggatttcaatcttggagtggaggttgctgagcgattgatcgccctcgagcctgagagtccatctcaccgtgtgctgctttctaatctatatgctttgtctggtaaaatgaaccatgttgagaaggtgagggatacaatgattaagagaagattgaagaagccaataggatatagcttgattgagattgctggtgttgctcatttgtttcgcatgggtgagaagtctcaccccaaaacttcagagatttaccaatatttggagaaactgatcgaaaagattactgatgttggttatgtgcctaaaactgactcagtgttgcatgagttggaagaagaggaaagggagtttgcattaagataccatggtgaaaaactggctgtagcctttggactcatgatgacttctgggtgcaccactccaatcaggataattaaaaacctgcggatatgtgaggattgtcatctagctatcaaatatatgtcagccgtggagaatcgagagataattgtcagagatatgcaccggtttcaccatttcaaagctggaaagtgttcctgtcaggaatattggtgacgaggcctctctcgcaagctaaaaatctgaggaacaagagctgcaactcagcaacattgggagtgggacaccagcaacaacacctttactacccatcaaaattcacaagtatctgtgttgtctgacagactattcttgttcagactgatgctgccaaatagagagcattaaccatggatgtaggaggatcttatcctaaaacccagccttacaaacggaaccataaaaaagaagattttgcatcaaagttgataatagggattaataggacatgttggaaatataccatgggacgtaacaagtacgtatgttggaaatctactatggggtataatagctgacgatatgaaaaagctcttctctgattgcaaaatgtttgttcatccgatctggaactgacaagaagatagacgaaccaaacggttgtgtggatgttgatttttttcctgatggcacatctcttgatgttcatcttatatggatatttggcaccttggccgttgttgttggagttagaacatttgtaaagggtcctttgtgcatatagcatatatggaagaggtacacatgaaaattgaccccccaaatcacaatatggtatcgcgtgctagggtttggcctcacaaccgctgcccgtaggcactgcagccagccatgcactgtcgatccatcaacgccgggtctgtgcgtctggccgccgcctgcgtggggctgctctcacgccgcatccgcgttgttgggggactggtcatggtgccgcctccacgtcgtcgaggagcgcggtcgtcgccctccgcctgcgtggggctggcgggcctcagatctgaaggcggtccaggtccggccgtggcgtgtggcctgcgggcgcaccaccgccgccgctgggaggctgctgccgacgccgtattaggacgcgaagccgaggcggaggagggaggccggcatgctgaagtgcgttgggtggacgatgtcatgcgcgtcctccgcaccatgtgagaaaagctgctcaaagcaagcctagtgcatcttcatccttg

SEQ ID NO: 57141 - DNA, 2969 bp, Zea Mays
gtttatccatcggattcgatccttccgtttgcagtatggatccccaccgccgctcaccggaatacaactccctcctcctcgccggcccgcgcctgggtcctctgaagcaagcccacgcgcgcctcgtcgtctccggccacggcgattccttgccgctcatcaccaagctagccacgctcgcggttgcggccggcgccgcctcctacgcccgcctcctcgccgcctcccacccggcacccgactcctttctcttctgctccctcacgcgcgccaccgcgcgccgcgggctccccgccgccgccctcgccttctaccgctgcctactcgccgccgccctccccttctccagcttcgcattcacctccgtcgccaaggcctgcgcggacctgtccgcgatccgcgctggtatgggcatccacgcccacgccgtcctcctcgggctcggctccaaccggttcgtgcagacgtcgctcgtcgtgctgtattccaagtgcggccagctggatgttgcgcgcaagctgttcgacgcgattcgtgacaagagcgtagtcgcttggaacgcgatgatttcagggtacgagcagaacgggctcgctggaagggcgatcgaggtgtatagggagatgcaaatggccggggaagctccagattccgcgacgtttgtggccacgctctctgcctgtgcgcaggctggcgctttggacttgggacgtcaggtggacaagctcattgtttctgagaggatggagatgaatgtggttcttggtgctgcacttgtgaacatgtatgccaggatatggcatgcacggacatggcggcgaggcagtcaagctattcaatttgatgagacagcaagggccaccacccaatgatgtcacttttgttgcggtgctgtctgcgtgcgcacatgctggattggtaagcgagggccgggatgcttttgcttcaatgaagagtgtctacggattggtccctcgtgttgagcactattgctctatggttgatatgtatggaagggcaggacttcttgatgatgcgatgcgatttatacatgattcgatacccggagagcctggacctgaagtttggacagctatgcttggtgcatgcaagatgcacaaggatttcaatcttggagtggaggttgctgagcgattgatcgccctcgagcctgagagtccatctcaccgtgtgctgctttctaatctatatgctttgtctggtaaaatgaaccatgttgagaaggtgagggatacaatgattaagagaagattgaagaagccaataggatatagcttgattgagattgctggtgttgctcatttgtttcgcatgggtgagaagtctcaccccaaaacttcagagatttaccaatatttggagaaactgatcgaaaagattactgatgttggttatgtgcctaaaactgactcagtgttgcatgagttggaagaagaggaaagggagtttgcattaagataccatggtgaaaaactggctgtagcctttggactcatgatgacttctgggtgcaccactccaatcaggataattaaaaacctgcggatatgtgaggattgtcatctagctatcaaatatatgtcagccgtggagaatcgagagataattgtcagagatatgcaccggtttcaccatttcaaagctggaaagtgttcctgtcaggaatattggtgacgaggcctctctcgcaagctaaaaatctgaggaacaagagctgcaactcagcaacattgggagtgggacaccagcaacaacacctttactacccatcaaaattcacaatgggaacttcagcggtattgcatttctcactgttaaggaacgtagtatggtcttctatatgatgttagatgcttcagcggttcagccttgaatctgtatggtcctaacttcaattttaattgcacataaatacataatcatagaaatgaattgaaatatctgcaatgactgctgcctcgtaatttttatcatagagctttaccaaactattcatttcactatcgctatgtttcaaaggtatctgtgttgtctgacagactattcttgttcagactgatgctgccaaatagagagcattaaccatggatgtaggaggatcttatcctaaaacccagccttacaaacggaaccataaaaaagaagattttgcatcaaagttgataatagggattaataggacatgttggaaatataccatgggacgtaacaagtacgtatgttggaaatctactatggggtataatagctgacgatatgaaaaagctcttctctgattgcaaaatgtttgttcatccgatctggaactgacaagaagatagacgaaccaaacggttgtgtggatgttgatttttttcctgatggcacatctcttgatgttcatcttatatggatatttggcaccttggccgttgttgttggagttagaacatttgtaaagggtcctttgtgcatatagcatatatggaagaggtacacatgaaaattgaccccccaaatcacaatatggtatcgcgtgctagggtttggcctcacaaccgctgcccgtaggcactgcagccagccatgcactgtcgatccatcaacgccgggtctgtgcgtctggccgccgcctgcgtggggctgctctcacgccgcatccgcgttgttgggggactggtcatggtgccgcctccacgtcgtcgaggagcgcggtcgtcgccctccgcctgcgtggggctggcgggcctcagatctgaaggcggtccaggtccggccgtggcgtgtggcctgcgggcgcaccaccgccgccgctgggaggctgctgccgacgccgtattaggacgcgaagccgaggcggaggagggaggccggcatgctgaagtgcgttgggtggacgatgtcatgcgcgtcctccgcaccatgtgagaaaagctgctcaaagcaagcctagtgcatcttcatccttg

SEQ ID NO: 57142 - DNA, 3876 bp, Zea Mays
gtttatccatcggattcgatccttccgtttgcagtatggatccccaccgccgctcaccggaatacaactccctcctcctcgccggcccgcgcctgggtcctctgaagcaagcccacgcgcgcctcgtcgtctccggccacggcgattccttgccgctcatcaccaagctagccacgctcgcggttgcggccggcgccgcctcctacgcccgcctcctcgccgcctcccacccggcacccgactcctttctcttctgctccctcacgcgcgccaccgcgcgccgcgggctccccgccgccgccctcgccttctaccgctgcctactcgccgccgccctccccttctccagcttcgcattcacctccgtcgccaaggcctgcgcggacctgtccgcgatccgcgctggtatgggcatccacgcccacgccgtcctcctcgggctcggctccaaccggttcgtgcagacgtcgctcgtcgtgctgtattccaagtgcggccagctggatgttgcgcgcaagctgttcgacgcgattcgtgacaagagcgtagtcgcttggaacgcgatgatttcagggtacgagcagaacgggctcgctggaagggcgatcgaggtgtatagggagatgcaaatggccggggaagctccagattccgcgacgtttgtggccacgctctctgcctgtgcgcaggctggcgctttggacttgggacgtcaggtggacaagctcattgtttctgagaggatggagatgaatgtggttcttggtgctgcacttgtgaacatgtatgccaggatatggcatgcacggacatggcggcgaggcagtcaagctattcaatttgatgagacagcaagggccaccacccaatgatgtcacttttgttgcggtgctgtctgcgtgcgcacatgctggattggtaagcgagggccgggatgcttttgcttcaatgaagagtgtctacggattggtccctcgtgttgagcactattgctctatggttgatatgtatggaagggcaggacttcttgatgatgcgatgcgatttatacatgattcgatacccggagagcctggacctgaagtttggacagctatgcttggtgcatgcaagatgcacaaggatttcaatcttggagtggaggttgctgagcgattgatcgccctcgagcctgagagtccatctcaccgtgtgctgctttctaatctatatgctttgtctggtaaaatgaaccatgttgagaaggtgagggatacaatgattaagagaagattgaagaagccaataggatatagcttgattgagattgctggtgttgctcatttgtttcgcatgggtgagaagtctcaccccaaaacttcagagatttaccaatatttggagaaactgatcgaaaagattactgatgttggttatgtgcctaaaactgactcagtgttgcatgagttggaagaagaggaaagggagtttgcattaagataccatggtgaaaaactggctgtagcctttggactcatgatgacttctgggtgcaccactccaatcaggataattaaaaacctgcggatatgtgaggattgtcatctagctatcaaatatatgtcagccgtggagaatcgagagataattgtcagagatatgcaccggtttcaccatttcaaagctggaaagtgttcctgtcaggaatattggtgacgaggcctctctcgcaagctaaaaatctgaggaacaagagctgcaactcagcaacattgggagtgggacaccagcaacaacacctttactacccatcaaaattcacaagtaagcactagcaattgaccatcattttaaattgtgttctattacacaattgtccacaatataagttcctggaggtcagaacaactaaccactgattagagtcgactagtcatcctagtcgatcttatcgtccctaaggcgactaggtcgactatacgatttaaaaacattgatttcactaaggctgaactatatgctgctgtaatcattgtcggtcatttgccttttctgttagtctgtcttattggtccttactaggattccatattttttcaatcagaatttggtttaaatatttatgatatgatggggctgatagttgtgccactctttatcatcaaaataataaacatttgcaagctatccagacaacagtcccaactatgggagcaagcatatataatcttttgattcaaattgaagctaagatagtaagttttggcaactagaaaatgatgggagaatacacgatctctagcagggcctacctggacaactggtcaactggataaagcaaattgatctctaactgcataatagcacgagatgaaaaatattttgttggccatctgttgattatcattatcaattttaactacttaaaagcacaatgtgagaaatgttttaacttagcttcgtaatggaaatggtttgtgggaatgcattgtacttctacattctgttaattaccggtgttcatagatgccatgaatgcactttagatgcagtatcacaatgattgactgcatgccctttcccggtagtgggaacttcagcggtattgcatttctcactgttaaggtcagtttataagccagtttttctttcttttttttaaaaaaaaataagattctttttcatttggggacaccaacttattacatgttcaacattcctattccataaccagacatcgatctgacttgttaacagacctgggttaggaacgtagtatggtcttctatatgatgttagatgcttcagcggttcagccttgaatctgtatggtcctaacttcaattttaattgcacataaatacataatcatagaaatgaattgaaatatctgcaatgactgctgcctcgtaatttttatcatagagctttaccaaactattcatttcactatcgctatgtttcaaaggtatctgtgttgtctgacagactattcttgttcagactgatgctgccaaatagagagcattaaccatggatgtaggaggatcttatcctaaaacccagccttacaaacggaaccataaaaaagaagattttgcatcaaagttgataatagggattaataggacatgttggaaatataccatgggacgtaacaagtacgtatgttggaaatctactatggggtataatagctgacgatatgaaaaagctcttctctgattgcaaaatgtttgttcatccgatctggaactgacaagaagatagacgaaccaaacggttgtgtggatgttgatttttttcctgatggcacatctcttgatgttcatcttatatggatatttggcaccttggccgttgttgttggagttagaacatttgtaaagggtcctttgtgcatatagcatatatggaagaggtacacatgaaaattgaccccccaaatcacaatatggtatcgcgtgctagggtttggcctcacaaccgctgcccgtaggcactgcagccagccatgcactgtcgatccatcaacgccgggtctgtgcgtctggccgccgcctgcgtggggctgctctcacgccgcatccgcgttgttgggggactggtcatggtgccgcctccacgtcgtcgaggagcgcggtcgtcgccctccgcctgcgtggggctggcgggcctcagatctgaaggcggtccaggtccggccgtggcgtgtggcctgcgggcgcaccaccgccgccgctgggaggctgctgccgacgccgtattaggacgcgaagccgaggcggaggagggaggccggcatgctgaagtgcgttgggtggacgatgtcatgcgcgtcctccgcaccatgtgagaaaagctgctcaaagcaagcctagtgcatcttcatccttg

SEQ ID NO: 57143 - DNA, 1576 bp, Zea Mays
ccattcaaccacccacgcgctcctcatgattatttattttatttattcaaagcaaagtctcctgcttccttccgtcttgctcctcgacccttcttccttccccaccaccgcgttccaatcaatcccaatcgcgacccagccagaggcgagcgcgagaaaatccccattccccaatccccacgccacagcctcccttccctccccgtctcctccaaattcaatcgtctccaagcgccaatccgccccgtctccaaatcccaggcaggcaggcagccaaccagccatggagtgcgagccggaggagctgcagttcctgggcgtcgtcggcatctaccgcttctccgcggagatcctccgaggcccgcaccgcccgctcttcgcgcgcatcgcggccgccttcgcgctgcccctctccgcgctgttcctcctgcacgtcgccatctcgcacgcgctcttcacccacatcgactccgacgacacggccctggacgcatcctccccgggcaccgacacgcagcgccgcctgctgtcccgcctcgcctccgactggctcgccctgctcctcttcaagtccgcctacctcctcgcgctcctcctgctctcgctcctctccgtcgccgcctccgtgttctccgtcgcctccgtctactccgccaagcgcgacgcgctcaccttcccgcgcgtgctctccgtcgtgccccgcgtctggcggaggctcgccgccacgttcctcgccgccttcgcgctcctcttcgcctaccacgccgtcgccgtgctcgtcttcgtcggcctcctcgtcgccgcggacaacggctccggcctcgcgggcctgctcgccttcctcgtcgccgtcgcctacctgctcggcctcgtctacctcggcgtcgtctggcacctcgccagcgtcgtctccgtgctcgaggaccacaagggcttcgccgccatgcgcaagagcaaggacctcatcagggggaagctcgtcaccgcgggtgctatcttcttcacgctcaacgtcgtcttcgccgccgtcgagctcggcttccgcgcctgggtcgtcaggggatccggcgccgcgtcgtcaaggctcttgctcggcctcatcatgctcgccgcgctctgctgcgtcgtcatgctcgcgctcgtcacgcagaccgtcgtctacctcgtgtgcaagagctaccaccacgagagcctcgacaaggccaacatctccgaccacctcgaggtctacctcggcgactacgtcccgctaaaggcgtccgacgtgcagatggagcagttccagccaggtaatctgtaattgtgtacgtacagcaggcagcaggtgatgaacatacttgcgttaagtaggaagaattgggaatttttgtcttgggggtacaagaataatggggatctgtacttcccttagtctcttcctcaaggacatggttccttcccttgtttacatgatttataaacaggagatgaatggaattgggcatgccgaatttacaaacttactatcaggagatgaatgcctgattgctgtggtggtacagatatgcatgttgtgtctatatgatgtttaccctac

SEQ ID NO: 57144 - DNA, 2884 bp, Zea Mays
gcacgacgcctacatctgtcaaccacaacccaagcgctcccccctccccgtcgcctgcaggatctcctcgggccaaggaatcgttcccctccggcgaccttcctccctccctccgttccgtttcggtccttccactgtatcaccggcaaagcaaaggatcggaggccactccgcccggaggagcaagccgactctgagcattggagttgtgcttgttcaaaagtgtgaattgcatggagatgggaatgactcctgatgtaatgtatggacaaaatgtttttgttcctgctactgcaactccctaccaatatggttatgcagttggatcacagatggaatggtgtaaccagtcgagctctttaggatatgatggccaagataatttctatccgactgaaggcatgcaatgcgtatactacgcagccccagacaacggatctgtgcatcctacctacagttcttacccttctgatccttctttcgtacccgatggctcatttatgcctcaggagtatgttgctgaccctgctaactccacatgccaaatagcccagacatcctattatattccagctgttcttccttatgcacaagatagtgccttgggaagcgcgaccacacatcttcactccaactccaatgttgcatttcttcctggcataccaggttatgctgcaacatctgcaaatgcagcatttcctttaattgctcccgtcaccacaaaaagtgacattgttatgcatccacatgtacagtctactattgtcccttcaaagcagttccaggactatgcaaagccaccaaaggttcagctgcacaattcagttccacagaagcaagagttgccagatagatgtatgattcctgctaaactccctcatgcttctcaggtatcagcacatttgtctggaaacaattgtcttggatgtgctgctgggtctgatcttcggaagtgggctgctgccgagaaattccaaccatcttcaaagtcaagtggccatctaaatgctactggccaaaaagcgcatagcttagttgattctgagaaaccaagcaatcagaggcctgctataattgtgaagtctcacacaacaaggctccctgttggtaatccggatgggacaatcgttataagaaccgaccagtacaacagagatgatctccgactcgactatatgtatgcaaagttctttgttatcaagtcaattggtgaggcagatgtgcacaaatcgataaaatatggtgtatggtcaagttcctccagtggaaacagcaagctagatagcgcattcagggatgctgacaggatatcgaggaggcattctactaagtgtccggttttcttgttcttctctgtcaatggtagtgggcacttctgtggcatggctgagatggtcggacctgttgattttcacaaggacatggacttctggtgtcaggataaatggaccggatgctttcctgtgagatggcacatcgttaaagacataccaaatggttctttgcagcatatcacactgcagaataacgaaaacaagcctgtgacgcacagcagagatacacaggaagtaccatacctccctggaatgtctgtgatcaatatcttcaaagacatcaaagtgcggtactgcctttttgatgattttatgagctatgaggcagaagaggcgcaaaagagggcacacagaaggtgcaagctaagttcgaatgctccagactttgtacctgtctcacagcgtacaaaagatgagtctggcactgagcagagagaatccaggagcgtacttgtagacaggacatctgggatacaaaatgcggccgagaagccccacgataccaaggtgatcaagcctcaggatccgtgcgtctccgaagagcaggctagcgaggccgagaaagagaatggacctcagggatgtcgttgcagcggcaatcagggccaagaggaggcagcgaaaactgcaactaaccacccgccagcttcaggcttgaaggcggcaggtgcggaggggaagcagcagcagcagcgctggaagaaggtcgaaaatccaaagcagcatgcggacagcgtccctgcccagtgctcacaggaagaagcacctgagaagcggttaaatggggtcagcggctgttcgagcgcagttcaagagggttgcgaggagcagagggccgctgccaaacttgcttctctcaagatcggttccagggcggcagtggaagctgaccgtaaaactagcgcagttggtgtggtgacaatcggctcgatgcctgtccgggttgactgttgtgacgtctagtagtggcccatccggagctttttttttttggtctcacccacagttttttccctttttgcccttctgggttaatcttttacccctccctgtctgccaaggctttcatttccatttccatttccattttcctttttcttttggttgaatgtgcctgccatggttggtggttcctagcttctatatggcatcaaaaaaagaaaaaaagaaaagaacaaaaaaagatgatgattagttaggttcaagtttcattgagtgaaaagctagttttaaaggcaacattctggtggtgggtggtggtttcttttgtggaaaagaaagaagagactatatcagacgttcgttttaatgacattattaagaaaaaaagagagtaggttaaactcttgtgtctgcgatttcttgcttgccctatcttgccagctgccctggactgaagttttcttttttttattgttattatacgctagtgtgactcgttttctttgttagtttgtaagataatagtgaaaaatgcccatatgtactgtctcgcccattacgaactgattctgagattctatgatgttggattaaacgatgattatatc

SEQ ID NO: 57145 - DNA, 2945 bp, Zea Mays
tttatatattccgtgagatcaaaccatagattctttcattcagctctgatggcttcgttccattgcaaaccacctcccgttctgatttctgcgggcggaattccataaggccctcccccctcccctatcctcctccccttgccactccaattcctctgcaaaattttctcatggcagccgacgtttccatccgcactcgatccgcctcaaccacccgctaattcctcctagttctagacttctagtctcctctctctctctctctctctctctctcctgcgccgactcatcttcatcctcgtctcacctccctgctgctgctgacgctgctgccggcaagatcaaatcgttcaaaaggtgttttaggtgattggtgctttcgacctcattagtgccttttgttcaattgctggacccaaggagcagagttctgtcgacatggcatctccaagaggaaggatgtcatttccccttcgttcctttctgatgatctgcctcatggctcagctgggagcttccaatgttgtactcatggcgaacaacactaccctgtcgttcgacgacgtcgaggcaatttttactccagcagtgaaaggttcaggtgtaaatggtgtcctttatgctgtggaacctatggatgcatgcagtccattgaaaacaaaagcgataggaggctctgtctcaccatttgcgttggttataagaggcggttgccatttcgatgacaaagttagaaatgctcagaatgctggattcaaggctgctgtagtatatgatactgaagacaacggtgtccttgtttcaagtaatgatccagacatcatttcttttttttaccatagcatcagttacatgcaattctttatcagtacgcggctacaagcatttgattatttcttgtccataattctgattaaactgttaagaggaaaaataaatttgtaaagcagctctaaactattatatcggttccattgaaactgaaaggtagagaactgaagttatcaaacctcaatggtaaaacttttaccatttagagtagttggtgagtgcatatacttgcaatattaattaagccaggattattgcagtggctggaagctcgtctggagtccacatatatgccgtgtttgtctctaaagcgtcaggggaggagctgaagaaatattcaggccaaactgacgcagagttgtggataataccaacatacgcgaactcggcttggtcaatcatggcaatttcatttatatcactgcttgttatgtctgctgtcctagccgcgtgtttctttgcgaggagacaccagataagacgggacagggctcgacttccccaaactcgggagttccatggaatgaacagccggttagttaaagcaatgccaagtcttattttcacgaaagtgcaagaagacgactgcacatcagcaacatgcgccatttgcttggaagactacagtgctggagaaaagctaagggttctaccttgtcgacacaagttccacgcagcctgtgtggacctatggctcacctcctggagaacattctgccccgtatgcaagcgggacgcgaatgctggaacaccagacccccctgtatcagagtcgacgcctttgctctcatcatccgccattcgcttaccagaaccaaccgcttcggcttccttccggtctacagtggcagcagcagcgtctccccccaggccaatcagccggcatccgtcaccatcacggtccatatcccgcaagcactccgtttcgggttccagcatccctggcacccctatccccaggtttcatgcaagctcatcatctcctacctgcacaagtggaagcagtttggacctcgcaaacatgccgtcgtctccatggcctcgcgcttcgcaccttgcatctgctcactcttcgtgcggtggccgcctgtccccgccgatccacatcaggaatacctctgcagcgcacgtctcgcgctctgcctatggatctcccagccgttacgtaggctcgtcgcacatgtcccgtggatctccgagttgctactaccttggatcttcttcagggcagcagcatccttacctgaggcactgcaccttgtcaggcacgagcctgttcaccatggtgccccaatcaccgcaacagaaccagctgcagcacggtggagactcggaaaaagatctgtcagctgctgcaccattccgtcagctctactacctgcagcattgtccagattctggcacgtcgtctcagtcgcttccagggtgctgattcttcattcttgctgcaaaattcaccattttaacattgatggtggctccagtaaagctcccggccgtgaggaatcttacatggcaccgaattgacatgtggatttgagctcctcagttcaccatgatgatgagagaaaaaaggtgcgacagaattgcttgtaagaagagagaattgcaccccccagaatgtgtggcttcatcttgaagaagcaaatgcccatgtcgggtttcaccagcgtttagcgtgtactgatacagctctgtagtaattctagttgctgtttgtctatcgaggtttgagccggtagcattccttcctctcttttttgttttcctaattttgaattagttatatgacagacaaggttttcaagaaaagaaataacaagttttacccctgcatttttacagagaggtatgttgaactcaggatctttgccttgcctcgatgggatggttttttaccactgtgttgtttatggtcagtgaaatgtgcatgaagcctcgatggcacttgttctcccgttcagtatgaactacttagtaagtcgctagcagactagcaaattcactataggaaatttaaatttatgggggagttgctctgatgaggcggaaagattgttggtgccaagaaacgcagcagcagatcgactttattgatattcataattcgtaca

SEQ ID NO: 57146 - DNA, 2640 bp, Zea Mays
ttctttcattcagctctgatggcttcgttccattgcaaaccacctcccgttctgatttctgcgggcggaattccataaggccctcccccctcccctatcctcctccccttgccactccaattcctctgcaaaattttctcatggcagccgacgtttccatccgcactcgatccgcctcaaccacccgctaattcctcctagttctagacttctagtctcctctctctctctctctctctctctctcctgcgccgactcatcttcatcctcgtctcacctccctgctgctgctgacgctgctgccggcaagatcaaatcgttcaaaaggtgttttaggtgattggtgctttcgacctcattagtgccttttgttcaattgctggacccaaggagcagagttctgtcgacatggcatctccaagaggaaggatgtcatttccccttcgttcctttctgatgatctgcctcatggctcagctgggagcttccaatgttgtactcatggcgaacaacactaccctgtcgttcgacgacgtcgaggcaatttttactccagcagtgaaaggttcaggtgtaaatggtgtcctttatgctgtggaacctatggatgcatgcagtccattgaaaacaaaagcgataggaggctctgtctcaccatttgcgttggttataagaggcggttgccatttcgatgacaaagttagaaatgctcagaatgctggattcaaggctgctgtagtatatgatactgaagacaacggtgtccttgtttcaagattattgcagtggctggaagctcgtctggagtccacatatatgccgtgtttgtctctaaagcgtcaggggaggagctgaagaaatattcaggccaaactgacgcagagttgtggataataccaacatacgcgaactcggcttggtcaatcatggcaatttcatttatatcactgcttgttatgtctgctgtcctagccgcgtgtttctttgcgaggagacaccagataagacgggacagggctcgacttccccaaactcgggagttccatggaatgaacagccggttagttaaagcaatgccaagtcttattttcacgaaagtgcaagaagacgactgcacatcagcaacatgcgccatttgcttggaagactacagtgctggagaaaagctaagggttctaccttgtcgacacaagttccacgcagcctgtgtggacctatggctcacctcctggagaacattctgccccgtatgcaagcgggacgcgaatgctggaacaccagacccccctgtatcagagtcgacgcctttgctctcatcatccgccattcgcttaccagaaccaaccgcttcggcttccttccggtctacagtggcagcagcagcgtctccccccaggccaatcagccggcatccgtcaccatcacggtccatatcccgcaagcactccgtttcgggttccagcatccctggcacccctatccccaggtttcatgcaagctcatcatctcctacctgcacaagtggaagcagtttggacctcgcaaacatgccgtcgtctccatggcctcgcgcttcgcaccttgcatctgctcactcttcgtgcggtggccgcctgtccccgccgatccacatcaggaatacctctgcagcgcacgtctcgcgctctgcctatggatctcccagccgttacgtaggctcgtcgcacatgtcccgtggatctccgagttgctactaccttggatcttcttcagggcagcagcatccttacctgaggcactgcaccttgtcaggcacgagcctgttcaccatggtgccccaatcaccgcaacagaaccagctgcagcacggtggagactcggaaaaagatctgtcagctgctgcaccattccgtcagctctactacctgcagcattgtccagattctggcacgtcgtctcagtcgcttccagggtgctgattcttcattcttgctgcaaaattcaccattttaacattgatggtggctccagtaaagctcccggccgtgaggaatcttacatggcaccgaattgacatgtggatttgagctcctcagttcaccatgatgatgagagaaaaaaggtgcgacagaattgcttgtaagaagagagaattgcaccccccagaatgtgtggcttcatcttgaagaagcaaatgcccatgtcgggtttcaccagcgtttagcgtgtactgatacagctctgtagtaattctagttgctgtttgtctatcgaggtttgagccggtagcattccttcctctcttttttgttttcctaattttgaattagttatatgacagacaaggttttcaagaaaagaaataacaagttttacccctgcatttttacagagaggtatgttgaactcaggatctttgccttgcctcgatgggatggttttttaccactgtgttgtttatggtcagtgaaatgtgcatgaagcctcgatggcacttgttctcccgttcagtatgaactacttagtaagtcgctagcagactagcaaattcactataggaaatttaaatttatgggggagttgctctgatgaggcggaaagattgttggtgccaagaaacgcagcagcagatcgactttattgatattcataattcgtaca

SEQ ID NO: 57147 - DNA, 1550 bp, Zea Mays
aagatttcacacgcattcagcaactttattttgcttcctggtttaatgatgttgcgtacattgaattttagttgagtgcatgcacttaaaacatcaccttgagttccacgcagcctgtgtggacctatggctcacctcctggagaacattctgccccgtatgcaagcgggacgcgaatgctggaacaccagacccccctgtatcagagtcgacgcctttgctctcatcatccgccattcgcttaccagaaccaaccgcttcggcttccttccggtctacagtggcagcagcagcgtctccccccaggccaatcagccggcatccgtcaccatcacggtccatatcccgcaagcactccgtttcgggttccagcatccctggcacccctatccccaggtttcatgcaagctcatcatctcctacctgcacaagtggaagcagtttggacctcgcaaacatgccgtcgtctccatggcctcgcgcttcgcaccttgcatctgctcactcttcgtgcggtggccgcctgtccccgccgatccacatcaggaatacctctgcagcgcacgtctcgcgctctgcctatggatctcccagccgttacgtaggctcgtcgcacatgtcccgtggatctccgagttgctactaccttggatcttcttcagggcagcagcatccttacctgaggcactgcaccttgtcaggcacgagcctgttcaccatggtgccccaatcaccgcaacagaaccagctgcagcacggtggagactcggaaaaagatctgtcagctgctgcaccattccgtcagctctactacctgcagcattgtccagattctggcacgtcgtctcagtcgcttccagggtgctgattcttcattcttgctgcaaaattcaccattttaacattgatggtggctccagtaaagctcccggccgtgaggaatcttacatggcaccgaattgacatgtggatttgagctcctcagttcaccatgatgatgagagaaaaaaggtgcgacagaattgcttgtaagaagagagaattgcaccccccagaatgtgtggcttcatcttgaagaagcaaatgcccatgtcgggtttcaccagcgtttagcgtgtactgatacagctctgtagtaattctagttgctgtttgtctatcgaggtttgagccggtagcattccttcctctcttttttgttttcctaattttgaattagttatatgacagacaaggttttcaagaaaagaaataacaagttttacccctgcatttttacagagaggtatgttgaactcaggatctttgccttgcctcgatgggatggttttttaccactgtgttgtttatggtcagtgaaatgtgcatgaagcctcgatggcacttgttctcccgttcagtatgaactacttagtaagtcgctagcagactagcaaattcactataggaaatttaaatttatgggggagttgctctgatgaggcggaaagattgttggtgccaagaaacgcagcagcagatcgactttattgatattcataattcgtaca

SEQ ID NO: 57148 - DNA, 332 bp, Zea Mays
tgcttttcctactggcttcttagataaaaagcaaggaaagcaaaaggttgcatcttttgttggcgagtattctaaccaagaaaaagtttcaaaccactgtgactgaaacctccgtggatgattctttggacctgaaggggtgtaagaaaaaatctggcaacgtaagcctgggtctctttctacaaccaacacaccagtatcttcaaaatttactcgacgaaccttaggagatggttgttctggagcttcctcttattgtgcagcaagccaattagcaatttcatattactcagaatcagaactattttgttcttgttctcttgggacatcga

SEQ ID NO: 57149 - DNA, 5911 bp, Zea Mays
cgcctcacctcacctctccacctgccgtcgtcttcctttcgttcctagacacgctagacttggctttggccataccttggactccccttccctctcctctccccgtctcccggcgtgcgtgcgtactacttactgcttgtccaatcgccgcgaccagagctcccgcgcacgctactggagaggattccagcgcccgtcgagcaacaggactctagcgcccgacccgacaaacgacagatagtagctactgcctccctacaccgtctcggcatctccgggggcacggcacgggaacggaggagcggagaaatccatccgccgaaccgcttgctttgcttggcaggcaccccgtacaattgggggttccggttcgaggaacgctcgggggggcgtgtgtgcggccgccttcgctcctcatccagaccacttgattacgccgcgctccctacgacaggaggtgcccaggccgaggtccttcgccggcgacgagcaccaaccagccaattccagagcaaccaaccgcaagggcatgtgacaaactgccgcctgcggtgccttcgccccaggcaatgtgctccgacatggatcagcgcgaccaccacgcaaccagggaggctgcaccagaggctaatggttaccatcacagcccccatggtgtggaccagagtcaggttgtggatgctgataagcatataaaccatcattccacagacgacaatgctccctccagcgcttcaggccacagacatggtggtatcagccgtcatgcatccacatcttctgttgatgaccgctccatcaagtctggtgacgattctgatggggccgagagtaccaatggcagaagcagtaacacggagatctcgtttctagaaaatgataccgtctggataccacctcaagcggcagataaggaggatgaggcccagagttttgctacaagcattgcttatgacgacgacgatgacgattatagtgatgggataaagtggggccagtcaagtttcccatcccctggtaagcagcatgacgccggcactagcaatcatagggaggtacgagaaaaagcgatgctagaagctatgaatggccagctgaagatacttgtcagtcggtttctcgcatctgttggcattccgtcttcgaacgaggaggctagcgatagctggcttgacattgtcacctccctgtcatgggaagcagcgctacttatcaaacctgatggtagcatgggaaaggaaatggaccctggctcttacatcaaagtcaaatgcatagcatctggtactcgccggcaaagtgaggtgatcaaagggttagtattcaagaagaacgctgctcataagcacatgccgacaaattgccacaatcctaggcttctacttgtcaaaggagtccttgggcattctgatgtcggtttgtcgtcgtttaattcaatgggtcaggaaaaggacctgttggagagagctatcggtaaaataatggagatatgcagtcccaatgttgttctggtcgagaaaactgtttcacgaaacattcaagaacttcttctgaaagaaggtgtcactctaatttttgatttgaaactcaaccggctacaaagaattgcgcgctgtactggctctcccataatatcgttttcagaagttttggataaaccgaagctgaagcaatgtgactactttcatatcggaaaatttaccgaggagcacaacaatgccagtgagggtggaaagatgacatctaaaacattaatgttcttggaaggctttccatgtccactcggttgcacgatcttgctaaaaggagcaaacagtgaagaattgaagaaggtcaaacaagtaatgcattttacagtctttgcagcatatcacttgatccttgaaacatctttctttgaagatcaaagggtttttctgaatgatagtactacaaaagaaacttctgctactgctacagaagggacttatggtgttgctgctcttagtgggcctattcctaactttccttcacatgatgattctccggcacttagactgttccatgccacttctaatagctatgctgatgtgaacaaacctttgatatctccaagaaatgtggataaattcagtgcagtatccagcagctcttcaaatgaccttgaacaaggtgcaaatgtcaggtccaataatgccgagaggttaacattaccagtccaagggccactaaggaaattgttcgctgacatgttatgtcaccagaatatttacttacccgttacatcattgcaagaggcaaatgataacaggaaggaagtcagggttgaatccagtcaagaaactgttagtaatggtttccataggccaaagacaggagagtctgtgatttccattgaaaatggggagtccataaatgatgcccagacacaagaaattactcaagcaataatgccaactggttcttctgtaagtgataaggatgcagaatcacctgttatgggagacaatggggcacatagtactacaagtatcattatcaaagagaagcatgctgacggcgatcaagctgatgatgcacttgattctcacagcatactgattttgatgtctagccagtgcacagaaaagcaggttatctgtgaacaaagccatttaacccgtataaaatactatgggagttttgatgtgtccttggggcgatatttgcaagacattctacagaatcagaaactgagttgctcttcatgtggagagcctccagagtcgcacatgtactcctacacgcaccgcaatggaaatttgaccgttctagtgaaacgtctggtgcccaaacactatttgcctggcgaatctgaaggaaaaatatggatgtggactagatgctcaagatgtgatcatgaacatggggtatccaaaccaactccaagagtactaatatcagctgaagcacgcaacctctcgtttgggaaatttctggagctcagtttttcaagccactctgcagcaagaaggttatctatatgtggacatctggtcaacagggattgcttgcgtttttttgggctgggctctaaagttgctatgttccggtactcacctgttgaaatttacactacctgcaaaccacaacctactctccaattcgtcaaccccatcagacaggattggtttgaaggacaaaggagaaatgttcatgctaaaagtatggcacttttctctggggttgcaagatttctacagaacttgaagaatgaacatcctgatgcaataacattagcagtcaattgtggcctcacactccctgttaaggacttcactgaactagaagagttgttgataaaagaaaaggcccagtttgagagttctttggacaaggccactgacgaaaatgggaaaccattcgggtctgtgcatggagtattgaatataaattggtactatcaggatcttctacttaagctttacatttgggaccgccgtctatatcaactattctattgcaaatctgtccaactagaaagttgttctaattacaagaatcctgctggtactgttgatgggaactgtgatgataactttggtgttgataagaaaatcggtgaaattacatctgatgaaattacggcagctttgggggtatccagtaccatggagtctgcaagtaacaaacttgatcatcaatcaggtgacaccacagcactcttacttcataaaagccaggaagctgggcactcggaatttccttgcaatggaggtagtaaagctgaagaatcttctattgctcatggtcaaataaaggtagatggcacaacagaaaccacaaatgatccttgttttgaaatatccaatgatatggaggtccaggccaatcttacagtagcagatccaatacccatggaacaggagcgttgtagcactccccaacaattcaaatatccttattgggatgacagggagaggtggatttggaattcattttctgagtctcaaatggcttacagggatgacattgaaattggatatttgggcaaatttgaactcattaacaattatttgccacattatctttctcccttgtttgaacaacatgatgattcatactctccgcagttcgcggtaggtccaggtagtaatattttgtgcataatggaagatgagatatccagcataatagctcgtgctcttgccatatctgatgaacgccaccatttgatagatttaaaattcgagaacggaatggattattccaaaggagagtatgctaaagcaatagagaaatcttttagttttctgtctgaaagttctttcagctcatcaccatggtcatctacagattctgaagcaagcttatcgtctctgtcttcattttcatctgatgacttttctggttatgatagctcatctttattgtccccaatgcatccagaaatgactgtgaatgggaaagtaactctcaaagacaaatattcagttactgttgtatatgacaatcaattctttgcactccgaaaaaagtgttgcccatccgagcttgcatatattacttctttaagccgctgcaagaagtggaatgctcaaggtggaaagagcaaggcctattttgcaaagacgacggatgacaggttcatcattaagcaaatcaagaaaacagagtttgagtcatttattaaatttgcacctgattactttaagcatgtttaccattctctggacactggaagccaaacttgtctcgccaaaatattaggaatctatcaggttaagcaaattaagcatggtaaagaggtaaagattgacttgatggtgatggaaaatcttctctttggccacaatatttcacgaatttatgacctcaaaggtgctacattttcgcgacgcatcactgactcaaatgatcatgatactgtttacctggatcaaaattatgttgaggacatggggttttctccaatctatattggtggaagaacaaagcatcttttgcagcgtgcaatctggaatgacacggcttttctcacttcggtgaatgtcatggactattctctacttgtgggagtggacaaagagaagcatgaacttgtgtttggcatcattgattatctgaggcaatatacttgggacaaacaactggagacatgggtgaagacttctctggtagtacccaaaaatgttttaccaactgtaatttcccccaaggaatacaaaaaaaggtttaggaagttcatggcgaagtactttctgtcagttccagacacatggagtcctgataatccgtctaagccatgcaaatcccttggtcagagcaatcgcaagttggcggaagtccagaatggtgataacctgtcagagcacccaaatgaagttgaggggtgtgcctaatcatgtgcaggatttcctggcagttttgttgaatcctatcatgttgttgtttggctatatttcactttgtaaaatggtgtacatagaaggacctcactgttgatttatccaaaagtttgcggtttttaggcaaattgttgggcaagtgaggtccacaggacgtgtacctatgttcattgttaatttcacaattattatagtgaaattaagaattcatatgatcatttttttggacctaccacttgtgagactgaagcagtctattcttcacttatgactaactgtccaagaccaagatagacatttcctacctctattgaaattaggtcaatttgagtattatgttgtactgtgtacccccactgtactgctgggatatgtaaaaggttccgtataaatgtctgctcccctgaccttgtttgttgcacgcagcacaatacatattttgtgtttgatggatgtccagtttctgtattgctgcccacttgcacttttttttggttctgcacaatgtacaaccttttcagatctcctggtatagaacatattgc

SEQ ID NO: 57150 - DNA, 5818 bp, Zea Mays
cctcacctcacctctccacctgccgtcgtcttcctttcgttcctagacacgctagacttggctttggccataccttggactccccttccctctcctctccccgtctcccggcgtgcgtgcgtactacttactgcttgtccaatcgccgcgaccagagctcccgcgcacgctactggagaggattccagcgcccgtcgagcaacaggactctagcgcccgacccgacaaacgacagatagtagctactgcctccctacaccgtctcggcatctccgggggcacggcacgggaacggaggagcggagaaatccatccgccgaaccgcttgctttgcttggcaggcaccccgtacaattgggggttccggttcgaggaacgctcgggggggcgtgtgtgcggccgccttcgctcctcatccagaccacttgattacgccgcgctccctacgacaggaggtgcccaggccgaggtccttcgccggcgacgagcaccaaccagagcaaccaaccgcaagggcatgtgacaaactgccgcctgcggtgccttcgccccaggcaatgtgctccgacatggatcagcgcgaccaccacgcaaccagggaggctgcaccagaggctaatggttaccatcacagcccccatggtgtggaccagagtcaggttgtggatgctgataagcatataaaccatcattccacagacgacaatgctccctccagcgcttcaggccacagacatggtggtatcagccgtcatgcatccacatcttctgttgatgaccgctccatcaagtctggtgacgattctgatggggccgagagtaccaatggcagaagcagtaacacggagatctcgtttctagaaaatgataccgtctggataccacctcaagcggcagataaggaggatgaggcccagagttttgctacaagcattgcttatgacgacgacgatgacgattatagtgatgggataaagtggggccagtcaagtttcccatcccctggtaagcagcatgacgccggcactagcaatcatagggaggtacgagaaaaagcgatgctagaagctatgaatggccagctgaagatacttgtcagtcggtttctcgcatctgttggcattccgtcttcgaacgaggaggctagcgatagctggcttgacattgtcacctccctgtcatgggaagcagcgctacttatcaaacctgatggtagcatgggaaaggaaatggaccctggctcttacatcaaagtcaaatgcatagcatctggtactcgccggcaaagtgaggtgatcaaagggttagtattcaagaagaacgctgctcataagcacatgccgacaaattgccacaatcctaggcttctacttgtcaaaggagtccttgggcattctgatgtcggtttgtcgtcgtttaattcaatgggtcaggaaaaggacctgttggagagagctatcggtaaaataatggagatatgcagtcccaatgttgttctggtcgagaaaactgtttcacgaaacattcaagaacttcttctgaaagaagaagttttggataaaccgaagctgaagcaatgtgactactttcatatcggaaaatttaccgaggagcacaacaatgccagtgagggtggaaagatgacatctaaaacattaatgttcttggaaggctttccatgtccactcggttgcacgatcttgctaaaaggagcaaacagtgaagaattgaagaaggtcaaacaagtaatgcattttacagtctttgcagcatatcacttgatccttgaaacatctttctttgaagatcaaagggtttttctgaatgatagtactacaaaagaaacttctgctactgctacagaagggacttatggtgttgctgctcttagtgggcctattcctaactttccttcacatgatgattctccggcacttagactgttccatgccacttctaatagctatgctgatgtgaacaaacctttgatatctccaagaaatgtggataaattcagtgcagtatccagcagctcttcaaatgaccttgaacaaggtgcaaatgtcaggtccaataatgccgagaggttaacattaccagtccaagggccactaaggaaattgttcgctgacatgttatgtcaccagaatatttacttacccgttacatcattgcaagaggcaaatgataacaggaaggaagtcagggttgaatccagtcaagaaactgttagtaatggtttccataggccaaagacaggagagtctgtgatttccattgaaaatggggagtccataaatgatgcccagacacaagaaattactcaagcaataatgccaactggttcttctgtaagtgataaggatgcagaatcacctgttatgggagacaatggggcacatagtactacaagtatcattatcaaagagaagcatgctgacggcgatcaagctgatgatgcacttgattctcacagcatactgattttgatgtctagccagtgcacagaaaagcaggttatctgtgaacaaagccatttaacccgtataaaatactatgggagttttgatgtgtccttggggcgatatttgcaagacattctacagaatcagcagaaactgagttgctcttcatgtggagagcctccagagtcgcacatgtactcctacacgcaccgcaatggaaatttgaccgttctagtgaaacgtctggtgcccaaacactatttgcctggcgaatctgaaggaaaaatatggatgtggactagatgctcaagatgtgatcatgaacatggggtatccaaaccaactccaagagtactaatatcagctgaagcacgcaacctctcgtttgggaaatttctggagctcagtttttcaagccactctgcagcaagaaggttatctatatgtggacatctggtcaacagggattgcttgcgtttttttgggctgggctctaaagttgctatgttccggtactcacctgttgaaatttacactacctgcaaaccacaacctactctccaattcgtcaaccccatcagacaggattggtttgaaggacaaaggagaaatgttcatgctaaaagtatggcacttttctctggggttgcaagatttctacagaacttgaagaatgaacatcctgatgcaataacattagcagtcaattgtggcctcacactccctgttaaggacttcactgaactagaagagttgttgataaaagaaaaggcccagtttgagagttctttggacaaggccactgacgaaaatgggaaaccattcgggtctgtgcatggagtattgaatataaattggtactatcaggatcttctacttaagctttacatttgggaccgccgtctatatcaactattctattgcaaatctgtccaactagaaagttgttctaattacaagaatcctgctggtactgttgatgggaactgtgatgataactttggtgttgataagaaaatcggtgaaattacatctgatgaaattacggcagctttgggggtatccagtaccatggagtctgcaagtaacaaacttgatcatcaatcaggtgacaccacagcactcttacttcataaaagccaggaagctgggcactcggaatttccttgcaatggaggtagtaaagctgaagaatcttctattgctcatggtcaaataaaggtagatggcacaacagaaaccacaaatgatccttgttttgaaatatccaatgatatggaggtccaggccaatcttacagtagcagatccaatacccatggaacaggagcgttgtagcactccccaacaattcaaatatccttattgggatgacagggagaggtggatttggaattcattttctgagtctcaaatggcttacagggatgacattgaaattggatatttgggcaaatttgaactcattaacaattatttgccacattatctttctcccttgtttgaacaacatgatgattcatactctccgcagttcgcggtaggtccaggtagtaatattttgtgcataatggaagatgagatatccagcataatagctcgtgctcttgccatatctgatgaacgccaccatttgatagatttaaaattcgagaacggaatggattattccaaaggagagtatgctaaagcaatagagaaatcttttagttttctgtctgaaagttctttcagctcatcaccatggtcatctacagattctgaagcaagcttatcgtctctgtcttcattttcatctgatgacttttctggttatgatagctcatctttattgtccccaatgcatccagaaatgactgtgaatgggaaagtaactctcaaagacaaatattcagttactgttgtatatgacaatcaattctttgcactccgaaaaaagtgttgcccatccgagcttgcatatattacttctttaagccgctgcaagaagtggaatgctcaaggtggaaagagcaaggcctattttgcaaagacgacggatgacaggttcatcattaagcaaatcaagaaaacagagtttgagtcatttattaaatttgcacctgattactttaagcatgtttaccattctctggacactggaagccaaacttgtctcgccaaaatattaggaatctatcaggttaagcaaattaagcatggtaaagaggtaaagattgacttgatggtgatggaaaatcttctctttggccacaatatttcacgaatttatgacctcaaaggtgctacattttcgcgacgcatcactgactcaaatgatcatgatactgtttacctggatcaaaattatgttgaggacatggggttttctccaatctatattggtggaagaacaaagcatcttttgcagcgtgcaatctggaatgacacggcttttctcacttcggtgaatgtcatggactattctctacttgtgggagtggacaaagagaagcatgaacttgtgtttggcatcattgattatctgaggcaatatacttgggacaaacaactggagacatgggtgaagacttctctggtagtacccaaaaatgttttaccaactgtaatttcccccaaggaatacaaaaaaaggtttaggaagttcatggcgaagtactttctgtcagttccagacacatggagtcctgataatccgtctaagccatgcaaatcccttggtcagagcaatcgcaagttggcggaagtccagaatggtgataacctgtcagagcacccaaatgaagttgaggggtgtgcctaatcatgtgcaggatttcctggcagttttgttgaatcctatcatgttgttgtttggctatatttcactttgtaaaatggtgtacatagaaggacctcactgttgatttatccaaaagtttgcggtttttaggcaaattgttgggcaagtgaggtccacaggacgtgtacctatgttcattgttaatttcacaattattatagtgaaattaagaattcatatgatcatttttttggacctaccacttgtgagactgaagcagtctattcttcacttatgactaactgtccaagaccaagatagacatttcctacctctattgaaattaggtcaatttgagtattatgttgtactgtgtacccccactgtactgctgggatatgtaaaaggttccgtataaatgtctgctcccctgaccttgtttgttgcacgcagcacaatacatattttgtgtttgatggatgtccagtttctgtattgctgcccacttgcacttttttttggttctgcacaatgtacaaccttttcagatctcctggtatagaacatattgc

SEQ ID NO: 57151 - DNA, 4809 bp, Zea Mays
cctcacctcacctctccacctgccgtcgtcttcctttcgttcctagacacgctagacttggctttggccataccttggactccccttccctctcctctccccgtctcccggcgtgcgtgcgtactacttactgcttgtccaatcgccgcgaccagagctcccgcgcacgctactggagaggattccagcgcccgtcgagcaacaggactctagcgcccgacccgacaaacgacagatagtagctactgcctccctacaccgtctcggcatctccgggggcacggcacgggaacggaggagcggagaaatccatccgccgaaccgcttgctttgcttggcaggcaccccgtacaattgggggttccggttcgaggaacgctcgggggggcgtgtgtgcggccgccttcgctcctcatccagaccacttgattacgccgcgctccctacgacaggaggtgcccaggccgaggtccttcgccggcgacgagcaccaaccagccaattccagagcaaccaaccgcaagggcatgtgacaaactgccgcctgcggtgccttcgccccaggcaatgtgctccgacatggatcagcgcgaccaccacgcaaccagatcttgctaaaaggagcaaacagtgaagaattgaagaaggtcaaacaagtaatgcattttacagtctttgcagcatatcacttgatccttgaaacatctttctttgaagatcaaagggtttttctgaatgatagtactacaaaagaaacttctgctactgctacagaagggacttatggtgttgctgctcttagtgggcctattcctaactttccttcacatgatgattctccggcacttagactgttccatgccacttctaatagctatgctgatgtgaacaaacctttgatatctccaagaaatgtggataaattcagtgcagtatccagcagctcttcaaatgaccttgaacaaggtgcaaatgtcaggtccaataatgccgagaggttaacattaccagtccaagggccactaaggaaattgttcgctgacatgttatgtcaccagaatatttacttacccgttacatcattgcaagaggcaaatgataacaggaaggaagtcagggttgaatccagtcaagaaactgttagtaatggtttccataggccaaagacaggagagtctgtgatttccattgaaaatggggagtccataaatgatgcccagacacaagaaattactcaagcaataatgccaactggttcttctgtaagtgataaggatgcagaatcacctgttatgggagacaatggggcacatagtactacaagtatcattatcaaagagaagcatgctgacggcgatcaagctgatgatgcacttgattctcacagcatactgattttgatgtctagccagtgcacagaaaagcaggttatctgtgaacaaagccatttaacccgtataaaatactatgggagttttgatgtgtccttggggcgatatttgcaagacattctacagaatcagcagaaactgagttgctcttcatgtggagagcctccagagtcgcacatgtactcctacacgcaccgcaatggaaatttgaccgttctagtgaaacgtctggtgcccaaacactatttgcctggcgaatctgaaggaaaaatatggatgtggactagatgctcaagatgtgatcatgaacatggggtatccaaaccaactccaagagtactaatatcagctgaagcacgcaacctctcgtttgggaaatttctggagctcagtttttcaagccactctgcagcaagaaggttatctatatgtggacatctggtcaacagggattgcttgcgtttttttgggctgggctctaaagttgctatgttccggtactcacctgttgaaatttacactacctgcaaaccacaacctactctccaattcgtcaaccccatcagacaggattggtttgaaggacaaaggagaaatgttcatgctaaaagtatggcacttttctctggggttgcaagatttctacagaacttgaagaatgaacatcctgatgcaataacattagcagtcaattgtggcctcacactccctgttaaggacttcactgaactagaagagttgttgataaaagaaaaggcccagtttgagagttctttggacaaggccactgacgaaaatgggaaaccattcgggtctgtgcatggagtattgaatataaattggtactatcaggatcttctacttaagctttacatttgggaccgccgtctatatcaactattctattgcaaatctgtccaactagaaagttgttctaattacaagaatcctgctggtactgttgatgggaactgtgatgataactttggtgttgataagaaaatcggtgaaattacatctgatgaaattacggcagctttgggggtatccagtaccatggagtctgcaagtaacaaacttgatcatcaatcaggtgacaccacagcactcttacttcataaaagccaggaagctgggcactcggaatttccttgcaatggaggtagtaaagctgaagaatcttctattgctcatggtcaaataaaggtagatggcacaacagaaaccacaaatgatccttgttttgaaatatccaatgatatggaggtccaggccaatcttacagtagcagatccaatacccatggaacaggagcgttgtagcactccccaacaattcaaatatccttattgggatgacagggagaggtggatttggaattcattttctgagtctcaaatggcttacagggatgacattgaaattggatatttgggcaaatttgaactcattaacaattatttgccacattatctttctcccttgtttgaacaacatgatgattcatactctccgcagttcgcggtaggtccaggtagtaatattttgtgcataatggaagatgagatatccagcataatagctcgtgctcttgccatatctgatgaacgccaccatttgatagatttaaaattcgagaacggaatggattattccaaaggagagtatgctaaagcaatagagaaatcttttagttttctgtctgaaagttctttcagctcatcaccatggtcatctacagattctgaagcaagcttatcgtctctgtcttcattttcatctgatgacttttctggttatgatagctcatctttattgtccccaatgcatccagaaatgactgtgaatgggaaagtaactctcaaagacaaatattcagttactgttgtatatgacaatcaattctttgcactccgaaaaaagtgttgcccatccgagcttgcatatattacttctttaagccgctgcaagaagtggaatgctcaaggtggaaagagcaaggcctattttgcaaagacgacggatgacaggttcatcattaagcaaatcaagaaaacagagtttgagtcatttattaaatttgcacctgattactttaagcatgtttaccattctctggacactggaagccaaacttgtctcgccaaaatattaggaatctatcaggtaattatatcacgagctcgagttggattcgtttcgttttactgttttctttcccatgtggactaacttgcctgtttcaggttaagcaaattaagcatggtaaagaggtaaagattgacttgatggtgatggaaaatcttctctttggccacaatatttcacgaatttatgacctcaaaggtgctacattttcgcgacgcatcactgactcaaatgatcatgatactgtttacctggatcaaaattatgttgaggacatggggttttctccaatctatattggtggaagaacaaagcatcttttgcagcgtgcaatctggaatgacacggcttttctcacttcggtgaatgtcatggactattctctacttgtgggagtggacaaagagaagcatgaacttgtgtttggcatcattgattatctgaggcaatatacttgggacaaacaactggagacatgggtgaagacttctctggtagtacccaaaaatgttttaccaactgtaatttcccccaaggaatacaaaaaaaggtttaggaagttcatggcgaagtactttctgtcagttccagacacatggagtcctgataatccgtctaagccatgcaaatcccttggtcagagcaatcgcaagttggcggaagtccagaatggtgataacctgtcagagcacccaaatgaagttgaggggtgtgcctaatcatgtgcaggatttcctggcagttttgttgaatcctatcatgttgttgtttggctatatttcactttgtaaaatggtgtacatagaaggacctcactgttgatttatccaaaagtttgcggtttttaggcaaattgttgggcaagtgaggtccacaggacgtgtacctatgttcattgttaatttcacaattattatagtgaaattaagaattcatatgatcatttttttggacctaccacttgtgagactgaagcagtctattcttcacttatgactaactgtccaagaccaagatagacatttcctacctctattgaaattaggtcaatttgagtattatgttgtactgtgtacccccactgtactgctgggatatgtaaaaggttccgtataaatgtctgctcccctgaccttgtttgttgcacgcagcacaatacatattttgtgtttgatggatgtccagtttctgtattgctgcccacttgcacttttttttggttctgcacaatgtacaaccttttcagatctcctggtatagaacatattgc

SEQ ID NO: 57152 - DNA, 2826 bp, Zea Mays
ttctactttccctttcttgagccaaagcacattatcatcgaggataatgggagcttgtatcatgatttttgcttgaccagataactgatagcaataacttttcttctgtcggctcagcaggttgactgaatgttaatctgacctttttatatcaaccagtattttgatttttcagtcagtttgaattcatgatgagcagcttatgttttggtcaagggattttgattgctgctttaagaggtgatcattttgtccgtttgaggaagagattggatttggtgggccgatgaagctcagctttcccaccagaggcagagtactaaccatgatatcgcttgccttttgaccctgcaaggcagctcaatcaatttggcattgcatcctttgctggcagcgcttctcttcatcccattgaggtccagaggacgattctggctcaaaagacgtttacaaagtgatcattctgtcaaattccagaaggctgttcctcatcattatacttatacagaccaaatggtgactggggtcagatatcaaagagaagcatctcaaagaaaagaatctcacaaaagcggcacacaaaggcacaatatatacgcgataggaagtggaagtaccgccgttgattgggaaacatacaaagaagattgggaagcatacaaagaggatgacgattctgctacatctacatgcatgacttaaggtatggacaccctactagaacggttgctagctagcactgcactgccattaaacagagaaggggaggagaggaaaacaaacaaaaagcacctttttttgggttgcctagatttgttagcttcttgttgcagcggtatctactagggagtactaggatggcatagaatagaagaagtggagctactaataagctagctaggctagggaaggagaagctagcgatggctgcagaggtcggagagcatcttcctgccctcgacgatctcgtcgaagaagtcatcgagctcagcgatgacggcctcggcgcctgatcgcagcatcccaacccagccattgatgatctctgctctctggacaaggctgtcgctgatgtcgtcgcggtagccgcccatggcgactgccctgtcgaagtcctgcttgaggccgtcgatggcggccctggcctggcggaactcgtgcatcatgatcccggccgagtgcgagcggtggtccccagcgatgatgcattcctccatctcctcgacgacgcgctggcgcaggcgggcgatggaggcgacgtagccgccgcccgccgaggcgcggagctggtggtggttggcagacgcagagcagcagccggctgtgaggtcggggaggcaggtgacggtgccggagatgaggaggatcaggaggaaggaggtggcattgcgcagcgcgtagaggacgccgcggaagccgttgaaggcgttgagcttgaactcgagcggggagcggtcgtcgagcaggagcgaggccgggtcgagcctggcgtcggcgagcgcgcggttgtcctggtggagcgcggcggcgtggcgcctgggcgcggtgatggcgcgctggaggtgccgcgcggaggccgcggcgtgggagccgccgctgccgccgtagagccagtcgcggagcgcgggggcgacgcgggcggcggcggcgcagtaggtgtcgagccccgcggcgcccgcgcgggcgagctggcaggcgtcccacaggcgggatgtctcgtccatgtactcgtccagccaactctcgccgggcggcaggtggaggcgctgcaccaggtgcagcagctgcgagtgcagggaccgcagcagcgccgccgcctgctgcaggaaggccgccgacaggcaagcgtgcgggctgcgctggagcgcgtccagcccgtgcgccatggaagagtagaacccgttcatgttgttgctgttgctccgctgtgtgtgtgctcgcatggacagatggacactgctggtgtgcctacctctgccgcctggacgctgggttttataggcagggctggggcaggggagggacggactatggtaacgagtaatgatggggtgtctgttgcgcggggggaacgatgattgattcatttgttggatgctgctgctcctgccgagtactactattcttctgctcgggtcgcctcgcctctcatcctcctactgtactactagtcactagtagtcttcagtcaagaacaagtcatggcatgcaggatgaatcaaggagcagagcagccgcacggcatcggaaaacccaacaacatcctagtccaccgcccttagcctgcctgtgcctgccgtgcctaagagcagagtagcagctcgggtggcttggctgcacctacatgcaactcttctgaatattctagtgcgttgtactacgctctagataccatacgtatcgtaccagagattgatcgagagacctgcagttccctgcatatacgtactgtaccgtatggtctctgagctgtgctgcctctgtggcctgcccttggcccctgccaggctgccatgttggctttagctggagcctctacgtaccatggccttcgtacatacacggccaggtcaccagctgcccaaaaaaaaaactccaacgatcagcaggtaggtgtgcccattaagactgcactatgattgtaatatgcacgctcttcttaggttcgtttcaagagttattgaacatctagttctactgtaaacatacccttttacgtgaggtagtacatgtctagttcatcgcttccttgcattgtgtgggaggattaccaagttcgtcaactttgaccctgccaagctggagtgcttgcctgcctcaaggtgg

SEQ ID NO: 57153 - DNA, 1527 bp, Zea Mays
aaagttaataaccgggccggatgggccggcccaccgtcgctgctagctcattcatttcttctttccctgccgggccccggcggcctctcctctcctcgcttgtccccaccaggcgccatggacgctggcgacgacgaaccccccgttctcctcgaccgcgccgcccgcgcctcccgaggcaagaggataaccaagctgctcgaggacgaggtcgagcaggacgaggctttctggaaccaagaagccctcaaggattttcgcgagttcctcctaccatgtacacacaaacccttgtagcgtgctgcacttgtcgtccctgacgcgttgtcatctcctcgcaggaggagaacgatgacaactacgtggaagagccggatgctggtgacgaattcgacagtgattttggtgaagatgaatctgaaactgatgatgagccggagaaggaagtacgcgagagattacctatcaagaaacggctaatgtttcctggcaagacgctgaggaagaccaacgtcaagaagaagaaggcgaccccaaaaccagaagatggcacaaaagccgacaagtctgctgataagccgagttcatccacacaagcagatcttcctgatgaactggaggctgagaaggccatccggaaatcaaccagaacgtcggtcatcgtgaggcaagctgaaagagaagcgatacgtgctgaaaaagaagcaacggccaagccgattaagagaaaaaaggagggagaagaaaagcggatgacacaagaggagatgcttttggaagcagctgaaacagagatcatgaacatgagaaatctagaacgtgtcctggcaagagaggaggaagtgaagaaaaaagctgttgttcataaggacacttatgagggtcctacaattcgttttttctcaagagatggggaatcacgtctggaattcataaatggagcatcatttgggtctgaactttgtacaacatcatctccttatccggagaaacctgtttgtgtggtgacaggacttccagccaaataccgtgatccgaagacagggctgccttatgcaactatggaagcatttaaaataatccgggagagtttcctgaaagaggaggctgatagaaagcgtccgaacatgtcgaatatgggagagcttttcgaatcaataactggtggacacttgatgcctaagaagagaagggttgagataaggtctccgaacatgttaggaggctctaggcatggcgggcgtacctggcgaatacctgcttttgatatggtggacgaggactaacgagacagatcccgtggctcccaatatgtcgaatatgagagatctttctaaatcaatagccggtgaagaggaagatggataggatgttgtatttagtgttagatcttgtgcttgtagttatcttaatgtatttttgtcagttgataaattcatggttattaaagtggtaaaacgttaaaatgttatgaaacaactttttaatattttaacgtttaaacgaacgttgaaacgtcttttcaga

SEQ ID NO: 57154 - DNA, 1391 bp, Zea Mays
aaagttaataaccgggccggatgggccggcccaccgtcgctgctagctcattcatttcttctttccctgccgggccccggcggcctctcctctcctcgcttgtccccaccaggcgccatggacgctggcgacgacgaaccccccgttctcctcgaccgcgccgcccgcgcctcccgaggcaagaggataaccaagctgctcgaggacgaggtcgagcaggacgaggctttctggaaccaagaagccctcaaggatgaggagaacgatgacaactacgtggaagagccggatgctggtgacgaattcgacagtgattttggtgaagatgaatctgaaactgatgatgagccggagaaggaagtacgcgagagattacctatcaagaaacggctaatgtttcctggcaagacgctgaggaagaccaacgtcaagaagaagaaggcgaccccaaaaccagaagatggcacaaaagccgacaagtctgctgataagccgagttcatccacacaagcagatcttcctgatgaactggaggctgagaaggccatccggaaatcaaccagaacgtcggtcatcgtgaggcaagctgaaagagaagcgatacgtgctgaaaaagaagcaacggccaagccgattaagagaaaaaaggagggagaagaaaagcggatgacacaagaggagatgcttttggaagcagctgaaacagagatcatgaacatgagaaatctagaacgtgtcctggcaagagaggaggaagtgaagaaaaaagctgttgttcataaggacacttatgagggtcctacaattcgttttttctcaagagatgtattgtgctcaattaggggaatcacgtctggaattcataaatggagcatcatttgggtctgaactttgtacaacatcatctccttatccggagaaacctgtttgtgtggtgacaggacttccagccaatttcctgaaagaggaggctgatagaaagcgtccgaacatgtcgaatatgggagagcttttcgaatcaataactggtggacacttgatgcctaagaagagaagggttgagataaggtctccgaacatgttaggaggctctaggcatggcgggcgtacctggcgaatacctgcttttgatatggtggacgaggactaacgagacagatcccgtggctcccaatatgtcgaatatgagagatctttctaaatcaatagccggtgaagaggaagatggataggatgttgtatttagtgttagatcttgtgcttgtagttatcttaatgtatttttgtcagttgataaattcatggttattaaagtggtaaaacgttaaaatgttatgaaacaactttttaatattttaacgtttaaacgaacgttgaaacgtcttttcaga

SEQ ID NO: 57155 - DNA, 1457 bp, Zea Mays
aaagttaataaccgggccggatgggccggcccaccgtcgctgctagctcattcatttcttctttccctgccgggccccggcggcctctcctctcctcgcttgtccccaccaggcgccatggacgctggcgacgacgaaccccccgttctcctcgaccgcgccgcccgcgcctcccgaggcaagaggataaccaagctgctcgaggacgaggtcgagcaggacgaggctttctggaaccaagaagccctcaaggatgaggagaacgatgacaactacgtggaagagccggatgctggtgacgaattcgacagtgattttggtgaagatgaatctgaaactgatgatgagccggagaaggaagtacgcgagagattacctatcaagaaacggctaatgtttcctggcaagacgctgaggaagaccaacgtcaagaagaagaaggcgaccccaaaaccagaagatggcacaaaagccgacaagtctgctgataagccgagttcatccacacaagcagatcttcctgatgaactggaggctgagaaggccatccggaaatcaaccagaacgtcggtcatcgtgaggcaagctgaaagagaagcgatacgtgctgaaaaagaagcaacggccaagccgattaagagaaaaaaggagggagaagaaaagcggatgacacaagaggagatgcttttggaagcagctgaaacagagatcatgaacatgagaaatctagaacgtgtcctggcaagagaggaggaagtgaagaaaaaagctgttgttcataaggacacttatgagggtcctacaattcgttttttctcaagagatgtattgtgctcaattaggggaatcacgtctggaattcataaatggagcatcatttgggtctgaactttgtacaacatcatctccttatccggagaaacctgtttgtgtggtgacaggacttccagccaaataccgtgatccgaagacagggctgccttatgcaactatggaagcatttaaaataatccgggagagtttcctgaaagaggaggctgatagaaagcgtccgaacatgtcgaatatgggagagcttttcgaatcaataactggtggacacttgatgcctaagaagagaagggttgagataaggtctccgaacatgttaggaggctctaggcatggcgggcgtacctggcgaatacctgcttttgatatggtggacgaggactaacgagacagatcccgtggctcccaatatgtcgaatatgagagatctttctaaatcaatagccggtgaagaggaagatggataggatgttgtatttagtgttagatcttgtgcttgtagttatcttaatgtatttttgtcagttgataaattcatggttattaaagtggtaaaacgttaaaatgttatgaaacaactttttaatattttaacgtttaaacgaacgttgaaacgtcttttcaga

SEQ ID NO: 57156 - DNA, 1398 bp, Zea Mays
aaagttaataaccgggccggatgggccggcccaccgtcgctgctagctcattcatttcttctttccctgccgggccccggcggcctctcctctcctcgcttgtccccaccaggcgccatggacgctggcgacgacgaaccccccgttctcctcgaccgcgccgcccgcgcctcccgaggcaagaggataaccaagctgctcgaggacgaggtcgagcaggacgaggctttctggaaccaagaagccctcaaggatgaggagaacgatgacaactacgtggaagagccggatgctggtgacgaattcgacagtgattttggtgaagatgaatctgaaactgatgatgagccggagaaggaagtacgcgagagattacctatcaagaaacggctaatgtttcctggcaagacgctgaggaagaccaacgtcaagaagaagaaggcgaccccaaaaccagaagatggcacaaaagccgacaagtctgctgataagccgagttcatccacacaagcagatcttcctgatgaactggaggctgagaaggccatccggaaatcaaccagaacgtcggtcatcgtgaggcaagctgaaagagaagcgatacgtgctgaaaaagaagcaacggccaagccgattaagagaaaaaaggagggagaagaaaagcggatgacacaagaggagatgcttttggaagcagctgaaacagagatcatgaacatgagaaatctagaacgtgtcctggcaagagaggaggaagtgaagaaaaaagctgttgttcataaggacacttatgagggtcctacaattcgttttttctcaagagatggggaatcacgtctggaattcataaatggagcatcatttgggtctgaactttgtacaacatcatctccttataccgtgatccgaagacagggctgccttatgcaactatggaagcatttaaaataatccgggagagtttcctgaaagaggaggctgatagaaagcgtccgaacatgtcgaatatgggagagcttttcgaatcaataactggtggacacttgatgcctaagaagagaagggttgagataaggtctccgaacatgttaggaggctctaggcatggcgggcgtacctggcgaatacctgcttttgatatggtggacgaggactaacgagacagatcccgtggctcccaatatgtcgaatatgagagatctttctaaatcaatagccggtgaagaggaagatggataggatgttgtatttagtgttagatcttgtgcttgtagttatcttaatgtatttttgtcagttgataaattcatggttattaaagtggtaaaacgttaaaatgttatgaaacaactttttaatattttaacgtttaaacgaacgttgaaacgtcttttcaga

SEQ ID NO: 57157 - DNA, 746 bp, Zea Mays
gcggtccagatcgatcggtatttgcagattggtgcgtccacacgagagtttacggcggcccaaaccccccaaatccagttccatcccaatcgccgagaaggggaagccaaatcgatggcggcggcggcggccggcggcgagaacagcggcgcgggcgcgggcgcgggcgagggcgagttctacctgcggtactacgtggggcacaagggcaagttcgggcacgagttcctcgagttcgagttccgccccgacggcaagctccgctacgccaacaactccaactacaagaacgacaccatgatccgcaaggaggtcttcgtctccccctccgtcctccgcgaggccaggaggatcatccaggagtccgatatcatgaaggaggacgacagcaactggcctgagcccgaccgcatcggccgacaggagctcgagatcgtcatgggcaacgaacacatttcattcaccacttccaagatcggctccctcgtcgatgtccagtccagcaaggacccggagggactccggatcttctactacctcgtccaggatctgaagtgcttcgtgttttcactcatcaacctccacttcaagatcaagccaatccagtcttgagctccatctcaagccttcatgcgactgttttggagtgttttaagagagaaccttgtaccatgttaagatgatgttgagcttgtgacgatgcgcacggtagaagtggaacctttttttttttttgcgatcaaact

SEQ ID NO: 57158 - DNA, 1051 bp, Zea Mays
aagaaaacttacaagggcgcggcaacagagcgagaggcgcgcgcgcagtcccctctacttcccgccgctggccgtttcccttccccccaatccaaaccctagagagagagagagagagtgtgtagtgtgtgtgtgtgagagagagggggattggaggcgaaggcagcgggctagcgctagcggaggaggagagatccgctgaggtggaacgcccgatcggcggagccccatccaccaccactccacaagatgcggggcgggacgctgcagatcaactggcacgaccagcagccggtgctcagcctcgacttccaccccgtctcccgccgcctcgccacagccggagcggaccacgacgtcaagatctgggaggtagcgtcggacggcaagctccccaccgccaccttcaagaccggcctggtccccaacaccaccgcccacagctccgcggtcaacgtcctccggttctccccttcaggggagtatctcgcctccggtgctgatggtggcggcatcaccctctggaaactgcatcccgctgacgacggcgaggcatggaaaattcacaagacgttactattccatcacaaggatgttcttgaccttcagtggtcgcatgacagcacatttcttgtttctgcatcagtcgacaacacttgcataatttgggaagctagtaaaggcacagtgcaacaaaagctagagggacatctgcattatgttcagggtgtggcatgggatcctttgggccagtatattgcttcactgagttctgacagaacctgtaaaatatatgcaaaaaagcctcagggcaaatccaagaacgcggagaggttgaactttgtttgccagcatacactagtgaaggtagaataccagaatcatgatgaatctaagccaccaaccaaatctcatttgtttcatgatgagacactaccatctttcttccgaaggttggcatggtcacctgatggatcttttctagtattgccagcagcaaattctctatcaccataagcctctgaacagattttttcccctatcttcatca

SEQ ID NO: 57159 - DNA, 3255 bp, Zea Mays
aagaaaacttacaagggcgcggcaacagagcgagaggcgcgcgcgcagtcccctctacttcccgccgctggccgtttcccttccccccaatccaaaccctagagagagagagagagagtgtgtagtgtgtgtgtgtgagagagagggggattggaggcgaaggcagcgggctagcgctagcggaggaggagagatccgctgaggtggaacgcccgatcggcggagccccatccaccaccactccacaagatgcggggcgggacgctgcagatcaactggcacgaccagcagccggtgctcagcctcgacttccaccccgtctcccgccgcctcgccacagccggagcggaccacgacgtcaagatctgggaggtagcgtcggacggcaagctccccaccgccaccttcaagaccggcctggtccccaacaccaccgcccacagctccgcggtcaacgtcctccggttctccccttcaggggagtatctcgcctccggtgctgatggtggcggcatcaccctctggaaactgcatcccgctgacgacggcgaggcatggaaaattcacaagacgttactattccatcacaaggatgttcttgaccttcagtggtcgcatgacagcacatttcttgtttctgcatcagtcgacaacacttgcataatttgggaagctagtaaaggcacagtgcaacaaaagctagagggacatctgcattatgttcagggtgtggcatgggatcctttgggccagtatattgcttcactgagttctgacagaacctgtaaaatatatgcaaaaaagcctcagggcaaatccaagaacgcggagaggttgaactttgtttgccagcatacactagtgaaggtagaataccagaatcatgatgaatctaagccaccaaccaaatctcatttgtttcatgatgagacactaccatctttcttccgaaggttggcatggtcacctgatggatcttttctagtattgccagcaggcctttctaaacactcctccgaggccttcgatacaactccctggggcaagtaaagctatagtggcagtacgcttctgccctgtactattcaaaccacgtggttctaactcagatggtttcttcaagcttccttatagagttgtctttgctgtggctactttgaactctctgtatgtctatgatacagaaagtgttcctccaattctagtccatgctggtctacactatgctgccattaccgatattgcatggtcttctgatgctaagtacctggcagtgtcatcacgagatggctactgtactataatagagtttgagaatgaggaactgggacagcctcacatactccccggatcaaaggaagttgctaatgggaatctgacacctgagaccaagaagcctgtatgtgctgatagcatgaaggttgataatagtgccaacaagcttaagatggaagccagtcctgttgctgtaggagttagagcaccactgctgccaactgagaacatcaagagaacaggagagcttgccgaaggaaatgtaacctgtgaaaacaaggagccggtaacaatagacagtatggaagtagatgccgatgataccaaaggcaaggaggcaaccatacccgtggcagctgaagtgacaccgccaccagcggtaccggcagcgaagaacagcgcatctagtaagcctgctaagaggcgaattactcctatcgcaatcgactaggtagtagacgcagcagttagggttttgatgtgttatgtagtgatggcaagtactggatactatgtttaggctaccctgtaaagtcgtttgtgctgcggtgctcatcttctgctctagtcctcctgctcttgacacaattggggagaatgtgaacagaagggctgtgtgtatgtatgagcacactttgttatggcgcaacatgcaagccactaaccgacatcttaagaagtggagttcattactgaggagtgaggaagttgtttcacacgagctgctcatatacaaatgctggcatacaaattacacattgaaatcaatcagatggggacatgacgcccttatttcatttacatgaaagaacatagaatcttatcaaaataccgaaaacgaatgggagggtagtatgtatatgtgtgtgtgtatgggtatggtattggcctcaagttgaagggccttgggtgcagtaggcatcatcatgcatctcaggactttgttatgcgcgccttggatttgtcatactcttcctggctctcgccggcctcttcaaacctgatgtcctcatcctccgaaaggacctcaaccctttcgccatgtggcccaggcacgatcatctcgtcgacgtgcttgtgcttggtgacgttgatgacctccgtcttcctctcctctccgctctggtgtttcttgtgccaggtccaaggggcggtgctcgaggactcgccgatggcgtcctgcttcctgaccgcctcctggaacctgacgtcctcgtccaccgtcagcctgacggcgctcgcgcccccggccggcccgggcacggtctgcttgtggacgtggacgtggtcgctgaagttgagcacctcggccttggcctcctcctcctctgccttcctccccctcctcttcttcttcttgtgccagcagaggagcgcggcagccaggcatgccagcagcagcaggccgcccagggagacgaacaccacgatgatgacgatgtggtgcggggggctaggtggaggcggcacgggcgccggcggaggcggcatgggcaggtgaggcggtggtggcgcttgaggccgaggagttggtggtggtggtgggcggatgggtggtgacggtggtggtggaggagcgcggcgtggtggcggcggtggctgagtgggaggtggaggggcgcggcgtggtggcggcggtggctgagtgggaggtggaggagcgcggcgtggtggcggcggtggctgagtgggaggcgggggagcgcggcgcggtggcggtggcggcattgtgggtggtggcggtgccagagccggtggtgggggagcacggcgcggaggaggcggttgtggtagggtgggcggtggtggagcgcgtcgcggtggcgggaagggctgctgtggtggtcttggaaggtaagggttcggagggaggtaggggaagccaagtcctggaggggtagggttgaacgccatcgctgctgctggatgatctcggaggagagctgtgtggtgctgtagtgaggtgaggcgagtgagctg

SEQ ID NO: 57160 - DNA, 3252 bp, Zea Mays
aagaaaacttacaagggcgcggcaacagagcgagaggcgcgcgcgcagtcccctctacttcccgccgctggccgtttcccttccccccaatccaaaccctagagagagagagagagagtgtgtagtgtgtgtgtgtgagagagagggggattggaggcgaaggcagcgggctagcgctagcggaggaggagagatccgctgaggtggaacgcccgatcggcggagccccatccaccaccactccacaagatgcggggcgggacgctgcagatcaactggcacgaccagcagccggtgctcagcctcgacttccaccccgtctcccgccgcctcgccacagccggagcggaccacgacgtcaagatctgggaggtagcgtcggacggcaagctccccaccgccaccttcaagaccggcctggtccccaacaccaccgcccacagctccgcggtcaacgtcctccggttctccccttcaggggagtatctcgcctccggtgctgatggtggcggcatcaccctctggaaactgcatcccgctgacgacggcgaggcatggaaaattcacaagacgttactattccatcacaaggatgttcttgaccttcagtggtcgcatgacagcacatttcttgtttctgcatcagtcgacaacacttgcataatttgggaagctagtaaaggcacagtgcaacaaaagctagagggacatctgcattatgttcagggtgtggcatgggatcctttgggccagtatattgcttcactgagttctgacagaacctgtaaaatatatgcaaaaaagcctcagggcaaatccaagaacgcggagaggttgaactttgtttgccagcatacactagtgaaggtagaataccagaatcatgatgaatctaagccaccaaccaaatctcatttgtttcatgatgagacactaccatctttcttccgaaggttggcatggtcacctgatggatcttttctagtattgccagcaggcctttctaaacactcctccgaggtgattaatacagcttatgtaatgtccaggcgtgacctctcaaggccttcgatacaactccctggggcaagtaaagctatagtggcagtacgcttctgccctgtactattcaaaccacgtggttctaactcagatggtttcttcaagcttccttatagagttgtctttgctgtggctactttgaactctctgtatgtctatgatacagaaagtgttcctccaattctagtccatgctggtctacactatgctgccattaccgatattgcatggtcttctgatgctaagtacctggcagtgtcatcacgagatggctactgtactataatagagtttgagaatgaggaactgggacagcctcacatactccccgcctgtatgtgctgatagcatgaaggttgataatagtgccaacaagcttaagatggaagccagtcctgttgctgtaggagttagagcaccactgctgccaactgagaacatcaagagaacaggagagcttgccgaaggaaatgtaacctgtgaaaacaaggagccggtaacaatagacagtatggaagtagatgccgatgataccaaaggcaaggaggcaaccatacccgtggcagctgaagtgacaccgccaccagcggtaccggcagcgaagaacagcgcatctagtaagcctgctaagaggcgaattactcctatcgcaatcgactaggtagtagacgcagcagttagggttttgatgtgttatgtagtgatggcaagtactggatactatgtttaggctaccctgtaaagtcgtttgtgctgcggtgctcatcttctgctctagtcctcctgctcttgacacaattggggagaatgtgaacagaagggctgtgtgtatgtatgagcacactttgttatggcgcaacatgcaagccactaaccgacatcttaagaagtggagttcattactgaggagtgaggaagttgtttcacacgagctgctcatatacaaatgctggcatacaaattacacattgaaatcaatcagatggggacatgacgcccttatttcatttacatgaaagaacatagaatcttatcaaaataccgaaaacgaatgggagggtagtatgtatatgtgtgtgtgtatgggtatggtattggcctcaagttgaagggccttgggtgcagtaggcatcatcatgcatctcaggactttgttatgcgcgccttggatttgtcatactcttcctggctctcgccggcctcttcaaacctgatgtcctcatcctccgaaaggacctcaaccctttcgccatgtggcccaggcacgatcatctcgtcgacgtgcttgtgcttggtgacgttgatgacctccgtcttcctctcctctccgctctggtgtttcttgtgccaggtccaaggggcggtgctcgaggactcgccgatggcgtcctgcttcctgaccgcctcctggaacctgacgtcctcgtccaccgtcagcctgacggcgctcgcgcccccggccggcccgggcacggtctgcttgtggacgtggacgtggtcgctgaagttgagcacctcggccttggcctcctcctcctctgccttcctccccctcctcttcttcttcttgtgccagcagaggagcgcggcagccaggcatgccagcagcagcaggccgcccagggagacgaacaccacgatgatgacgatgtggtgcggggggctaggtggaggcggcacgggcgccggcggaggcggcatgggcaggtgaggcggtggtggcgcttgaggccgaggagttggtggtggtggtgggcggatgggtggtgacggtggtggtggaggagcgcggcgtggtggcggcggtggctgagtgggaggtggaggggcgcggcgtggtggcggcggtggctgagtgggaggtggaggagcgcggcgtggtggcggcggtggctgagtgggaggcgggggagcgcggcgcggtggcggtggcggcattgtgggtggtggcggtgccagagccggtggtgggggagcacggcgcggaggaggcggttgtggtagggtgggcggtggtggagcgcgtcgcggtggcgggaagggctgctgtggtggtcttggaaggtaagggttcggagggaggtaggggaagccaagtcctggaggggtagggttgaacgccatcgctgctgctggatgatctcggaggagagctgtgtggtgctgtagtgaggtgaggcgagtgagctg

SEQ ID NO: 57161 - DNA, 3293 bp, Zea Mays
aagaaaacttacaagggcgcggcaacagagcgagaggcgcgcgcgcagtcccctctacttcccgccgctggccgtttcccttccccccaatccaaaccctagagagagagagagagagtgtgtagtgtgtgtgtgtgagagagagggggattggaggcgaaggcagcgggctagcgctagcggaggaggagagatccgctgaggtggaacgcccgatcggcggagccccatccaccaccactccacaagatgcggggcgggacgctgcagatcaactggcacgaccagcagccggtgctcagcctcgacttccaccccgtctcccgccgcctcgccacagccggagcggaccacgacgtcaagatctgggaggtagcgtcggacggcaagctccccaccgccaccttcaagaccggcctggtccccaacaccaccgcccacagctccgcggtcaacgtcctccggttctccccttcaggggagtatctcgcctccggtgctgatggtggcggcatcaccctctggaaactgcatcccgctgacgacggcgaggcatggaaaattcacaagacgttactattccatcacaaggatgttcttgaccttcagtggtcgcatgacagcacatttcttgtttctgcatcagtcgacaacacttgcataatttgggaagctagtaaagtgcaacaaaagctagagggacatctgcattatgttcagggtgtggcatgggatcctttgggccagtatattgcttcactgagttctgacagaacctgtaaaatatatgcaaaaaagcctcagggcaaatccaagaacgcggagaggttgaactttgtttgccagcatacactagtgaaggtagaataccagaatcatgatgaatctaagccaccaaccaaatctcatttgtttcatgatgagacactaccatctttcttccgaaggttggcatggtcacctgatggatcttttctagtattgccagcaggcctttctaaacactcctccgaggtgattaatacagcttatgtaatgtccaggcgtgacctctcaaggccttcgatacaactccctggggcaagtaaagctatagtggcagtacgcttctgccctgtactattcaaaccacgtggttctaactcagatggtttcttcaagcttccttatagagttgtctttgctgtggctactttgaactctctgtatgtctatgatacagaaagtgttcctccaattctagtccatgctggtctacactatgctgccattaccgatattgcatggtcttctgatgctaagtacctggcagtgtcatcacgagatggctactgtactataatagagtttgagaatgaggaactgggacagcctcacatactccccggatcaaaggaagttgctaatgggaatctgacacctgagaccaagaagcctgtatgtgctgatagcatgaaggttgataatagtgccaacaagcttaagatggaagccagtcctgttgctgtaggagttagagcaccactgctgccaactgagaacatcaagagaacaggagagcttgccgaaggaaatgtaacctgtgaaaacaaggagccggtaacaatagacagtatggaagtagatgccgatgataccaaaggcaaggaggcaaccatacccgtggcagctgaagtgacaccgccaccagcggtaccggcagcgaagaacagcgcatctagtaagcctgctaagaggcgaattactcctatcgcaatcgactaggtagtagacgcagcagttagggttttgatgtgttatgtagtgatggcaagtactggatactatgtttaggctaccctgtaaagtcgtttgtgctgcggtgctcatcttctgctctagtcctcctgctcttgacacaattggggagaatgtgaacagaagggctgtgtgtatgtatgagcacactttgttatggcgcaacatgcaagccactaaccgacatcttaagaagtggagttcattactgaggagtgaggaagttgtttcacacgagctgctcatatacaaatgctggcatacaaattacacattgaaatcaatcagatggggacatgacgcccttatttcatttacatgaaagaacatagaatcttatcaaaataccgaaaacgaatgggagggtagtatgtatatgtgtgtgtgtatgggtatggtattggcctcaagttgaagggccttgggtgcagtaggcatcatcatgcatctcaggactttgttatgcgcgccttggatttgtcatactcttcctggctctcgccggcctcttcaaacctgatgtcctcatcctccgaaaggacctcaaccctttcgccatgtggcccaggcacgatcatctcgtcgacgtgcttgtgcttggtgacgttgatgacctccgtcttcctctcctctccgctctggtgtttcttgtgccaggtccaaggggcggtgctcgaggactcgccgatggcgtcctgcttcctgaccgcctcctggaacctgacgtcctcgtccaccgtcagcctgacggcgctcgcgcccccggccggcccgggcacggtctgcttgtggacgtggacgtggtcgctgaagttgagcacctcggccttggcctcctcctcctctgccttcctccccctcctcttcttcttcttgtgccagcagaggagcgcggcagccaggcatgccagcagcagcaggccgcccagggagacgaacaccacgatgatgacgatgtggtgcggggggctaggtggaggcggcacgggcgccggcggaggcggcatgggcaggtgaggcggtggtggcgcttgaggccgaggagttggtggtggtggtgggcggatgggtggtgacggtggtggtggaggagcgcggcgtggtggcggcggtggctgagtgggaggtggaggggcgcggcgtggtggcggcggtggctgagtgggaggtggaggagcgcggcgtggtggcggcggtggctgagtgggaggcgggggagcgcggcgcggtggcggtggcggcattgtgggtggtggcggtgccagagccggtggtgggggagcacggcgcggaggaggcggttgtggtagggtgggcggtggtggagcgcgtcgcggtggcgggaagggctgctgtggtggtcttggaaggtaagggttcggagggaggtaggggaagccaagtcctggaggggtagggttgaacgccatcgctgctgctggatgatctcggaggagagctgtgtggtgctgtagtgaggtgaggcgagtgagctg

SEQ ID NO: 57162 - DNA, 2196 bp, Zea Mays
ctttttccatatacttcggtaatggagcggttccagatggtcgtcggtcaacttttccatccccagcctccctgctgcaggcgccggtgaatggatggaccgagctcggactcgattctttttaccggcaggtcaattggtaccgacaagcccacaccagaaatgttcagggtgtaatctgcaaacaaaaagacaagacatgtcctttccttaatccctactcgcttccagactgccccctcctcgagccctcgcccgcgttcgcccccggctgggatcaccgcgcgtttgccggcgccatggccgtcgcagtcgccgtcgccagccaaaatccactagcagcgcgtaacctcctgccgatctaggagacgggggatttcttctcgcccttttcctcgccttgcggctgcggaataccggggccggcctggatttgctcgagagtgagaggaaggcgtaacagtgtgaaggaggcgcgggggacaatatggctgcggaaatggtgaaagcggcgacgagcgacaagctcaaggagatggattgggcaaagaacatcgaaatctgcgagctcgtggcgcaggatcctgggaaagcgaaggatgtgatcaagtctgtaaagaagtgtatagggagcaggagcaagaccactcaactctttgctgttatgctattggagatgcttctgaataattgcggagagcctgtccataggcaggtcattgataatggccttcttccaatacttgtgaagatagtgaagaaaaagacggatttaccagttcgagaaaaaatatttcttctgttagatgcaacacaaacatcccttggtggagctaaagcaaggttccctcagtactatgaggcatactatgagttggtgtctgctggtgtgcaattttcaaatcggccaaatgttcttgtcacacgagcagaagtgccagtcccagaaacgagaacagaaccaaataatgaaagtttatcgacccgtttgactgaagctcaacaggaagtgcacactcagcctgttcctgatgcaagggagcaacggatgaatttgtgttggatcttgtcgagcaatgtacgtttcagaagcaacgaataatgcaccttgttatgacatcaagggatgaaacactggtatcacaagctatagagctaaatgaagagctacataaggttctcgtccggcatgacgcgttgctttcagttcatccgacaacagcagtagcttctaatataaaggaagaagaggaggaagaggatgctgaaagtctctatcggagactgcggaaggggaaggcgctgtcgcaggactacacagatgacctggtgccgtcgttccgatccatgcccgaggacaagctgcggcggccgctgaccatccaatcgcctcaccccgacaagagactgggtgcgctgaacatccgctcgccggaccgcgaggaaccgagacttgatcctgctccgctgatcccgccgccgcccgcaaagcacgccgagagggagaggttcttccgagagaagagcatcgacggtgtggccagccttccgggccacatgaggggcctgtcgcagcacagccgggacggcagcagctcgtgtagcggcagcactgattacggcgactgaaaggggaggggtgagcagcagcagcagtacatatagggttccccttcttggggctggtctcacacttggtcaggccaggcaggcgatacattggtgttgtgccggagtttggatcgtcggcgtctccttcatgctgacctgtgtacacttgtcttggtagcattttgttcatttttcatattttccctttggctgatatgacattactgggaggccgttgtgttggtgtggcgttgtgggttctttccctttgaggtctctatagatgattgtgatctactgcatgggggtatgcttgggtctgaagcattgctgtgactttacccttttggctttctgctcctgtgtgtggtgtatcacttggaggtctgtcagaggcgtgcgtgctgcagctattcagtagattcagactgctgctgccggccacagggcaccaaagtggtcggtcgttgtctttgggaaaagctactgtgcaacgcatgccagaaacccactttgagctgtctatagatcgaaaaaaatcaagaaagagttcaaaggcagcagagactggctaacttataagag

SEQ ID NO: 57163 - DNA, 2321 bp, Zea Mays
ctttttccatatacttcggtaatggagcggttccagatggtcgtcggtcaacttttccatccccagcctccctgctgcaggcgccggtgaatggatggaccgagctcggactcgattctttttaccggcaggtcaattggtaccgacaagcccacaccagaaatgttcagggtgtaatctgcaaacaaaaagacaagacatgtcctttccttaatccctactcgcttccagactgccccctcctcgagccctcgcccgcgttcgcccccggctgggatcaccgcgcgtttgccggcgccatggccgtcgcagtcgccgtcgccagccaaaatccactagcagcgcgtaacctcctgccgatctaggagacgggggatttcttctcgcccttttcctcgccttgcggctgcggaataccggggccggcctggatttgctcgagagtgagaggaaggcgtaacagtgtgaaggaggcgcgggggacaatatggctgcggaaatggtgaaagcggcgacgagcgacaagctcaaggagatggattgggcaaagaacatcgaaatctgcgagctcgtggcgcaggatcctgggaaagcgaaggatgtgatcaagtctgtaaagaagtgtatagggagcaggagcaagaccactcaactctttgctgttatgctattggagatgcttctgaataattgcggagagcctgtccataggcaggtcattgataatggccttcttccaatacttgtgaagatagtgaagaaaaagacggatttaccagttcgagaaaaaatatttcttctgttagatgcaacacaaacatcccttggtggagctaaagcaaggttccctcagtactatgaggcatactatgagttggtgtgtttattatgatatatagctgaagctatcatttatcttgcctccatagtctgctggtgtgcaattttcaaatcggccaaatgttcttgtcacacgagcagaagtgccagtcccagaaacgagaacagaaccaaataatgaaagtttatcgacccgtttgactgaagctcaacaggaagtgcacactcagcctgttcctgatgcaagtatagtccagaaagcctctagtgtcatggaagtattgagggatgtgcttaattctatggatcctaggcaccctgagggagcaacggatgaatttgtgttggatcttgtcgagcaatgtacgtttcagaagcaacgaataatgcaccttgttatgacatcaagggatgaaacactggtatcacaagctatagagctaaatgaagagctacataaggttctcgtccggcatgacgcgttgctttcagttcatccgacaacagcagtagcttctaatataaaggaagaagaggaggaagaggatgctgaaagtctctatcggagactgcggaaggggaaggcgctgtcgcaggactacacagatgacctggtgccgtcgttccgatccatgcccgaggacaagctgcggcggccgctgaccatccaatcgcctcaccccgacaagagactgggtgcgctgaacatccgctcgccggaccgcgaggaaccgagacttgatcctgctccgctgatcccgccgccgcccgcaaagcacgccgagagggagaggttcttccgagagaagagcatcgacggtgtggccagccttccgggccacatgaggggcctgtcgcagcacagccgggacggcagcagctcgtgtagcggcagcactgattacggcgactgaaaggggaggggtgagcagcagcagcagtacatatagggttccccttcttggggctggtctcacacttggtcaggccaggcaggcgatacattggtgttgtgccggagtttggatcgtcggcgtctccttcatgctgacctgtgtacacttgtcttggtagcattttgttcatttttcatattttccctttggctgatatgacattactgggaggccgttgtgttggtgtggcgttgtgggttctttccctttgaggtctctatagatgattgtgatctactgcatgggggtatgcttgggtctgaagcattgctgtgactttacccttttggctttctgctcctgtgtgtggtgtatcacttggaggtctgtcagaggcgtgcgtgctgcagctattcagtagattcagactgctgctgccggccacagggcaccaaagtggtcggtcgttgtctttgggaaaagctactgtgcaacgcatgccagaaacccactttgagctgtctatagatcgaaaaaaatcaagaaagagttcaaaggcagcagagactggctaacttataagag

SEQ ID NO: 57164 - DNA, 2328 bp, Zea Mays
ctttttccatatacttcggtaatggagcggttccagatggtcgtcggtcaacttttccatccccagcctccctgctgcaggcgccggtgaatggatggaccgagctcggactcgattctttttaccggcaggtcaattggtaccgacaagcccacaccagaaatgttcagggtgtaatctgcaaacaaaaagacaagacatgtcctttccttaatccctactcgcttccagactgccccctcctcgagccctcgcccgcgttcgcccccggctgggatcaccgcgcgtttgccggcgccatggccgtcgcagtcgccgtcgccagccaaaatccactagcagcgcgtaacctcctgccgatctaggctgcgggcttatgctcgaaggcgcgatctttacgctcggagtggcttcgtttcaggagacgggggatttcttctcgcccttttcctcgccttgcggctgcggaataccggggccggcctggatttgctcgagagtgagaggaaggcgtaacagtgtgaaggaggcgcgggggacaatatggctgcggaaatggtgaaagcggcgacgagcgacaagctcaaggagatggattgggcaaagaacatcgaaatctgcgagctcgtggcgcaggatcctgggaaagcgaaggatgtgatcaagtctgtaaagaagtgtatagggagcaggagcaagaccactcaactctttgctgttatgctattggagatgcttctgaataattgcggagagcctgtccataggcaggtcattgataatggccttcttccaatacttgtgaagatagtgaagaaaaagacggatttaccagttcgagaaaaaatatttcttctgttagatgcaacacaaacatcccttggtggagctaaagcaaggttccctcagtactatgaggcatactatgagttggtgtctgctggtgtgcaattttcaaatcggccaaatgttcttgtcacacgagcagaagtgccagtcccagaaacgagaacagaaccaaataatgaaagtttatcgacccgtttgactgaagctcaacaggaagtgcacactcagcctgttcctgatgcaagtatagtccagaaagcctctagtgtcatggaagtattgagggatgtgcttaattctatggatcctaggcaccctgagggagcaacggatgaatttgtgttggatcttgtcgagcaatgtacgtttcagaagcaacgaataatgcaccttgttatgacatcaagggatgaaacactggtatcacaagctatagagctaaatgaagagctacataaggttctcgtccggcatgacgcgttgctttcagttcatccgacaacagcagtagcttctaatataaaggaagaagaggaggaagaggatgctgaaagtctctatcggagactgcggaaggggaaggcgctgtcgcaggactacacagatgacctggtgccgtcgttccgatccatgcccgaggacaagctgcggcggccgctgaccatccaatcgcctcaccccgacaagagactgggtgcgctgaacatccgctcgccggaccgcgaggaaccgagacttgatcctgctccgctgatcccgccgccgcccgcaaagcacgccgagagggagaggttcttccgagagaagagcatcgacggtgtggccagccttccgggccacatgaggggcctgtcgcagcacagccgggacggcagcagctcgtgtagcggcagcactgattacggcgactgaaaggggaggggtgagcagcagcagcagtacatatagggttccccttcttggggctggtctcacacttggtcaggccaggcaggcgatacattggtgttgtgccggagtttggatcgtcggcgtctccttcatgctgacctgtgtacacttgtcttggtagcattttgttcatttttcatattttccctttggctgatatgacattactgggaggccgttgtgttggtgtggcgttgtgggttctttccctttgaggtctctatagatgattgtgatctactgcatgggggtatgcttgggtctgaagcattgctgtgactttacccttttggctttctgctcctgtgtgtggtgtatcacttggaggtctgtcagaggcgtgcgtgctgcagctattcagtagattcagactgctgctgccggccacagggcaccaaagtggtcggtcgttgtctttgggaaaagctactgtgcaacgcatgccagaaacccactttgagctgtctatagatcgaaaaaaatcaagaaagagttcaaaggcagcagagactggctaacttataagag

SEQ ID NO: 57165 - DNA, 2176 bp, Zea Mays
ctcgcttccagactgccccctcctcgagccctcgcccgcgttcgcccccggctgggatcaccgcgcgtttgccggcgccatggccgtcgcagtcgccgtcgccagccaaaatccactagcagcgcgtaacctcctgccgatctagacgggggatttcttctcgcccttttcctcgccttgcggctgcggaataccggggccggcctggatttgctcgagagtgagaggaaggcgtaacagtgtgaaggaggcgcgggggacaatatggctgcggaaatggtgaaagcggcgacgagcgacaagctcaaggagatggattgggcaaagaacatcgaaatctgcgagctcgtggcgcaggatcctgggaaagcgaaggatgtgatcaagtctgtaaagaagtgtatagggagcaggagcaagaccactcaactctttgctgttatgctattggagatgcttctgaataattgcggagagcctgtccataggcaggtcattgataatggccttcttccaatacttgtgaagatagtgaagaaaaagacggatttaccagttcgagaaaaaatatttcttctgttagatgcaacacaaacatcccttggtggagctaaagcaaggttccctcagtactatgaggcatactatgagttggtgtgtttattatgatatatagctgaagctatcatttatcttgcctccatagtctgctggtgtgcaattttcaaatcggccaaatgttcttgtcacacgagcagaagtgccagtcccagaaacgagaacagaaccaaataatgaaagtttatcgacccgtttgactgaagctcaacaggaagtgcacactcagcctgttcctgatgcaagtatagtccagaaagcctctagtgtcatggaagtattgagggatgtgcttaattctatggatcctaggcaccctgagggagcaacggatgaatttgtgttggatcttgtcgagcaatgtacgtttcagaagcaacgaataatgcaccttgttatgacatcaagggatgaaacactggtatcacaagctatagagctaaatgaagagctacataaggttctcgtccggcatgacgcgttgctttcagttcatccgacaacagcagtagcttctaatataaaggaagaagaggaggaagaggatgctgaaagtctctatcggaggtaggaccgatcatgcaccattttctttcagaacggtggtatgcagcctcttacagaattctatccttactaaaacagactgcggaaggggaaggcgctgtcgcaggactacacagatgacctggtgccgtcgttccgatccatgcccgaggacaagctgcggcggccgctgaccatccaatcgcctcaccccgacaagagactgggtgcgctgaacatccgctcgccggaccgcgaggaaccgagacttgatcctgctccgctgatcccgccgccgcccgcaaagcacgccgagagggagaggttcttccgagagaagagcatcgacggtgtggccagccttccgggccacatgaggggcctgtcgcagcacagccgggacggcagcagctcgtgtagcggcagcactgattacggcgactgaaaggggaggggtgagcagcagcagcagtacatatagggttccccttcttggggctggtctcacacttggtcaggccaggcaggcgatacattggtgttgtgccggagtttggatcgtcggcgtctccttcatgctgacctgtgtacacttgtcttggtagcattttgttcatttttcatattttccctttggctgatatgacattactgggaggccgttgtgttggtgtggcgttgtgggttctttccctttgaggtctctatagatgattgtgatctactgcatgggggtatgcttgggtctgaagcattgctgtgactttacccttttggctttctgctcctgtgtgtggtgtatcacttggaggtctgtcagaggcgtgcgtgctgcagctattcagtagattcagactgctgctgccggccacagggcaccaaagtggtcggtcgttgtctttgggaaaagctactgtgcaacgcatgccagaaacccactttgagctgtctatagatcgaaaaaaatcaagaaagagttcaaaggcagcagagactggctaacttataagag

SEQ ID NO: 57166 - DNA, 2044 bp, Zea Mays
ctcgcttccagactgccccctcctcgagccctcgcccgcgttcgcccccggctgggatcaccgcgcgtttgccggcgccatggccgtcgcagtcgccgtcgccagccaaaatccactagcagcgcgtaacctcctgccgatctagacgggggatttcttctcgcccttttcctcgccttgcggctgcggaataccggggccggcctggatttgctcgagagtgagaggaaggcgtaacagtgtgaaggaggcgcgggggacaatatggctgcggaaatggtgaaagcggcgacgagcgacaagctcaaggagatggattgggcaaagaacatcgaaatctgcgagctcgtggcgcaggatcctgggaaagcgaaggatgtgatcaagtctgtaaagaagtgtatagggagcaggagcaagaccactcaactctttgctgttatgctattggagatgcttctgaataattgcggagagcctgtccataggcaggtcattgataatggccttcttccaatacttgtgaagatagtgaagaaaaagacggatttaccagttcgagaaaaaatatttcttctgttagatgcaacacaaacatcccttggtggagctaaagcaaggttccctcagtactatgaggcatactatgagttggtgtctgctggtgtgcaattttcaaatcggccaaatgttcttgtcacacgagcagaagtgccagtcccagaaacgagaacagaaccaaataatgaaagtttatcgacccgtttgactgaagctcaacaggaagtgcacactcagcctgttcctgatgcaagtccagaaagcctctagtgtcatggaagtattgagggatgtgcttaattctatggatcctaggcaccctgagggagcaacggatgaatttgtgttggatcttgtcgagcaatgtacgtttcagaagcaacgaataatgcaccttgttatgacatcaagggatgaaacactggtatcacaagctatagagctaaatgaagagctacataaggttctcgtccggcatgacgcgttgctttcagttcatccgacaacagcagtagcttctaatataaaggaagaagaggaggaagaggatgctgaaagtctctatcggagactgcggaaggggaaggcgctgtcgcaggactacacagatgacctggtgccgtcgttccgatccatgcccgaggacaagctgcggcggccgctgaccatccaatcgcctcaccccgacaagagactgggtgcgctgaacatccgctcgccggaccgcgaggaaccgagacttgatcctgctccgctgatcccgccgccgcccgcaaagcacgccgagagggagaggttcttccgagagaagagcatcgacggtgtggccagccttccgggccacatgaggggcctgtcgcagcacagccgggacggcagcagctcgtgtagcggcagcactgattacggcgactgaaaggggaggggtgagcagcagcagcagtacatatagggttccccttcttggggctggtctcacacttggtcaggccaggcaggcgatacattggtgttgtgccggagtttggatcgtcggcgtctccttcatgctgacctgtgtacacttgtcttggtagcattttgttcatttttcatattttccctttggctgatatgacattactgggaggccgttgtgttggtgtggcgttgtgggttctttccctttgaggtctctatagatgattgtgatctactgcatgggggtatgcttgggtctgaagcattgctgtgactttacccttttggctttctgctcctgtgtgtggtgtatcacttggaggtctgtcagaggcgtgcgtgctgcagctattcagtagattcagactgctgctgccggccacagggcaccaaagtggtcggtcgttgtctttgggaaaagctactgtgcaacgcatgccagaaacccactttgagctgtctatagatcgaaaaaaatcaagaaagagttcaaaggcagcagagactggctaacttataagag

SEQ ID NO: 57167 - DNA, 3227 bp, Zea Mays
atcggacatgtgcgctttctccgcctttcctctcgtctcctcgtccgttgggggctcgggcgctcggctggatccatttcgcgtggcgcgcgcggtcgacgggaggtcccagccagccagcgagagagggagccggggccgggcggggcggcacctcgcgagatggcggcggaagcggacgacccgtcgctggcggcgaccctggagaagttccgcctctacgagacgcgcgcgaggttctacgtgatcgggagctcgcgggagaagcgctggttccgggtgctcaagatcgaccgctccgagccctccgagctcaacgtaagcgaggaccccgtctggtactcgctgcaggaggtcaagagcctcctccagcggatcgacgagggcaaccgatccaccgggggcctcgccttcgtcaccaaggcatacggcatcgcaggttgcatcaagttcctggagtcatactacctgattttagtcaccaaacgccgtcaaatcggttgcatttgcgggcatgctatatattgtatagatgagagccagatgatcaccatcccacactcatcagtgcaaacagatgttgcgacctctaagaatgagctgaggtacaagaagcttttggctagtgttgatctcaccaaggatttcttctatagctacacatatccaattatgcagagcctgcaacagagtgttacttctgcagggatgaaagaaatgccttatgaaaatttgtttgtctggaacacttttctgacagagccagtacgttcaaggtgccacaatactctctggacagtagctcttgtccatgggcacttcaagcaggtcaagctatcaatttttggcagagagataaatgttgttctcagctctagaagatcccgacacttcgccgggacacggtatttgaaaagaggtgtgaatgaccatggaaaagttgctaatgatgttgaaacagagcagatagtctttgaagaagaggctggttcctggaagggaagaatgagtgccgtagtacagatgcgaggatcaatccctctcttttggtcacaagaggcatctcgacttagtcctaagcctgatatttttgtgcagagatatgatcccacatatgaagcaacaaaattacattttgatgatctcgcccggcgatatggacatcctatcataatacttaatttgataaagactgttgaaaaaaggccacgtgaaatgatgctcaggcgtgaatattgtagagctgttgaatatcttaatcaaaatgtcccagaggagaagaagttgagattcatccactgggattttcataaatttgctaaaagcaaatctgcaaatgtactgggtgttttaggaaaagttgcgggtgaagcactggacctcactgggttttactacagcggaaagccaaaagtccagaaaaaaaggttaattcagcttagtcgaactagcactgcaagggatggctcccttgatataagggccagttctggagatctttcaaggctcagggatggctcccttgatataagggccagttctggagatctttcaaggctctctagtaatgctgaggcacttagttctacaggctttcaagatatgagaaatcaggctaacaaacaagagtttcttggtgatactccctgttaccaaactggagtgctccgtacaaattgcatagattgcctggatcgcacaaatgttgctcagtatgcatatggccttgctgctttggggaggcaacttcatgcaatgggactgacagatgttttaaaaatccaccctgatagcagcattgcttctgctttgatggaaatgtaccagagcatgggtgatgcacttgctcatcagtatggaggatctgcggcacataacacgacatccagtactgtccaatgaacacaatttcaggttttccctgagaggcaagggaaatggaaggctactactcagtctcgggagttcctgaaatcaattaaacggtattacagtaatgcctacactgatggtgagaagcaggatgctataaatctatttctggggtattttcaaccacaagaaggaaaaccagctctttgggagctggatactgattactatcttcatgtgacgacagctggggatgatcttatgtctgatagctaccacttgagttctgcacctggaaataatgtgttcgtggggtctggagctgcattgaaccctgggaccatattgagccctgtcccagcatgcaaagaggatttctcacggaagaagcttacttcgttcgacaaacttatagaaagaacatgtagttctataaggaatgtaaggcttcattgtgacgctgatctaaagccaagtggaggtgttggaacttctggaatggcaccagatgcagctgagatacagcttaaaagccccaactggttgtttggtcaaaggaagcatacggagacaatttcaaccgcaagagttgccccggttgaaaacgtgaacgaggggaacagagacgagtcaaatgtgtctctttgtggggaactaatttggctatcctcctcagttgaatcatgcgaggaggacattttcagaaggtaccttgcattcacgacagcggatgtagagaatggctggtatggcggaacactgctatatgaccgagatgaaaacagcggggcttacaggcactattctgagctctgccagggagctgtcatggatccctttgagcatgaccctgagaaagagcggcactacgcggaggcccttagcgtggatctcggcgatgcacgggtggaggccgaaatgcaggccgcgctggatgactaccaggtcatagggtcggacctgagcatcatcccttcgtgcggagcactcgcagaggacccgagccagctgacgaggtggatcattggagatgagaggctgcttgtgggtgctgctgcgcagtagaccggtggggttctgtcttctactcttctgtggaaggttgtacagagcaacagattgccattcaccgacccagcctttgtgttttatagatacttccctgaaacaattactccatgtatttagcagcaggtgttttatagacacttccctgaaacaattactccaacacgtgcatgcaatttattgttgtgcagcaggtggtattgctgctgggattagctttggcaataatagttgattgttgtgcagcaggtgtttgatttcattcatctataaataaccaaagccag

SEQ ID NO: 57168 - DNA, 3131 bp, Zea Mays
cggacatgtgcgctttctccgcctttcctctcgtctcctcgtccgttgggggctcgggcgctcggctggatccatttcgcgtggcgcgcgcggtcgacgggaggtcccagccagccagcgagagagggagccggggccgggcggggcggcacctcgcgagatggcggcggaagcggacgacccgtcgctggcggcgaccctggagaagttccgcctctacgagacgcgcgcgaggttctacgtgatcgggagctcgcgggagaagcgctggttccgggtgctcaagatcgaccgctccgagccctccgagctcaacgtaagcgaggaccccgtctggtactcgctgcaggaggtcaagagcctcctccagcggatcgacgagggcaaccgatccaccgggggcctcgccttcgtcaccaaggcatacggcatcgcaggttgcatcaagttcctggagtcatactacctgattttagtcaccaaacgccgtcaaatcggttgcatttgcgggcatgctatatattgtatagatgagagccagatgatcaccatcccacactcatcagtgcaaacagatgttgcgacctctaagaatgagctgaggtacaagaagcttttggctagtgttgatctcaccaaggatttcttctatagctacacatatccaattatgcagagcctgcaacagagtgttacttctgcagggatgaaagaaatgccttatgaaaatttgtttgtctggaacacttttctgacagagccagtacgttcaaggtgccacaatactctctggacagtagctcttgtccatgggcacttcaagcaggtcaagctatcaatttttggcagagagataaatgttgttctcagctctagaagatcccgacacttcgccgggacacgatagtctttgaagaagaggctggttcctggaagggaagaatgagtgccgtagtacagatgcgaggatcaatccctctcttttggtcacaagaggcatctcgacttagtcctaagcctgatatttttgtgcagagatatgatcccacatatgaagcaacaaaattacattttgatgatctcgcccggcgatatggacatcctatcataatacttaatttgataaagactgttgaaaaaaggccacgtgaaatgatgctcaggcgtgaatattgtagagctgttgaatatcttaatcaaaatgtcccagaggagaagaagttgagattcatccactgggattttcataaatttgctaaaagcaaatctgcaaatgtactgggtgttttaggaaaagttgcgggtgaagcactggacctcactgggttttactacagcggaaagccaaaagtccagaaaaaaaggttaattcagcttagtcgaactagcactgcaagggatggctcccttgatataagggccagttctggagatctttcaaggctcagggatggctcccttgatataagggccagttctggagatctttcaaggctctctagtaatgctgaggcacttagttctacaggctttcaagatatgagaaatcaggctaacaaacaagagtttcttggtgatactccctgttaccaaactggagtgctccgtacaaattgcatagattgcctggatcgcacaaatgttgctcagtatgcatatggccttgctgctttggggaggcaacttcatgcaatgggactgacagatgttttaaaaatccaccctgatagcagcattgcttctgctttgatggaaatgtaccagagcatgggtgatgcacttgctcatcagtatggaggatctgcggcacataacacggttttccctgagaggcaagggaaatggaaggctactactcagtctcgggagttcctgaaatcaattaaacggtattacagtaatgcctacactgatggtgagaagcaggatgctataaatctatttctggggtattttcaaccacaagaaggaaaaccagctctttgggagctggatactgattactatcttcatgtgacgacagctggggatgatcttatgtctgatagctaccacttgagttctgcacctggaaataatgtgttcgtggggtctggagctgcattgaaccctgggaccatattgagccctgtcccagcatgcaaagaggatttctcacggaagaagcttacttcgttcgacaaacttatagaaagaacatgtagttctataaggaatgtaaggcttcattgtgacgctgatctaaagccaagtggaggtgttggaacttctggaatggcaccagatgcagctgagatacagcttaaaagccccaactggttgtttggtcaaaggaagcatacggagacaatttcaaccgcaagagttgccccggttgaaaacgtgaacgaggggaacagagacgagtcaaatgtgtctctttgtggggaactaatttggctatcctcctcagttgaatcatgcgaggaggacattttcagaaggtaccttgcattcacgacagcggatgtagagaatggctggtatggcggaacactgctatatgaccgagatgaaaacagcggggcttacaggcactattctgagctctgccagggagctgtcatggatccctttgagcatgaccctgagaaagagcggcactacgcggaggcccttagcgtggatctcggcgatgcacgggtggaggccgaaatgcaggccgcgctggatgactaccaggtcatagggtcggacctgagcatcatcccttcgtgcggagcactcgcagaggacccgagccagctgacgaggtggatcattggagatgagaggctgcttgtgggtgctgctgcgcagtagaccggtggggttctgtcttctactcttctgtggaaggttgtacagagcaacagattgccattcaccgacccagcctttgtgttttatagatacttccctgaaacaattactccatgtatttagcagcaggtgttttatagacacttccctgaaacaattactccaacacgtgcatgcaatttattgttgtgcagcaggtggtattgctgctgggattagctttggcaataatagttgattgttgtgcagcaggtgtttgatttcattcatctataaataaccaaagccag

SEQ ID NO: 57169 - DNA, 3135 bp, Zea Mays
ggacatgtgcgctttctccgcctttcctctcgtctcctcgtccgttgggggctcgggcgctcggctggatccatttcgcgtggcgcgcgcggtcgacgggaggtcccagccagccagcgagagagggagccggggccgggcggggcggcacctcgcgagatggcggcggaagcggacgacccgtcgctggcggcgaccctggagaagttccgcctctacgagacgcgcgcgaggttctacgtgatcgggagctcgcgggagaagcgctggttccgggtgctcaagatcgaccgctccgagccctccgagctcaacgtaagcgaggaccccgtctggtactcgctgcaggaggtcaagagcctcctccagcggatcgacgagggcaaccgatccaccgggggcctcgccttcgtcaccaaggcatacggcatcgcaggttgcatcaagttcctggagtcatactacctgattttagtcaccaaacgccgtcaaatcggttgcatttgcgggcatgctatatattgtatagatgagagccagatgatcaccatcccacactcatcagtgcaaacagatgttgcgacctctaagaatgagctgaggtacaagaagcttttggctagtgttgatctcaccaaggatttcttctatagctacacatatccaattatgcagagcctgcaacagagtgttacttctgcagggatgaaagaaatgccttatgaaaatttgtttgtctggaacacttttctgacagagccagtacgttcaaggtgccacaatactctctggacagtagctcttgtccatgggcacttcaagcaggtcaagctatcaatttttggcagagagataaatgttgttctcagctctagaagatcccgacacttcgccgggacacgagcagatagtctttgaagaagaggctggttcctggaagggaagaatgagtgccgtagtacagatgcgaggatcaatccctctcttttggtcacaagaggcatctcgacttagtcctaagcctgatatttttgtgcagagatatgatcccacatatgaagcaacaaaattacattttgatgatctcgcccggcgatatggacatcctatcataatacttaatttgataaagactgttgaaaaaaggccacgtgaaatgatgctcaggcgtgaatattgtagagctgttgaatatcttaatcaaaatgtcccagaggagaagaagttgagattcatccactgggattttcataaatttgctaaaagcaaatctgcaaatgtactgggtgttttaggaaaagttgcgggtgaagcactggacctcactgggttttactacagcggaaagccaaaagtccagaaaaaaaggttaattcagcttagtcgaactagcactgcaagggatggctcccttgatataagggccagttctggagatctttcaaggctcagggatggctcccttgatataagggccagttctggagatctttcaaggctctctagtaatgctgaggcacttagttctacaggctttcaagatatgagaaatcaggctaacaaacaagagtttcttggtgatactccctgttaccaaactggagtgctccgtacaaattgcatagattgcctggatcgcacaaatgttgctcagtatgcatatggccttgctgctttggggaggcaacttcatgcaatgggactgacagatgttttaaaaatccaccctgatagcagcattgcttctgctttgatggaaatgtaccagagcatgggtgatgcacttgctcatcagtatggaggatctgcggcacataacacggttttccctgagaggcaagggaaatggaaggctactactcagtctcgggagttcctgaaatcaattaaacggtattacagtaatgcctacactgatggtgagaagcaggatgctataaatctatttctggggtattttcaaccacaagaaggaaaaccagctctttgggagctggatactgattactatcttcatgtgacgacagctggggatgatcttatgtctgatagctaccacttgagttctgcacctggaaataatgtgttcgtggggtctggagctgcattgaaccctgggaccatattgagccctgtcccagcatgcaaagaggatttctcacggaagaagcttacttcgttcgacaaacttatagaaagaacatgtagttctataaggaatgtaaggcttcattgtgacgctgatctaaagccaagtggaggtgttggaacttctggaatggcaccagatgcagctgagatacagcttaaaagccccaactggttgtttggtcaaaggaagcatacggagacaatttcaaccgcaagagttgccccggttgaaaacgtgaacgaggggaacagagacgagtcaaatgtgtctctttgtggggaactaatttggctatcctcctcagttgaatcatgcgaggaggacattttcagaaggtaccttgcattcacgacagcggatgtagagaatggctggtatggcggaacactgctatatgaccgagatgaaaacagcggggcttacaggcactattctgagctctgccagggagctgtcatggatccctttgagcatgaccctgagaaagagcggcactacgcggaggcccttagcgtggatctcggcgatgcacgggtggaggccgaaatgcaggccgcgctggatgactaccaggtcatagggtcggacctgagcatcatcccttcgtgcggagcactcgcagaggacccgagccagctgacgaggtggatcattggagatgagaggctgcttgtgggtgctgctgcgcagtagaccggtggggttctgtcttctactcttctgtggaaggttgtacagagcaacagattgccattcaccgacccagcctttgtgttttatagatacttccctgaaacaattactccatgtatttagcagcaggtgttttatagacacttccctgaaacaattactccaacacgtgcatgcaatttattgttgtgcagcaggtggtattgctgctgggattagctttggcaataatagttgattgttgtgcagcaggtgtttgatttcattcatctataaataaccaaagccag

SEQ ID NO: 57170 - DNA, 3181 bp, Zea Mays
ggacatgtgcgctttctccgcctttcctctcgtctcctcgtccgttgggggctcgggcgctcggctggatccatttcgcgtggcgcgcgcggtcgacgggaggtcccagccagccagcgagagagggagccggggccgggcggggcggcacctcgcgagatggcggcggaagcggacgacccgtcgctggcggcgaccctggagaagttccgcctctacgagacgcgcgcgaggttctacgtgatcgggagctcgcgggagaagcgctggttccgggtgctcaagatcgaccgctccgagccctccgagctcaacgtaagcgaggaccccgtctggtactcgctgcaggaggtcaagagcctcctccagcggatcgacgagggcaaccgatccaccgggggcctcgccttcgtcaccaaggcatacggcatcgcaggttgcatcaagttcctggagtcatactacctgattttagtcaccaaacgccgtcaaatcggttgcatttgcgggcatgctatatattgtatagatgagagccagatgatcaccatcccacactcatcagtgcaaacagatgttgcgacctctaagaatgagctgagagccagtacgttcaaggtgccacaatactctctggacagtagctcttgtccatgggcacttcaagcaggtcaagctatcaatttttggcagagagataaatgttgttctcagctctagaagatcccgacacttcgccgggacacggtatttgaaaagaggtgtgaatgaccatggaaaagttgctaatgatgttgaaacagagcagatagtctttgaagaagaggctggttcctggaagggaagaatgagtgccgtagtacagatgcgaggatcaatccctctcttttggtcacaagaggcatctcgacttagtcctaagcctgatatttttgtgcagagatatgatcccacatatgaagcaacaaaattacattttgatgatctcgcccggcgatatggacatcctatcataatacttaatttgataaagactgttgaaaaaaggccacgtgaaatgatgctcaggcgtgaatattgtagagctgttgaatatcttaatcaaaatgtcccagaggagaagaagttgagattcatccactgggattttcataaatttgctaaaagcaaatctgcaaatgtactgggtgttttaggaaaagttgcgggtgaagcactggacctcactgggttttactacagcggaaagccaaaagtccagaaaaaaaggttaattcagcttagtcgaactagcactgcaagggatggctcccttgatataagggccagttctggagatctttcaaggctcagggatggctcccttgatataagggccagttctggagatctttcaaggctctctagtaatgctgaggcacttagttctacaggctttcaagatatgagaaatcaggctaacaaacaagagtttcttggtgatactccctgttaccaaactggagtgctccgtacaaattgcatagattgcctggatcgcacaaatgttgctcagtatgcatatggccttgctgctttggggaggcaacttcatgcaatgggactgacagatgttttaaaaatccaccctgatagcagcattgcttctgctttgatggaaatgtaccagagcatgggtgatgcacttgctcatcagtatggaggatctgcggcacataacacggttttccctgagaggcaagggaaatggaaggctactactcagtctcgggagttcctgaaatcaattaaacggtattacagtaatgcctacactgatggtgagaagcaggatgctataaatctgtaagtctatcgtgttgcttttatcataatagatgtactgtattaaacatataaggtagtgagtgaaccagctcttgagttgtctagtgccatgggtgcaatcagatttctggggtactaattcttagtttggtggtactatcagatttctggggtattttcaaccacaagaaggaaaaccagctctttgggagctggatactgattactatcttcatgtgacgacagctggggatgatcttatgtctgatagctaccacttgagttctgcacctggaaataatgtgttcgtggggtctggagctgcattgaaccctgggaccatattgagccctgtcccagcatgcaaagaggatttctcacggaagaagcttacttcgttcgacaaacttatagaaagaacatgtagttctataaggaatgtaaggcttcattgtgacgctgatctaaagccaagtggaggtgttggaacttctggaatggcaccagatgcagctgagatacagcttaaaagccccaactggttgtttggtcaaaggaagcatacggagacaatttcaaccgcaagagttgccccggttgaaaacgtgaacgaggggaacagagacgagtcaaatgtgtctctttgtggggaactaatttggctatcctcctcagttgaatcatgcgaggaggacattttcagaaggtaccttgcattcacgacagcggatgtagagaatggctggtatggcggaacactgctatatgaccgagatgaaaacagcggggcttacaggcactattctgagctctgccagggagctgtcatggatccctttgagcatgaccctgagaaagagcggcactacgcggaggcccttagcgtggatctcggcgatgcacgggtggaggccgaaatgcaggccgcgctggatgactaccaggtcatagggtcggacctgagcatcatcccttcgtgcggagcactcgcagaggacccgagccagctgacgaggtggatcattggagatgagaggctgcttgtgggtgctgctgcgcagtagaccggtggggttctgtcttctactcttctgtggaaggttgtacagagcaacagattgccattcaccgacccagcctttgtgttttatagatacttccctgaaacaattactccatgtatttagcagcaggtgttttatagacacttccctgaaacaattactccaacacgtgcatgcaatttattgttgtgcagcaggtggtattgctgctgggattagctttggcaataatagttgattgttgtgcagcaggtgtttgatttcattcatctataaataaccaaagccag

SEQ ID NO: 57171 - DNA, 3210 bp, Zea Mays
ggacatgtgcgctttctccgcctttcctctcgtctcctcgtccgttgggggctcgggcgctcggctggatccatttcgcgtggcgcgcgcggtcgacgggaggtcccagccagccagcgagagagggagccggggccgggcggggcggcacctcgcgagatggcggcggaagcggacgacccgtcgctggcggcgaccctggagaagttccgcctctacgagacgcgcgcggttgcttgctggaacgcagaggttctacgtgatcgggagctcgcgggagaagcgctggttccgggtgctcaagatcgaccgctccgagccctccgagctcaacgtaagcgaggaccccgtctggtactcgctgcaggaggtcaagagcctcctccagcggatcgacgagggcaaccgatccaccgggggcctcgccttcgtcaccaaggcatacggcatcgcaggttgcatcaagttcctggagtcatactacctgattttagtcaccaaacgccgtcaaatcggttgcatttgcgggcatgctatatattgtatagatgagagccagatgatcaccatcccacactcatcagtgcaaacagatgttgcgacctctaagaatgagctgaggtacaagaagcttttggctagtgttgatctcaccaaggatttcttctatagctacacatatccaattatgcagagcctgcaacagagtgttacttctgcagggatgaaagaaatgccttatgaaaatttgtttgtctggaacacttttctgacagagccagtacgttcaaggtgccacaatactctctggacagtagctcttgtccatgggcacttcaagcaggtcaagctatcaatttttggcagagagataaatgttgttctcagctctagaagatcccgacacttcgccgggacacggtatttgaaaagaggtgtgaatgaccatggaaaagttgctaatgatgttgaaacagagcagatagtctttgaagaagaggctggttcctggaagggaagaatgagtgccgtagtacagatgcgaggatcaatccctctcttttggtcacaagaggcatctcgacttagtcctaagcctgatatttttgtgcagagatatgatcccacatatgaagcaacaaaattacattttgatgatctcgcccggcgatatggacatcctatcataatacttaatttgataaagactgttgaaaaaaggccacgtgaaatgatgctcaggcgtgaatattgtagagctgttgaatatcttaatcaaaatgtcccagaggagaagaagttgagattcatccactgggattttcataaatttgctaaaagcaaatctgcaaatgtactgggtgttttaggaaaagttgcgggtgaagcactggacctcactgggttttactacagcggaaagccaaaagtccagaaaaaaaggttaattcagcttagtcgaactagcactgcaagggatggctcccttgatataagggccagttctggagatctttcaaggctcagggatggctcccttgatataagggccagttctggagatctttcaaggctctctagtaatgctgaggcacttagttctacaggctttcaagatatgagaaatcaggctaacaaacaagagtttcttggtgatactccctgttaccaaactggagtgctccgtacaaattgcatagattgcctggatcgcacaaatgttgctcagtatgcatatggccttgctgctttggggaggcaacttcatgcaatgggactgacagatgttttaaaaatccaccctgatagcagcattgcttctgctttgatggaaatgtaccagagcatgggtgatgcacttgctcatcagtatggaggatctgcggcacataacacggttttccctgagaggcaagggaaatggaaggctactactcagtctcgggagttcctgaaatcaattaaacggtattacagtaatgcctacactgatggtgagaagcaggatgctataaatctatttctggggtattttcaaccacaagaaggaaaaccagctctttgggagctggatactgattactatcttcatgtgacgacagctggggatgatcttatgtctgatagctaccacttgagttctgcacctggaaataatgtgttcgtggggtctggagctgcattgaaccctgggaccatattgagccctgtcccagcatgcaaagaggatttctcacggaagaagcttacttcgttcgacaaacttatagaaagaacatgtagttctataaggaatgtaaggcttcattgtgacgctgatctaaagccaagtggaggtgttggaacttctggaatggcaccagatgcagctgagatacagcttaaaagccccaactggttgtttggtcaaaggaagcatacggagacaatttcaaccgcaagagttgccccggttgaaaacgtgaacgaggggaacagagacgagtcaaatgtgtctctttgtggggaactaatttggctatcctcctcagttgaatcatgcgaggaggacattttcagaaggtaccttgcattcacgacagcggatgtagagaatggctggtatggcggaacactgctatatgaccgagatgaaaacagcggggcttacaggcactattctgagctctgccagggagctgtcatggatccctttgagcatgaccctgagaaagagcggcactacgcggaggcccttagcgtggatctcggcgatgcacgggtggaggccgaaatgcaggccgcgctggatgactaccaggtcatagggtcggacctgagcatcatcccttcgtgcggagcactcgcagaggacccgagccagctgacgaggtggatcattggagatgagaggctgcttgtgggtgctgctgcgcagtagaccggtggggttctgtcttctactcttctgtggaaggttgtacagagcaacagattgccattcaccgacccagcctttgtgttttatagatacttccctgaaacaattactccatgtatttagcagcaggtgttttatagacacttccctgaaacaattactccaacacgtgcatgcaatttattgttgtgcagcaggtggtattgctgctgggattagctttggcaataatagttgattgttgtgcagcaggtgtttgatttcattcatctataaataaccaaagccag

SEQ ID NO: 57172 - DNA, 3090 bp, Zea Mays
ggacatgtgcgctttctccgcctttcctctcgtctcctcgtccgttgggggctcgggcgctcggctggatccatttcgcgtggcgcgcgcggtcgacgggaggtcccagccagccagcgagagagggagccggggccgggcggggcggcacctcgcgagatggcggcggaagcggacgacccgtcgctggcggcgaccctggagaagttccgcctctacgagacgcgcgcgaggttctacgtgatcgggagctcgcgggagaagcgctggttccgggtgctcaagatcgaccgctccgagccctccgagctcaacgtaagcgaggaccccgtctggtactcgctgcaggaggtcaagagcctcctccagcggatcgacgagggcaaccgatccaccgggggcctcgccttcgtcaccaaggcatacggcatcgcaggttgcatcaagttcctggagtcatactacctgattttagtcaccaaacgccgtcaaatcggttgcatttgcgggcatgctatatattgtatagatgagagccagatgatcaccatcccacactcatcagtgcaaacagatgttgcgacctctaagaatgagctgagggatgaaagaaatgccttatgaaaatttgtttgtctggaacacttttctgacagagccagtacgttcaaggtgccacaatactctctggacagtagctcttgtccatgggcacttcaagcaggtcaagctatcaatttttggcagagagataaatgttgttctcagctctagaagatcccgacacttcgccgggacacggtatttgaaaagaggtgtgaatgaccatggaaaagttgctaatgatgttgaaacagagcagatagtctttgaagaagaggctggttcctggaagggaagaatgagtgccgtagtacagatgcgaggatcaatccctctcttttggtcacaagaggcatctcgacttagtcctaagcctgatatttttgtgcagagatatgatcccacatatgaagcaacaaaattacattttgatgatctcgcccggcgatatggacatcctatcataatacttaatttgataaagactgttgaaaaaaggccacgtgaaatgatgctcaggcgtgaatattgtagagctgttgaatatcttaatcaaaatgtcccagaggagaagaagttgagattcatccactgggattttcataaatttgctaaaagcaaatctgcaaatgtactgggtgttttaggaaaagttgcgggtgaagcactggacctcactgggttttactacagcggaaagccaaaagtccagaaaaaaaggttaattcagcttagtcgaactagcactgcaagggatggctcccttgatataagggccagttctggagatctttcaaggctcagggatggctcccttgatataagggccagttctggagatctttcaaggctctctagtaatgctgaggcacttagttctacaggctttcaagatatgagaaatcaggctaacaaacaagagtttcttggtgatactccctgttaccaaactggagtgctccgtacaaattgcatagattgcctggatcgcacaaatgttgctcagtatgcatatggccttgctgctttggggaggcaacttcatgcaatgggactgacagatgttttaaaaatccaccctgatagcagcattgcttctgctttgatggaaatgtaccagagcatgggtgatgcacttgctcatcagtatggaggatctgcggcacataacacggttttccctgagaggcaagggaaatggaaggctactactcagtctcgggagttcctgaaatcaattaaacggtattacagtaatgcctacactgatggtgagaagcaggatgctataaatctatttctggggtattttcaaccacaagaaggaaaaccagctctttgggagctggatactgattactatcttcatgtgacgacagctggggatgatcttatgtctgatagctaccacttgagttctgcacctggaaataatgtgttcgtggggtctggagctgcattgaaccctgggaccatattgagccctgtcccagcatgcaaagaggatttctcacggaagaagcttacttcgttcgacaaacttatagaaagaacatgtagttctataaggaatgtaaggcttcattgtgacgctgatctaaagccaagtggaggtgttggaacttctggaatggcaccagatgcagctgagatacagcttaaaagccccaactggttgtttggtcaaaggaagcatacggagacaatttcaaccgcaagagttgccccggttgaaaacgtgaacgaggggaacagagacgagtcaaatgtgtctctttgtggggaactaatttggctatcctcctcagttgaatcatgcgaggaggacattttcagaaggtaccttgcattcacgacagcggatgtagagaatggctggtatggcggaacactgctatatgaccgagatgaaaacagcggggcttacaggcactattctgagctctgccagggagctgtcatggatccctttgagcatgaccctgagaaagagcggcactacgcggaggcccttagcgtggatctcggcgatgcacgggtggaggccgaaatgcaggccgcgctggatgactaccaggtcatagggtcggacctgagcatcatcccttcgtgcggagcactcgcagaggacccgagccagctgacgaggtggatcattggagatgagaggctgcttgtgggtgctgctgcgcagtagaccggtggggttctgtcttctactcttctgtggaaggttgtacagagcaacagattgccattcaccgacccagcctttgtgttttatagatacttccctgaaacaattactccatgtatttagcagcaggtgttttatagacacttccctgaaacaattactccaacacgtgcatgcaatttattgttgtgcagcaggtggtattgctgctgggattagctttggcaataatagttgattgttgtgcagcaggtgtttgatttcattcatctataaataaccaaagccag

SEQ ID NO: 57173 - DNA, 3108 bp, Zea Mays
ggacatgtgcgctttctccgcctttcctctcgtctcctcgtccgttgggggctcgggcgctcggctggatccatttcgcgtggcgcgcgcggtcgacgggaggtcccagccagccagcgagagagggagccggggccgggcggggcggcacctcgcgagatggcggcggaagcggacgacccgtcgctggcggcgaccctggagaagttccgcctctacgagacgcgcgcgaggttctacgtgatcgggagctcgcgggagaagcgctggttccgggtgctcaagatcgaccgctccgagccctccgagctcaacgtaagcgaggaccccgtctggtactcgctgcaggaggtcaagagcctcctccagcggatcgacgagggcaaccgatccaccgggggcctcgccttcgtcaccaaggcatacggcatcgcaggttgcatcaagttcctggagtcatactacctgattttagtcaccaaacgccgtcaaatcggttgcatttgcgggcatgctatatattgtatagatgagagccagatgatcaccatcccacactcatcagtgcaaacagatgttgcgacctctaagaatgagctgaggtacaagaagcttttggctagtgttgatctcaccaaggatttcttctatagctacacatatccaattatgcagagcctgcaacagagtgttacttctgcagggatgaaagaaatgccttatgaaaatttgtttgtctggaacacttttctgacagagccagtacgttcaaggtgccacaatactctctggacagtagctcttgtccatgggcacttcaagcaggtcaagctatcaatttttggcagagagataaatgttgttctcagctctagaagatcccgacacttcgccgggacacggtatttgaaaagaggtgtgaatgaccatggaaaagttgctaatgatgttgaaacagagcagatagtctttgaagaagaggctggttcctggaagggaagaatgagtgccgtagtacagatgcgaggatcaatccctctcttttggtcacaagaggcatctcgacttagtcctaagcctgatatttttgtgcagagatatgatcccacatatgaagcaacaaaattacattttgatgatctcgcccggcgatatggacatcctatcataatacttaatttgataaagactgttgaaaaaaggccacgtgaaatgatgctcaggcgtgaatattgtagagctgttgaatatcttaatcaaaatgtcccagaggagaagaagttgagattcatccactgggattttcataaatttgctaaaagcaaatctgcaaatgtactgggtgttttaggaaaagttgcgggtgaagcactggacctcactgggttttactacagcggaaagccaaaagtccagaaaaaaaggttaattcagcttagtcgaactagcactgcaagggatggctcccttgatataagggccagttctggagatctttcaaggctcagggatggctcccttgatataagggccagttctggagatctttcaaggctctctagtaatgctgaggcacttagttctacaggctttcaagatatgagaaatcaggctaacaaacaagagtttcttggtgatactccctgttaccaaactggagtgctccgtacaaattgcatagattgcctggatcgcacaaatgttgctcagtatgcatatggccttgctgctttggggaggcaacttcatgcaatgggactgacagatgttttaaaaatccaccctgatagcagcattgcttctgctttgatggaaatgtaccagagcatgggtgatgcacttgctcatcagtatggaggatctgcggcacataacacggttttccctgagaggcaagggaaatggaaggctactactcagtctcgggagttcctgaaatcaattaaacggtattacagtaatgcctacactgatggtgagaagcaggatgctataaatctctggggatgatcttatgtctgatagctaccacttgagttctgcacctggaaataatgtgttcgtggggtctggagctgcattgaaccctgggaccatattgagccctgtcccagcatgcaaagaggatttctcacggaagaagcttacttcgttcgacaaacttatagaaagaacatgtagttctataaggaatgtaaggcttcattgtgacgctgatctaaagccaagtggaggtgttggaacttctggaatggcaccagatgcagctgagatacagcttaaaagccccaactggttgtttggtcaaaggaagcatacggagacaatttcaaccgcaagagttgccccggttgaaaacgtgaacgaggggaacagagacgagtcaaatgtgtctctttgtggggaactaatttggctatcctcctcagttgaatcatgcgaggaggacattttcagaaggtaccttgcattcacgacagcggatgtagagaatggctggtatggcggaacactgctatatgaccgagatgaaaacagcggggcttacaggcactattctgagctctgccagggagctgtcatggatccctttgagcatgaccctgagaaagagcggcactacgcggaggcccttagcgtggatctcggcgatgcacgggtggaggccgaaatgcaggccgcgctggatgactaccaggtcatagggtcggacctgagcatcatcccttcgtgcggagcactcgcagaggacccgagccagctgacgaggtggatcattggagatgagaggctgcttgtgggtgctgctgcgcagtagaccggtggggttctgtcttctactcttctgtggaaggttgtacagagcaacagattgccattcaccgacccagcctttgtgttttatagatacttccctgaaacaattactccatgtatttagcagcaggtgttttatagacacttccctgaaacaattactccaacacgtgcatgcaatttattgttgtgcagcaggtggtattgctgctgggattagctttggcaataatagttgattgttgtgcagcaggtgtttgatttcattcatctataaataaccaaagccag

SEQ ID NO: 57174 - DNA, 3166 bp, Zea Mays
ggacatgtgcgctttctccgcctttcctctcgtctcctcgtccgttgggggctcgggcgctcggctggatccatttcgcgtggcgcgcgcggtcgacgggaggtcccagccagccagcgagagagggagccggggccgggcggggcggcacctcgcgagatggcggcggaagcggacgacccgtcgctggcggcgaccctggagaagttccgcctctacgagacgcgcgcgaggttctacgtgatcgggagctcgcgggagaagcgctggttccgggtgctcaagatcgaccgctccgagccctccgagctcaacgtaagcgaggaccccgtctggtactcgctgcaggaggtcaagagcctcctccagcggatcgacgagggcaaccgatccaccgggggcctcgccttcgtcaccaaggcatacggcatcgcaggttgcatcaagttcctggagtcatactacctgattttagtcaccaaacgccgtcaaatcggttgcatttgcgggcatgctatatattgtatagatgagagccagatgatcaccatcccacactcatcagtgcaaacagatgttgcgacctctaagaatgagctgaggtacaagaagcttttggctagtgttgatctcaccaaggatttcttctatagctacacatatccaattatgcagagcctgcaacagagtgttacttctgcagggatgaaagaaatgccttatgaaaatttgtttgtctggaacacttttctgacagagccagtacgttcaaggtgccacaatactctctggacagtagctcttgtccatgggcacttcaagcaggtcaagctatcaatttttggcagagagataaatgttgttctcagctctagaagatcccgacacttcgccgggacacggtatttgaaaagaggtgtgaatgaccatggaaaagttgctaatgatgttgaaacagagcagatagtctttgaagaagaggctggttcctggaagggaagaatgagtgccgtagtacagatgcgaggatcaatccctctcttttggtcacaagaggcatctcgacttagtcctaagcctgatatttttgtgcagagatatgatcccacatatgaagcaacaaaattacattttgatgatctcgcccggcgatatggacatcctatcataatacttaatttgataaagactgttgaaaaaaggccacgtgaaatgatgctcaggcgtgaatattgtagagctgttgaatatcttaatcaaaatgtcccagaggagaagaagttgagattcatccactgggattttcataaatttgctaaaagcaaatctgcaaatgtactgggtgttttaggaaaagttgcgggtgaagcactggacctcactgggttttactacagcggaaagccaaaagtccagaaaaaaaggttaattcagcttagtcgaactagcactgcaagggatggctcccttgatataagggccagttctggagatctttcaaggctcagggatggctcccttgatataagggccagttctggagatctttcaaggctctctagtaatgctgaggcacttagttctacaggctttcaagatatgagaaatcaggctaacaaacaagagtttcttggtgatactccctgttaccaaactggagtgctccgtacaaattgcatagattgcctggatcgcacaaatgttgctcagtatgcatatggccttgctgctttggggaggcaacttcatgcaatgggactgacagatgttttaaaaatccaccctgatagcagcattgcttctgctttgatggaaatgtaccagagcatgggtgatgcacttgctcatcagtatggaggatctgcggcacataacacggttttccctgagaggcaagggaaatggaaggctactactcagtctcgggagttcctgaaatcaattaaacggtattacagtaatgcctacactgatgatttctggggtattttcaaccacaagaaggaaaaccagctctttgggagctggatactgattactatcttcatgtgacgacagctggggatgatcttatgtctgatagctaccacttgagttctgcacctggaaataatgtgttcgtggggtctggagctgcattgaaccctgggaccatattgagccctgtcccagcatgcaaagaggatttctcacggaagaagcttacttcgttcgacaaacttatagaaagaacatgtagttctataaggaatgtaaggcttcattgtgacgctgatctaaagccaagtggaggtgttggaacttctggaatggcaccagatgcagctgagatacagcttaaaagccccaactggttgtttggtcaaaggaagcatacggagacaatttcaaccgcaagagttgccccggttgaaaacgtgaacgaggggaacagagacgagtcaaatgtgtctctttgtggggaactaatttggctatcctcctcagttgaatcatgcgaggaggacattttcagaaggtaccttgcattcacgacagcggatgtagagaatggctggtatggcggaacactgctatatgaccgagatgaaaacagcggggcttacaggcactattctgagctctgccagggagctgtcatggatccctttgagcatgaccctgagaaagagcggcactacgcggaggcccttagcgtggatctcggcgatgcacgggtggaggccgaaatgcaggccgcgctggatgactaccaggtcatagggtcggacctgagcatcatcccttcgtgcggagcactcgcagaggacccgagccagctgacgaggtggatcattggagatgagaggctgcttgtgggtgctgctgcgcagtagaccggtggggttctgtcttctactcttctgtggaaggttgtacagagcaacagattgccattcaccgacccagcctttgtgttttatagatacttccctgaaacaattactccatgtatttagcagcaggtgttttatagacacttccctgaaacaattactccaacacgtgcatgcaatttattgttgtgcagcaggtggtattgctgctgggattagctttggcaataatagttgattgttgtgcagcaggtgtttgatttcattcatctataaataaccaaagccag

SEQ ID NO: 57175 - DNA, 1933 bp, Zea Mays
ggatgacgccgcacgcacgaggtgcaagtgcaaacgaccgcgtccgagtccggatccgccaccaccgcgccctcgccgcactacaggcacgtggagcccatcggcggtgagccggaggctggagcacgcgcggcggtggcggcagcggctgcgcttgcggcggaaggaacggggtggggattcgaatcgaaggagcagcggcgatctactgttccctttatatgttgaagaatggcttggagctaacagtactgacaccaacttttggttatgatcagaagcgactggagtgcagtaatgaatctctaattgtttgcaatataagaaccagatacctcattcaaatggtttttccatgttacagattggtagccaagaacaaagagaaaaacacacaacagtaatgggtcacgaccatatgtctcgtataaagatgcatatggcagaaggttcttttggtgacaggatccggtgccagcaacctgggtgcaatgaggttgtcgatagaagggtagtgtactgcaaaattcacagtggagagttgtcatgccaacagttcagttacctccagagcggactggagagctcaggtttatctgtgcgccctgttaacgacagccaatttaagggatctgtttccattgcagcagtgccatgcactgagcaagagttacatgtcaagcatgaaggtggtgatcgaggtaaactaaaggatagttctgggtacactttgggtcaggctgcacaatttatcttctctggggcaagcatgctttgcaagaacgataactgcagcaagcaagcacacgagaactcaatccactgtaagttgcatagcggcggcgttaacaagggctgcatggcacggggctgtacaagaggtgcgcatggaggcacgcctttgtgcattgggcacggaggtgggaggcggtgtgtggtccctggatgcccaaatgcagcatgtggccaaggccgtagcgaccgctgcgtgaggcacggtggcggcaagagatgtaaattcgaagggtgcgcgaagggcgcgcaagggaacaccgatcactgcataaggcacggtgggggaaggcggtgcaggttccaaggatgtacaaagagtgcgcagggacgcacagatttctgcatcaagcatggtgggggcagccggtgcaggttccaagggtgtggcgcgagcgcaaaatggggaacggatttgtgctctgtgcacaggaagagcctgttgggcggtgacaatgccatccctgaagctttggccgccccttcagaaaaacgacgccgggccaagacgccccaaagggaagcgaagccgtccgaggtcttccaagagaatgtcacaacagcagctactgctggtaacagcacacagcacacgggcttccttctcgtagctgcccctgttgctaaccgtgacatactgaccaatggtatggcagtgacggggcaagctgcaatagccccccaacggatagtggcaccgatgttcatgagatcaccaacgccatctggatcagtggctgcctcggcacagaggtgggaggcgggagcaagcaggggtatgctgggtctgtagaaaggtggtataatttgggaaggcttggagacaccttgcccaagatagttctctgattattggctttcagactgagaaacctctgaaacttgacagccttgtgccgtcaacggactctagtgatgtcctgtgcagctgtgctctctcatttgtattgtaaattgtaatgcaaatctctagttgttcttgtgtatgttctcttgtcgccttgtagtagcgtggaaaccggtcgggggaccatctggaactttggatgataagcaataatattgtggcatggcctagctttgcaggtccagttggacttttttaagtagtggacattttacacattattttttcgtaccc

SEQ ID NO: 57176 - DNA, 1829 bp, Zea Mays
cgtcccgtcccccctcacctctcctctttctgctaaaaaaaaatactctcctatactatactagtgccaaattgcttctgcattctcttcccttcctgcatttcctcctctgtctcatcggggacccctgtccctcgtggcgacggccggtcgaccgccgctgccgaggacttcgccggcgacgaccacccccacgcccactacattatatgttgaagaatggcttggagctaacagtactgacaccaacttttggttatgatcagaagcgactggagtgcaaaaaacacacaacagtaatgggtcacgaccatatgtctcgtataaagatgcatatggcagaaggttcttttggtgacaggatccggtgccagcaacctgggtgcaatgaggttgtcgatagaagggtagtgtactgcaaaattcacagtggagagttgtcatgccaacagttcagttacctccagagcggactggagagctcaggtttatctgtgcgccctgttaacgacagccaatttaagggatctgtttccattgcagcagtgccatgcactgagcaagagttacatgtcaagcatgaaggtggtgatcgaggtaaactaaaggatagttctgggtacactttgggtcaggctgcacaatttatcttctctggggcaagcatgctttgcaagaacgataactgcagcaagcaagcacacgagaactcaatccactgtaagttgcatagcggcggcgttaacaagggctgcatggcacggggctgtacaagaggtgcgcatggaggcacgcctttgtgcattgggcacggaggtgggaggcggtgtgtggtccctggatgcccaaatgcagcatgtggccaaggccgtagcgaccgctgcgtgaggcacggtggcggcaagagatgtaaattcgaagggtgcgcgaagggcgcgcaagggaacaccgatcactgcataaggcacggtgggggaaggcggtgcaggttccaaggatgtacaaagagtgcgcagggacgcacagatttctgcatcaagcatggtgggggcagccggtgcaggttccaagggtgtggcgcgagcgcaaaatggggaacggatttgtgctctgtgcacaggaagagcctgttgggcggtgacaatgccatccctgaagctttggccgccccttcagaaaaacgacgccgggccaagacgccccaaagggaagcgaagccgtccgaggtcttccaagagaatgtcacaacagcagctactgctggtaacagcacacagcacacgggcttccttctcgtagctgcccctgttgctaaccgtgacatactgaccaatggtatggcagtgacggggcaagctgcaatagccccccaacggatagtggcaccgatgttcatgagatcaccaacgccatctggatcagtggctgcctcggcacagaggtgggaggcgggagcaagcaggggtatgctgggtctgtagaaaggtggtataatttgggaaggcttggagacaccttgcccaagatagttctctgattattggctttcagactgagaaacctctgaaacttgacagccttgtgccgtcaacggactctagtgatgtcctgtgcagctgtgctctctcatttgtattgtaaattgtaatgcaaatctctagttgttcttgtgtatgttctcttgtcgccttgtagtagcgtggaaaccggtcgggggaccatctggaactttggatgataagcaataatattgtggcatggcctagctttgcaggtccagttggacttttttaagtagtggacattttacacattattttttcgtaccc

SEQ ID NO: 57177 - DNA, 1496 bp, Zea Mays
tccatagcttgtgattttgcaaggacaggatccggtgccagcaacctgggtgcaatgaggttgtcgatagaagggtagtgtactgcaaaattcacagtggagagttgtcatgccaacagttcagttacctccagagcggactggagagctcaggtttatctgtgcgccctgttaacgacagccaatttaagggatctgtttccattgcagcagtgccatgcactgagcaagagttacatgtcaagcatgaaggtggtgatcgaggtaaactaaaggatagttctgggtacactttgggtcaggctgcacaatttatcttctctggggcaagcatgctttgcaagaacgataactgcagcaagcaagcacacgagaactcaatccactgtaagttgcatagcggcggcgttaacaagggctgcatggcacggggctgtacaagaggtgcgcatggaggcacgcctttgtgcattgggcacggaggtgggaggcggtgtgtggtccctggatgcccaaatgcagcatgtggccaaggccgtagcgaccgctgcgtgaggcacggtggcggcaagagatgtaaattcgaagggtgcgcgaagggcgcgcaagggaacaccgatcactgcataaggcacggtgggggaaggcggtgcaggttccaaggatgtacaaagagtgcgcagggacgcacagatttctgcatcaagcatggtgggggcagccggtgcaggttccaagggtgtggcgcgagcgcaaaatggggaacggatttgtgctctgtgcacaggaagagcctgttgggcggtgacaatgccatccctgaagctttggccgccccttcagaaaaacgacgccgggccaagacgccccaaagggaagcgaagccgtccgaggtcttccaagagaatgtcacaacagcagctactgctggtaacagcacacagcacacgggcttccttctcgtagctgcccctgttgctaaccgtgacatactgaccaatggtatggcagtgacggggcaagctgcaatagccccccaacggatagtggcaccgatgttcatgagatcaccaacgccatctggatcagtggctgcctcggcacagaggtgggaggcgggagcaagcaggggtatgctgggtctgtagaaaggtggtataatttgggaaggcttggagacaccttgcccaagatagttctctgattattggctttcagactgagaaacctctgaaacttgacagccttgtgccgtcaacggactctagtgatgtcctgtgcagctgtgctctctcatttgtattgtaaattgtaatgcaaatctctagttgttcttgtgtatgttctcttgtcgccttgtagtagcgtggaaaccggtcgggggaccatctggaactttggatgataagcaataatattgtggcatggcctagctttgcaggtccagttggacttttttaagtagtggacattttacacattattttttcgtaccc

SEQ ID NO: 57178 - DNA, 1551 bp, Zea Mays
attttatgttccaatgaattaatgcaatccacaaactagtcatgactcaagaagctaattttcatattggatcagccagacaggatccggtgccagcaacctgggtgcaatgaggttgtcgatagaagggtagtgtactgcaaaattcacagtggagagttgtcatgccaacagttcagttacctccagagcggactggagagctcaggtttatctgtgcgccctgttaacgacagccaatttaagggatctgtttccattgcagcagtgccatgcactgagcaagagttacatgtcaagcatgaaggtggtgatcgaggtaaactaaaggatagttctgggtacactttgggtcaggctgcacaatttatcttctctggggcaagcatgctttgcaagaacgataactgcagcaagcaagcacacgagaactcaatccactgtaagttgcatagcggcggcgttaacaagggctgcatggcacggggctgtacaagaggtgcgcatggaggcacgcctttgtgcattgggcacggaggtgggaggcggtgtgtggtccctggatgcccaaatgcagcatgtggccaaggccgtagcgaccgctgcgtgaggcacggtggcggcaagagatgtaaattcgaagggtgcgcgaagggcgcgcaagggaacaccgatcactgcataaggcacggtgggggaaggcggtgcaggttccaaggatgtacaaagagtgcgcagggacgcacagatttctgcatcaagcatggtgggggcagccggtgcaggttccaagggtgtggcgcgagcgcaaaatggggaacggatttgtgctctgtgcacaggaagagcctgttgggcggtgacaatgccatccctgaagctttggccgccccttcagaaaaacgacgccgggccaagacgccccaaagggaagcgaagccgtccgaggtcttccaagagaatgtcacaacagcagctactgctggtaacagcacacagcacacgggcttccttctcgtagctgcccctgttgctaaccgtgacatactgaccaatggtatggcagtgacggggcaagctgcaatagccccccaacggatagtggcaccgatgttcatgagatcaccaacgccatctggatcagtggctgcctcggcacagaggtgggaggcgggagcaagcaggggtatgctgggtctgtagaaaggtggtataatttgggaaggcttggagacaccttgcccaagatagttctctgattattggctttcagactgagaaacctctgaaacttgacagccttgtgccgtcaacggactctagtgatgtcctgtgcagctgtgctctctcatttgtattgtaaattgtaatgcaaatctctagttgttcttgtgtatgttctcttgtcgccttgtagtagcgtggaaaccggtcgggggaccatctggaactttggatgataagcaataatattgtggcatggcctagctttgcaggtccagttggacttttttaagtagtggacattttacacattattttttcgtaccc

SEQ ID NO: 57179 - DNA, 1532 bp, Zea Mays
gcggccgagtcgcacactccaatgaagggaagctttggttggttgactgctccatccacccaccccctacagttcagttcagttcagttggtctaggccatggccatgtccgcttcctcctcctcgcgcgccctcctccgccggatcggcggcgcgctcctccgccgctccttctcctcctcatccgccgcctccgcagggtaccacgtcgcgggcgggcccagctacatgcgcggcgccgtcttctgggagcccggccgcccgctcacgctcgaggagttccgcatgccgcggcccaaggccggcgagctcctcatcaagaccaaagcctgcggggtctgtcactccgatctccatgtcctcaaaggcgagctccctttctccacgccctgtgtcgtgggccatgagatcactggagaggtggttgaccatggcacgcacactcctgttgagatcatcaacaggttcccagtcggaagtcacgtcgtcggcgccttcataatgccatgtgggaactgcttctactgcgttaagggccaagaagatctgtgtgagtctttcttcgcgtataatcgtgccaaggggacactctatgatggcgagacacggctgtttctaagggggaaaccggtgtacatgtatagtatgggagggcttgcagagtattgtgttgtcccagccaatgcgctagcagttctccctgactcactgccatacacagaatcagcaattttaggatgtgcagtgtttaccgcgtatggtgccctgaggcatgctgctgaaatgcggcctggtgattcagtagctgtgatcggagttggaggggttgggtcaagctgtttacagatagcaaaagcctttggagcttcccaagtcattgcagtggatgtccttgatgagaagcttcagaacgctacaacacttggagcaacccacactgtaaatgcagcaaaagatgatgcagttgaaaggataaaggaaattactgatggtaggggtgtagatgtggctatagaggcacttggtaaggcgttaacattttcccagtgcgccaagagcgtgcgtgatggaggcaaagctgttatgatcgggcttgctgcaacgaacgtaatgggagaggttgatataacccgtcttgtccgacgacaggtgaaaatcattggctcatatggcgcaagggctaggcaagaccttcctcagatagtgaagctcgcggagagtggtgccttcaatctccaaaacaccatatcaaggaaatgcaaatttgaggaggcgaatggcgcctatgaggatctcaatcagggcaagatcgtaggacgagctgtggttgagatcatggagtgatgacggacaaggtaatcaatcctgtggttccaagtctgggtcacacaacaataaagttttgcgtgctctttcacagcattgtcaaaatctgtagatgaccaaactgcattgtgtgtgtgtgtgtgtgtgtgtgtgacagtgtgttgttggaattaacatttgcccttaaattatgtctgtacacgccc

SEQ ID NO: 57180 - DNA, 1521 bp, Zea Mays
gcggccgagtcgcacactccaatgaagggaagctttggttggttgactgctccatccacccaccccctacagttcagttcagttcagttggtctaggccatggccatgtccgcttcctcctcctcgcgcgccctcctccgccggatcggcggcgcgctcctccgccgctccttctcctcctcatccgccgcctccgcagggtaccacgtcgcgggcgggcccagctacatgcgcggcgccgtcttctgggagcccggccgcccgctcacgctcgaggagttccgcatgccgcggcccaaggccggcgagctcctcatcaagaccaaagcctgcggggtctgtcactccgatctccatgtcctcaaaggcgagctccctttctccacgccctgtgtcgtgggccatgagatcactggagaggtggttgaccatggcacgcacactcctgttgagatcatcaacaggttcccagtcggaagtcacgtcgtcggcgccttcataatgccatgtgggaactgcttctactgcgttaagggccaagaagatctgtgtgagtctttcttcgcgtataatcgtgccaaggggacactctatgatggcgagacacggctgtttctaaggggcaatgggaaaccggtgtacatgtatagtatgggagggcttgcagagtattgtgttgtcccagccaatgcgctagcagttctccctgactcactgccatacacagaatcagcaattttaggatgtgcagtgtttaccgcgtatggtgccctgaggcatgctgctgaaatgcggcctggtgattcagtagctgtgatcggagttggaggggttgggtcaagctgtttacagatagcaaaagcctttggagcttcccaagtcattgcagtggatgtccttgatgagaagcttcagaacgctacaacacttggagcaacccacactgtaaatgcagcaaaagatgatgcagttgaaaggataaaggggtgtagatgtggctatagaggcacttggtaaggcgttaacattttcccagtgcgccaagagcgtgcgtgatggaggcaaagctgttatgatcgggcttgctgcaacgaacgtaatgggagaggttgatataacccgtcttgtccgacgacaggtgaaaatcattggctcatatggcgcaagggctaggcaagaccttcctcagatagtgaagctcgcggagagtggtgccttcaatctccaaaacaccatatcaaggaaatgcaaatttgaggaggcgaatggcgcctatgaggatctcaatcagggcaagatcgtaggacgagctgtggttgagatcatggagtgatgacggacaaggtaatcaatcctgtggttccaagtctgggtcacacaacaataaagttttgcgtgctctttcacagcattgtcaaaatctgtagatgaccaaactgcattgtgtgtgtgtgtgtgtgtgtgtgtgacagtgtgttgttggaattaacatttgcccttaaattatgtctgtacacgccc

SEQ ID NO: 57181 - DNA, 1423 bp, Zea Mays
gcggccgagtcgcacactccaatgaagggaagctttggttggttgactgctccatccacccaccccctacagttcagttcagttcagttggtctaggccatggccatgtccgcttcctcctcctcgcgcgccctcctccgccggatcggcggcgcgctcctccgccgctccttctcctcctcatccgccgcctccgcagggtaccacgtcgcgggcgggcccagctacatgcgcggcgccgtcttctgggagcccggccgcccgctcacgctcgaggagttccgcatgccgcggcccaaggccggcgagctcctcatcaagaccaaagcctgcggggtctgtcactccgatctccatgtcctcaaaggcgagctccctttctccacgccctgtgtcgtgggccatgagatcactggagaggtggttgaccatggcacgcacactcctgttgagatcatcaacaggttcccagtcggaagtcacgtcgtcggcgccttcataatgccatgtgggaactgcttctactgcgttaagggccaagaagatctgtgtgagtctttcttcgcgtataatcgtgccaaggggacactctatgatggcgagacacggctgtttctaaggggcaatgggaaaccggtgtacatgtatagtatgggagggcttgcagagtattgtgttgtcccagccaatgcgctagcagttctccctgactcactgccatacacagaatcagcaattttaggatgtgcagtgtttaccgcgtatggtgccctgaggcatgctgctgaaatgcggcctggtgattcagtagctgtgatcggagttggaggggttgggtcaagctgtttacagatagcaaaagcctttggagcttcccaagtcattgcagtggatgtccttgatgagaagcttcagaacgctacaacacttggagcaacccacactgtaaatgcagcaaaagatgatgcagttgaaaggataaaggaaattactgatggtaggggtgtagatgtggctatagaggcacttggtaaggcgttaacattttcccagtgcgccaagagcgtgcgtgatggaggcaaagctgttatgatcgggcttgctgcaacgaacgtaatgggagaggttgatataacccgtcttgtccgacgacaggtgaaaatcattggctcatatggcgcaagggctaggcaagaccttcctcagatagtgaagctcgcggagagtggtgccttcaatctccaaaacaccatatcaaggaaatgcaaatttgaggaggcgaatggcgcctatgaggatctcaatcagggcaagatcgtaggacgagctgtggttgagatcatggagtgatgacggacaagtgttcaggcagcgactgcaggtccacataacagacacctcgcccttgaaaatggaatcgaca

SEQ ID NO: 57182 - DNA, 3208 bp, Zea Mays
aacccgtgccgtgcctgccgagcccaaccactccaccaccctctggctctcctcgtcctcggcgacgagttctcccccttctctctcctcttctcgccctcgccttcgcgtagtcgagtctcatcgtcagctcctcgcctgtcgcctccgctgcgcgtcgccggacgagaggagagacagacagacagacagagaggggaaagggatccctccgaccaggcccaccgccgtccatccgcccccggatctcctccgtccccaccgccgtcgccgacacacgactccaggtcagtgttgatggataatctctctccaagcactctgctcaacagtatcacctgtcttggcgccttaacatctgatgtctctactgtgagacccaagcctgttcagaagtattgcaaaaatgtatatgatatctcaagcatcgtgaatccccttcttgaagatctttgcaagtctcccgaagagcaacttaatgaggtcctaagagatcttgacaccgctgtcaatgaagcttcaggtcttattggaaactggcaccagacaaccggcaaaatatgttttggttggcaaattgagtcagtaatatcagatattcagggatgttcccttcagttgtgccagctggttcattcgctattgccttctctgactgctcgtgcatgcacatgtattgaggacataaattatgagcacctgtttgatctggttaaggaggttgccatggagcttgcagagacaggtgcagtgagttctgagaatctgttgaaactatcaagtttgttgagcttgtcaacaaacatggaattgtacatggaagctgtttcccttgagaatctcagaacaagggcactacgaagtgagaatcgtgaagaactggagctagccgagcagatgattccactggtcaactatatgcatgatcatcttctcagggaaaaacaacagcttagcatcaatggtgtccctattcctcctgatttttgctgtcccctttccttggagctgatgtctgatcctgttattgtagcgtctggacagacctatgagcgggtttatatcaagttatggcttgatgagggttttactatctgcccaaaaacacggcaaagacttggccactccaatttaatacctaattatactgtgaaggctctgatagctaactggtgtgaatcacatgacattaggctccctgatcctataaaatcactgaagttgaactttccttctgctgcctcctcccttcaggatttgagtgctgcaggtggcagccctctacatcctactcttgtgtcaaggtctaatattcctgggtccccagaagctgatgtgcacttgagaaacttaaatggcgcatcttctcctcgtagtttggccaatcagaattctcatgtgcatgcaaaccgtcctggtcatgaggtatcgacgagtcaaacttcagaaaatgcaaatggttctgcaccagatgtttcgaggttatctctcgcaggttctgaaacaagagagtctagtatggaagcaaagcgtgctggttcgattggacaaatgtcagaacattctactgatgaagcatttcaatcttctaatttagataggaatctgcaggacaacttggctagctcttcattgaatggtagtctcccaaatagtggtcaacttgatggggaatgtgacaatggggtgacaagggttccaagcgataggacaaattacagtagtgatgcatctggagaggttacagatggcggtgctgcgcccgtagcctcttctgttcctcaaagggaacacttaattcctgcaagattgggtactagacaatttataaggcggcaaccatcagataggggtttccccagaattatatcttcatcaacgatggatacacggagtgatctctctgccattgagaatcaggttcggaagctgattgatgatttgaaaagtgattccatagatgttcagagatcagcagcatcagatcttcgttctctagctaagcacaacatggagaataggattgtcattgcaaactgtggggctgtaaacgtgctggttggtcttcttcattcaccagatgccaaaacccaagaacatgctgtgacagctcttttgaatttgtcgatcaatgacaacaataaaattgctattgcaaatgctgatgctgtcgaccctctcattcatgtccttgagactgggaaccctgaagctaaagagaattcagcagctactctattcagtctctcggttgttgaagaaaataaagtgaggattggacgatctggtgccatcaagcctctagtagacttgctaggaaatggcacccctcgaggaaagaaagacgcagctacagcattgtttaacctgtcgattcttcatgagaataaagctcgcatcgtgcaagctgatgctgtacagcatctggttgagcttatggatcctgctgctggaatggtcgacaaagctgtggctgtgttggcaaaccttgctacgataccagaaggaaggaatgcgattgggcaggcacgtggcattccagcccttgttgaagttgttgagttgggctctgcaagagggaaggagaatgctgcggccgcgttgcttcagctctgtacaaacagcaacagattttgcagtatagttcttcaagagggcgcagtgccccctctagtcgccctttcacagtcgggaacaccgcgtgcgagagagaaggcacaagcgcttctgagctacttccggagccaaagacatgggaattcagcaaggagatgattttcccccttgtgttgtagtgtacattaaagcgtcaccttttatgcccatcatcgtgattgggtcctgttgactgttactgattggcgctggtaaatgcgttggctggaattatgcagtgccctgtgctctgtttatagattgagattgttattgctcatctcatgtaagtgttgtgggcggtgagtgttgtctgttgagatggtatgtttttttttcttctctttttcgtttttgaggattttttgtacagcttatccgttggtagcaacttgcatattcactgattttgtcctgtatgtatattctattagctgtggcctgtggaattatgatggttcgatggttgtacaagttatttatttgatctgtagtaccagctaccaaataaggccacatttggacgcaaagtatttttgaagtattggataaa

SEQ ID NO: 57183 - DNA, 3127 bp, Zea Mays
aacccgtgccgtgcctgccgagcccaaccactccaccaccctctggctctcctcgtcctcggcgacgagttctcccccttctctctcctcttctcgccctcgccttcgcgtagtcgagtctcatcgtcagctcctcgcctgtcgcctccgctgcgcgtcgccggacgagaggagagacagacagacagacagagaggggaaagggatccctccgaccaggcccaccgccgtccatccgcccccggatctcctccgtccccaccgccgtcgccgacacacgactccagacccaagcctgttcagaagtattgcaaaaatgtatatgatatctcaagcatcgtgaatccccttcttgaagatctttgcaagtctcccgaagagcaacttaatgaggtcctaagagatcttgacaccgctgtcaatgaagcttcaggtcttattggaaactggcaccagacaaccggcaaaatatgttttggttggcaaattgagtcagtaatatcagatattcagggatgttcccttcagttgtgccagctggttcattcgctattgccttctctgactgctcgtgcatgcacatgtattgagaaactccaggacataaattatgagcacctgtttgatctggttaaggaggttgccatggagcttgcagagacaggtgcagtgagttctgagaatctgttgaaactatcaagtttgttgagcttgtcaacaaacatggaattgtacatggaagctgtttcccttgagaatctcagaacaagggcactacgaagtgagaatcgtgaagaactggagctagccgagcagatgattccactggtcaactatatgcatgatcatcttctcagggaaaaacaacagcttagcatcaatggtgtccctattcctcctgatttttgctgtcccctttccttggagctgatgtctgatcctgttattgtagcgtctggacagacctatgagcgggtttatatcaagttatggcttgatgagggttttactatctgcccaaaaacacggcaaagacttggccactccaatttaatacctaattatactgtgaaggctctgatagctaactggtgtgaatcacatgacattaggctccctgatcctataaaatcactgaagttgaactttccttctgctgcctcctcccttcaggatttgagtgctgcaggtggcagccctctacatcctactcttgtgtcaaggtctaatattcctgggtccccagaagctgatgtgcacttgagaaacttaaatggcgcatcttctcctcgtagtttggccaatcagaattctcatgtgcatgcaaaccgtcctggtcatgaggtatcgacgagtcaaacttcagaaaatgcaaatggttctgcaccagatgtttcgaggttatctctcgcaggttctgaaacaagagagtctagtatggaagcaaagcgtgctggttcgattggacaaatgtcagaacattctactgatgaagcatttcaatcttctaatttagataggaatctgcaggacaacttggctagctcttcattgaatggtagtctcccaaatagtggtcaacttgatggggaatgtgacaatggggtgacaagggttccaagcgataggacaaattacagtagtgatgcatctggagaggttacagatggcggtgctgcgcccgtagcctcttctgttcctcaaagggaacacttaattcctgcaagattgggtactagacaatttataaggcggcaaccatcagataggggtttccccagaattatatcttcatcaacgatggatacacggagtgatctctctgccattgagaatcaggttcggaagctgattgatgatttgaaaagtgattccatagatgttcagagatcagcagcatcagatcttcgttctctagctaagcacaacatggagaataggattgtcattgcaaactgtggggctgtaaacgtgctggttggtcttcttcattcaccagatgccaaaacccaagaacatgctgtgacagctcttttgaatttgtcgatcaatgacaacaataaaattgctattgcaaatgctgatgctgtcgaccctctcattcatgtccttgagactgggaaccctgaagctaaagagaattcagcagctactctattcagtctctcggttgttgaagaaaataaagtgaggattggacgatctggtgccatcaagcctctagtagacttgctaggaaatggcacccctcgaggaaagaaagacgcagctacagcattgtttaacctgtcgattcttcatgagaataaagctcgcatcgtgcaagctgatgctgtacagcatctggttgagcttatggatcctgctgctggaatggtcgacaaagctgtggctgtgttggcaaaccttgctacgataccagaaggaaggaatgcgattgggcaggcacgtggcattccagcccttgttgaagttgttgagttgggctctgcaagagggaaggagaatgctgcggccgcgttgcttcagctctgtacaaacagcaacagattttgcagtatagttcttcaagagggcgcagtgccccctctagtcgccctttcacagtcgggaacaccgcgtgcgagagagaaggcacaagcgcttctgagctacttccggagccaaagacatgggaattcagcaaggagatgattttcccccttgtgttgtagtgtacattaaagcgtcaccttttatgcccatcatcgtgattgggtcctgttgactgttactgattggcgctggtaaatgcgttggctggaattatgcagtgccctgtgctctgtttatagattgagattgttattgctcatctcatgtaagtgttgtgggcggtgagtgttgtctgttgagatggtatgtttttttttcttctctttttcgtttttgaggattttttgtacagcttatccgttggtagcaacttgcatattcactgattttgtcctgtatgtatattctattagctgtggcctgtggaattatgatggttcgatggttgtacaagttatttatttgatctgtagtaccagctaccaaataaggccacatttggacgcaaagtatttttgaagtattggataaa

SEQ ID NO: 57184 - DNA, 3178 bp, Zea Mays
aacccgtgccgtgcctgccgagcccaaccactccaccaccctctggctctcctcgtcctcggcgacgagttctcccccttctctctcctcttctcgccctcgccttcgcgtagtcgagtctcatcgtcagctcctcgcctgtcgcctccgctgcgcgtcgccggacgagaggagagacagacagacagacagagaggggaaagggatccctccgaccaggcccaccgccgtccatccgcccccggatctcctccgtccccaccgccgtcgccgacacacgactccaggtcaggtcagtgttgatggataatctctctccaagcactctgctcaacagtatcacctgtcttggcgccttaacatctgatgtctctactgtgagacccaagcctgttcagaagtattgcaaaaatgtatatgatatctcaagcatcgtgaatccccttcttgaagatctttgcaagtctcccgaagagcaacttaatgaggtcctaagagatcttgacaccgctgtcaatgaagcttcagggttggcaaattgagtcagtaatatcagatattcagggatgttcccttcagttgtgccagctggttcattcgctattgccttctctgactgctcgtgcatgcacatgtattgagaaactccaggacataaattatgagcacctgtttgatctggttaaggaggttgccatggagcttgcagagacaggtgcagtgagttctgagaatctgttgaaactatcaagtttgttgagcttgtcaacaaacatggaattgtacatggaagctgtttcccttgagaatctcagaacaagggcactacgaagtgagaatcgtgaagaactggagctagccgagcagatgattccactggtcaactatatgcatgatcatcttctcagggaaaaacaacagcttagcatcaatggtgtccctattcctcctgatttttgctgtcccctttccttggagctgatgtctgatcctgttattgtagcgtctggacagacctatgagcgggtttatatcaagttatggcttgatgagggttttactatctgcccaaaaacacggcaaagacttggccactccaatttaatacctaattatactgtgaaggctctgatagctaactggtgtgaatcacatgacattaggctccctgatcctataaaatcactgaagttgaactttccttctgctgcctcctcccttcaggatttgagtgctgcaggtggcagccctctacatcctactcttgtgtcaaggtctaatattcctgggtccccagaagctgatgtgcacttgagaaacttaaatggcgcatcttctcctcgtagtttggccaatcagaattctcatgtgcatgcaaaccgtcctggtcatgaggtatcgacgagtcaaacttcagaaaatgcaaatggttctgcaccagatgtttcgaggttatctctcgcaggttctgaaacaagagagtctagtatggaagcaaagcgtgctggttcgattggacaaatgtcagaacattctactgatgaagcatttcaatcttctaatttagataggaatctgcaggacaacttggctagctcttcattgaatggtagtctcccaaatagtggtcaacttgatggggaatgtgacaatggggtgacaagggttccaagcgataggacaaattacagtagtgatgcatctggagaggttacagatggcggtgctgcgcccgtagcctcttctgttcctcaaagggaacacttaattcctgcaagattgggtactagacaatttataaggcggcaaccatcagataggggtttccccagaattatatcttcatcaacgatggatacacggagtgatctctctgccattgagaatcaggttcggaagctgattgatgatttgaaaagtgattccatagatgttcagagatcagcagcatcagatcttcgttctctagctaagcacaacatggagaataggattgtcattgcaaactgtggggctgtaaacgtgctggttggtcttcttcattcaccagatgccaaaacccaagaacatgctgtgacagctcttttgaatttgtcgatcaatgacaacaataaaattgctattgcaaatgctgatgctgtcgaccctctcattcatgtccttgagactgggaaccctgaagctaaagagaattcagcagctactctattcagtctctcggttgttgaagaaaataaagtgaggattggacgatctggtgccatcaagcctctagtagacttgctaggaaatggcacccctcgaggaaagaaagacgcagctacagcattgtttaacctgtcgattcttcatgagaataaagctcgcatcgtgcaagctgatgctgtacagcatctggttgagcttatggatcctgctgctggaatggtcgacaaagctgtggctgtgttggcaaaccttgctacgataccagaaggaaggaatgcgattgggcaggcacgtggcattccagcccttgttgaagttgttgagttgggctctgcaagagggaaggagaatgctgcggccgcgttgcttcagctctgtacaaacagcaacagattttgcagtatagttcttcaagagggcgcagtgccccctctagtcgccctttcacagtcgggaacaccgcgtgcgagagagaaggcacaagcgcttctgagctacttccggagccaaagacatgggaattcagcaaggagatgattttcccccttgtgttgtagtgtacattaaagcgtcaccttttatgcccatcatcgtgattgggtcctgttgactgttactgattggcgctggtaaatgcgttggctggaattatgcagtgccctgtgctctgtttatagattgagattgttattgctcatctcatgtaagtgttgtgggcggtgagtgttgtctgttgagatggtatgtttttttttcttctctttttcgtttttgaggattttttgtacagcttatccgttggtagcaacttgcatattcactgattttgtcctgtatgtatattctattagctgtggcctgtggaattatgatggttcgatggttgtacaagttatttatttgatctgtagtaccagctaccaaataaggccacatttggacgcaaagtatttttgaagtattggataaa

SEQ ID NO: 57185 - DNA, 4948 bp, Zea Mays
ctccgtctcgtcatcggcaggacatccacaccaacccgtgctcaaggaaaaaaaaccggggcggcgaaaaccctcgaaccctaatccttacgcccctcatggcggacgctgatgcggcgctgccaacgccgcctccggaggtagtagcccccgaggagcatcccgtgggcgccgaatccaccgtcgccgcgccggccgaagtcgataacaagcggaagctagaggaggtcagcgccgacgcggaggtgaaaggcaccagcgaggacgccaagcgcccgcgcgtggacggcgagcccgacgccgcaacaggggttgagcagcaaatcgatgggtcctccgtgaatgcggatcccgcagctccggaggataaggctgctcttaacgttggcgcagcaatggatggtgataatgacacgcctgctcccgctcccgctccagactcgcaggcggtttctgacgagaagccgcttgaagcagcagctgaagctccacagcaggaaggtgatgcagcaactgctgtacaggagatttctcgtaagatcgaagtgcccaacagcaaggttggtgtcgttattggaaaagctggtgagacaatcaggaacttgcaaatcagctcgggtgcaaagatccaaatcaccaaggacatcgaagcggactcaaatgccctgactcggccggttgaactagttggaacacctggcagcgttgataaagctgagcagcttattaagagtgtcatagctgaggctgaggctggtggttcccctgccttaatagctagaggatttggaagtggacagcctggatcagagcaatttgagatgacagttcctgataacaaggtcggtctcattatcggaaaaggtggtgagacaattaaaggcatgcagaccaaatctggtgctcgtattcagttaataccccaacatcctccagagggtgttacattgactgaaagaattgtacgtgttactgggaataagaagcagattgaagctgcaaaggatttgatcaagcaagctatgaatcaggtgatgtgatcttcctttgtgattttttggtagtcgatttgtgtttcaattgttaagtcatggtagatgctggtatgatactatatgcttttaattgttcatgctttatgtgattttactctgatggttgctgatgatgtcatcacatttcatgattcattgttcatgatatggttacttttgtgatcgtagataccgaattcaatgttgtcttcatggtattttttgaccaaggcaaattcaacctatcgagaacattgccttattacaatgctatgatggaccaattgattttttagctttgggtttcataatatgcctgtttttatcattgcatacattttgtacaattttcctgatcaagccaaacttgagaatccatgataagctttgtagcttgcatatatttgggttccataatatgcctgttttatcattgcacgcaattcatagtttcatactgtctttctgttcaaactaagcttgagaattccctgatgagctttgtagcttatataggtgtcccaagtgtactgatatttttgttatgaacaaaacatgatttgattttgtacttcattcatactgtgaatatattactatttctcttgtatcggacccttgaattttaagtgttgttttaaactaatcaatcttctctacacttggccttgtatgaagtatccatgatatatagcagagcctaattgggctggaaggtaagtttcttttaatgtttgagttctcatctttagatgaaagacaaatgggacaccgttgcgttttcaagattataaggatgtaaaacttttaaatccgatttactagctcaatgaatatttcactttctttcccttgtcaaaatctcttatcctgggtgttaagcactgcgaactttggcttattttgccttcttgtttttactggatcatacacgcttccattttgtacctgttcgttggagcatagttcttgatttatgcattaatgacatatgatatatgaattatggaagagtaaaaaatgagtgcatgatcatacgattcagaaatgaacttttgagctgtaatacatagcatatgatttgtctggaaatctgggtactgattgaattcttgatcccattagcttgactattcttcgtaggatatacactatgagtaggacttctcatcttcatctatcagccttaacagtaaacatgggcatgctttggatcaatgtccatgactatagctttggaagtgttgtataccagcggatcatccagttgctagatgagatatgattctgtttcctacataagcagtctgaactgacacatcaagttccctcgcttctagttttcgtcaattatttttgttgaaggtgccgatttggagttggtcaggtatcctaatgcagatacagctagctttcttcatggggggtcatcgctcttcatcgtttacttgcaccgaagagggacattgaccattatcccttagccttgcatggtgtatgtagttggtaactggtaaggctgcctattgccgaaaggaaacataaactgtttggcattggaagactgcaacaagtgtatcattgccatgacaaggcttctacatcaccatgttaggtttgctaagctgaatcatttgtgactgtatgttgtctgcaaaacagaacttccatatgttatagttgaacgattaagaatttagtgttgttgttacttatttggtatgtcactgttaactatagtttgagttgcttagcattattattcttcccattagtcacggttgctattagaaagtaagtatgtgtgatatagtgtatttaatatcaatattattgtgttatccattgaagctgtttatgtttatgcgatgcatctataaattaaattctgaagtaaccctttgcttgtatttctatttcttgttgcaatttttaatgatggttaaccaagatgcacagaaattcgtggagattttgttaatggaattcttttcttgaacattgttttttgaatgacatagttatcaatgctggacagtgtttaagaagtatgaaatatgagctactatgcaggcgtattttcttaatgccgttcttatttaactgcaatttgtacagtctggttgccccttgatggtttcctataacctgttgctttatgttagtttgtagtgtctgttatttacttccccttttggtttctaacatgaattcttgtacagacattttcaaagcatacaaatcagtctggcggatatggtccacaaggttaccgacctcagggtcatggtgccgcttctcagttggggccacgctctcagaatcatggctatggatacccacctagaggtatgcctccacctcaaaactacaacgcaccctacggtggctacccaccgcagggaccgtcaagaggtggcatgggctgggaccagaggccgggcccaccaacccatccttcgtaccagggtggtggttctgactactacaagcagggatctcagccatatgatagccagccacccagctaccctcctgggccagggaattacaacagttatgggcaatcccagggccctaactatggccaacctcagtatccgcaacatgcacctcaacagaactacagccatggctatggtgatcctagatacaatgccccccctccgaaccagcagtactatggtcagccaccgatggccccgcagcaaggctatcctcaacagccagatccctatgctaggcctccatacagtggacctggtcaatggacccccaggggtgctcccgccgcagatggctcctaccaggcgccaccttcatcttatgggccaccgtctcagcaacctcctgcttatgggcaaacatatggtgcagcaacgggacctgatgggtatggtcaacagggttacccacagcagggtggccaggtaccagcttcatatggtcagagtgcaccagcagctccaggatatcctcagcaaggcacgcagcaaggtggctatgcacagtacccgcagacccaaccagcatatggtgatcaagcagctcaagccaatgcgaactatgggtaccagggagctccagcagatcccaactacggaagtgcgtacccacagcagccagggtatggtcctcctggtcaggcaactggtcaggctggttatgcatcctctgcgccagcggccagccagcctgtgtatggccaggctggatatacccagccacctacaaatcctccaagttatgatcagtctgcagcaccagcggcgactcagagcggttatgctgcgccccctgcaaatccacaacagcctgctgcagcaaaaggggtctcgccacagcctgctgctgctgctgctgctggatatggtgctagcgggcagtggacggcatgagcctcgtcttccgaacttcgatgacagcaaggtcaggttggatatccgcttttggcgcgtgtttgaatgtttgcatcttttggatgtctgtggacgcatcatgtagggcttgaccccgttatcgaaagagattgtaaccccttgagttgtgatactggacatcttctgtagtatctacgagtagttgcttaatgtgacttttaaacattctattcagtttggatgttccttgtcttgctacttcacagcttgccaagccagtaatctttggattcatgtttggttgctctttggtctttgctgtcgttcctgtaaataaatattggcgtttggccttctcttacgtcgttcatgggatgacggggtgccctttcgagttggcaatagatctgctgttcatccaaactcagttggttttgtttgtatttgttccgaatcatgttggtacagttagcatgtgaatggacaagccattagccatggtctatttttttggttggtttgtttgaaaatgtc

SEQ ID NO: 57186 - DNA, 4329 bp, Zea Mays
tcgtcatcggcaggacatccacaccaacccgtgctcaaggaaaaaaaaccggggcggcgaaaaccctcgaaccctaatccttacgcccctcatggcggacgctgatgcggcgctgccaacgccgcctccggaggtagtagcccccgaggagcatcccgtgggcgccgaatccaccgtcgccgcgccggccgaagtcgataacaagcggaagctagaggaggtcagcgccgacgcggaggtgaaaggcaccagcgaggacgccaagcgcccgcgcgtggacggcgagcccgacgccgcaacaggggttgagcagcaaatcgatgggtcctccgtgaatgcggatcccgcagctccggaggataaggctgctcttaacgttggcgcagcaatggatggtgataatgacacgcctgctcccgctcccgctccagactcgcaggcggtttctgacgagaagccgcttgaagcagcagctgaagctccacagcaggaaggtgatgcagcaactgctgtacaggagatttctcgtaagatcgaagtgcccaacagcaaggttggtgtcgttattggaaaagctggtgagacaatcaggaacttgcaaatcagctcgggtgcaaagatccaaatcaccaaggacatcgaagcggactcaaatgccctgactcggccggttgaactagttggaacacctggcagcgttgataaagctgagcagcttattaagagtgtcatagctgaggctgaggctggtggttcccctgccttaatagctagaggatttggaagtggacagcctggatcagagcaatttgagatgacagttcctgataacaaggtcggtctcattatcggaaaaggtggtgagacaattaaaggcatgcagaccaaatctggtgctcgtattcagttaataccccaacatcctccagagggtgttacattgactgaaagaattgtacgtgttactgggaataagaagcagattgaagctgcaaaggatttgatcaagcaagctatgaatcaggtgatgtgatcttcctttgtgattttttggtagtcgatttgtgtttcaattgttaagtcatggtagatgctggtatgatactatatgcttttaattgttcatgctttatgtgattttactctgatggttgctgatgatgtcatcacatttcatgattcattgttcatgatatggttacttttgtgatcgtagataccgaattcaatgttgtcttcatggtattttttgaccaaggcaaattcaacctatcgagaacattgccttattacaatgctatgatggaccaattgattttttagctttgggtttcataatatgcctgtttttatcattgcatacattttgtacaattttcctgatcaagccaaacttgagaatccatgataagctttgtagcttgcatatatttgggttccataatatgcctgttttatcattgcacgcaattcatagtttcatactgtctttctgttcaaactaagcttgagaattccctgatgagctttgtagcttatataggtgtcccaagtgtactgatatttttgttatgaacaaaacatgatttgattttgtacttcattcatactgtgaatatattactatttctcttgtatcggacccttgaattttaagtgttgttttaaactaatcaatcttctctacacttggccttgtatgaagtatccatgatatatagcagagcctaattgggctggaaggtaagtttcttttaatgtttgagttctcatctttagatgaaagacaaatgggacaccgttgcgttttcaagattataaggatgtaaaacttttaaatccgatttactagctcaatgaatatttcactttctttcccttgtcaaaatctcttatcctgggtgttaagcactgcgaactttggcttattttgccttcttgtttttactggatcatacacgcttccattttgtacctgttcgttggagcatagttcttgatttatgcattaatgacatatgatatatgaattatggaagagtaaaaaatgagtgcatgatcatacgattcagaaatgaacttttgagctgtaatacatagcatatgatttgtctggaaatctgggtactgattgaattcttgatcccattagcttgactattcttcgtaggatatacactatgagtaggacttctcatcttcatctatcagccttaacagtaaacatgggcatgctttggatcaatgtccatgactatagctttggaagtgttgtataccagcggatcatccagttgctagatgagatatgattctgtttcctacataagcagtctgaactgacacatcaagttccctcgcttctagttttcgtcaattatttttgttgaaggtgccgatttggagttggtcaggtatcctaatgcagatacagctagctttcttcatggggggtcatcgctcttcatcgtttacttgcaccgaagagggacattgaccattatcccttagccttgcatggtgtatgtagttggtaactggtaaggctgcctattgccgaaaggaaacataaactgtttggcattggaagactgcaacaagtgtatcattgccatgacaaggcttctacatcaccatacattttcaaagcatacaaatcagtctggcggatatggtccacaaggttaccgacctcagggtcatggtgccgcttctcagttggggccacgctctcagaatcatggctatggatacccacctagaggtatgcctccacctcaaaactacaacgcaccctacggtggctacccaccgcagggaccgtcaagaggtggcatgggctgggaccagaggccgggcccaccaacccatccttcgtaccagggtggtggttctgactactacaagcagggatctcagccatatgatagccagccacccagctaccctcctgggccagggaattacaacagttatgggcaatcccagggccctaactatggccaacctcagtatccgcaacatgcacctcaacagaactacagccatggctatggtgatcctagatacaatgccccccctccgaaccagcagtactatggtcagccaccgatggccccgcagcaaggctatcctcaacagccagatccctatgctaggcctccatacagtggacctggtcaatggacccccaggggtgctcccgccgcagatggctcctaccaggcgccaccttcatcttatgggccaccgtctcagcaacctcctgcttatgggcaaacatatggtgcagcaacgggacctgatgggtatggtcaacagggttacccacagcagggtggccaggtaccagcttcatatggtcagagtgcaccagcagctccaggatatcctcagcaaggcacgcagcaaggtggctatgcacagtacccgcagacccaaccagcatatggtgatcaagcagctcaagccaatgcgaactatgggtaccagggagctccagcagatcccaactacggaagtgcgtacccacagcagccagggtatggtcctcctggtcaggcaactggtcaggctggttatgcatcctctgcgccagcggccagccagcctgtgtatggccaggctggatatacccagccacctacaaatcctccaagttatgatcagtctgcagcaccagcggcgactcagagcggttatgctgcgccccctgcaaatccacaacagcctgctgcagcaaaaggggtctcgccacagcctgctgctgctgctgctgctggatatggtgctagcgggcagtggacggcatgagcctcgtcttccgaacttcgatgacagcaaggtcaggttggatatccgcttttggcgcgtgtttgaatgtttgcatcttttggatgtctgtggacgcatcatgtagggcttgaccccgttatcgaaagagattgtaaccccttgagttgtgatactggacatcttctgtagtatctacgagtagttgcttaatgtgacttttaaacattctattcagtttggatgttccttgtcttgctacttcacagcttgccaagccagtaatctttggattcatgtttggttgctctttggtctttgctgtcgttcctgtaaataaatattggcgtttggccttctcttacgtcgttcatgggatgacggggtgccctttcgagttggcaatagatctgctgttcatccaaactcagttggttttgtttgtatttgttccgaatcatgttggtacagttagcatgtgaatggacaagccattagccatggtctatttttttggttggtttgtttgaaaatgtc

SEQ ID NO: 57187 - DNA, 4104 bp, Zea Mays
gtcatcggcaggacatccacaccaacccgtgctcaaggaaaaaaaaccggggcggcgaaaaccctcgaaccctaatccttacgcccctcatggcggacgctgatgcggcgctgccaacgccgcctccggaggtagtagcccccgaggagcatcccgtgggcgccgaatccaccgtcgccgcgccggccgaagtcgataacaagcggaagctagaggaggtcagcgccgacgcggaggtgaaaggcaccagcgaggacgccaagcgcccgcgcgtggacggcgagcccgacgccgcaacaggggttgagcagcaaatcgatgggtcctccgtgaatgcggatcccgcagctccggaggataaggctgctcttaacgttggcgcagcaatggatggtgataatgacacgcctgctcccgctcccgctccagactcgcaggcggtttctgacgagaagccgcttgaagcagcagctgaagctccacagcaggaaggtgatgcagcaactgctgtacaggagatttctcgtaagatcgaagtgcccaacagcaaggttggtgtcgttattggaaaagctggtgagacaatcaggaacttgcaaatcagctcgggtgcaaagatccaaatcaccaaggacatcgaagcggactcaaatgccctgactcggccggttgaactagttggaacacctggcagcgttgataaagctgagcagcttattaagagtgtcatagctgaggctgaggctggtggttcccctgccttaatagctagaggatttggaagtggacagcctggatcagagcaatttgagatgacagttcctgataacaaggtcggtctcattatcggaaaaggtggtgagacaattaaaggcatgcagaccaaatctggtgctcgtattcagttaataccccaacatcctccagagggtgttacattgactgaaagaattgtacgtgttactgggaataagaagcagattgaagctgcaaaggatttgatcaagcaagctatgaatcaggtgatgtgatcttcctttgtgattttttggtagtcgatttgtgtttcaattgttaagtcatggtagatgctggtatgatactatatgcttttaattgttcatgctttatgtgattttactctgatggttgctgatgatgtcatcacatttcatgattcattgttcatgatatggttacttttgtgatcgtagataccgaattcaatgttgtcttcatggtattttttgaccaaggcaaattcaacctatcgagaacattgccttattacaatgctatgatggaccaattgattttttagctttgggtttcataatatgcctgtttttatcattgcatacattttgtacaattttcctgatcaagccaaacttgagaatccatgataagctttgtagcttgcatatatttgggttccataatatgcctgttttatcattgcacgcaattcatagtttcatactgtctttctgttcaaactaagcttgagaattccctgatgagctttgtagcttatataggtgtcccaagtgtactgatatttttgttatgaacaaaacatgatttgattttgtacttcattcatactgtgaatatattactatttctcttgtatcggacccttgaattttaagtgttgttttaaactaatcaatcttctctacacttggccttgtatgaagtatccatgatatatagcagagcctaattgggctggaaggtaagtttcttttaatgtttgagttctcatctttagatgaaagacaaatgggacaccgttgcgttttcaagattataaggatgtaaaacttttaaatccgatttactagctcaatgaatatttcactttctttcccttgtcaaaatctcttatcctgggtgttaagcactgcgaactttggcttattttgccttcttgtttttactggatcatacacgcttccattttgtacctgttcgttggagcatagttcttgatttatgcattaatgacatatgatatatgaattatggaagagtaaaaaatgagtgcatgatcatacgattcagaaatgaacttttgagctgtaatacatagcatatgatttgtctggaaatctgggtactgattgaattcttgatcccattagcttgactattcttcgtaggatatacactatgagtaggacttctcatcttcatctatcagccttaacagtaaacatgggcatgctttggatcaatgtccatgactatagctttggaagtgttgtataccagcggatcatccagttgctagatgagatatgattctgtttcctacataagcagtctgaactgacacatcaagttccctcgcttctagttttcgtcaattatttttgttgaaggtgccgatttggagttggtcagacattttcaaagcatacaaatcagtctggcggatatggtccacaaggttaccgacctcagggtcatggtgccgcttctcagttggggccacgctctcagaatcatggctatggatacccacctagaggtatgcctccacctcaaaactacaacgcaccctacggtggctacccaccgcagggaccgtcaagaggtggcatgggctgggaccagaggccgggcccaccaacccatccttcgtaccagggtggtggttctgactactacaagcagggatctcagccatatgatagccagccacccagctaccctcctgggccagggaattacaacagttatgggcaatcccagggccctaactatggccaacctcagtatccgcaacatgcacctcaacagaactacagccatggctatggtgatcctagatacaatgccccccctccgaaccagcagtactatggtcagccaccgatggccccgcagcaaggctatcctcaacagccagatccctatgctaggcctccatacagtggacctggtcaatggacccccaggggtgctcccgccgcagatggctcctaccaggcgccaccttcatcttatgggccaccgtctcagcaacctcctgcttatgggcaaacatatggtgcagcaacgggacctgatgggtatggtcaacagggttacccacagcagggtggccaggtaccagcttcatatggtcagagtgcaccagcagctccaggatatcctcagcaaggcacgcagcaaggtggctatgcacagtacccgcagacccaaccagcatatggtgatcaagcagctcaagccaatgcgaactatgggtaccagggagctccagcagatcccaactacggaagtgcgtacccacagcagccagggtatggtcctcctggtcaggcaactggtcaggctggttatgcatcctctgcgccagcggccagccagcctgtgtatggccaggctggatatacccagccacctacaaatcctccaagttatgatcagtctgcagcaccagcggcgactcagagcggttatgctgcgccccctgcaaatccacaacagcctgctgcagcaaaaggggtctcgccacagcctgctgctgctgctgctgctggatatggtgctagcgggcagtggacggcatgagcctcgtcttccgaacttcgatgacagcaaggtcaggttggatatccgcttttggcgcgtgtttgaatgtttgcatcttttggatgtctgtggacgcatcatgtagggcttgaccccgttatcgaaagagattgtaaccccttgagttgtgatactggacatcttctgtagtatctacgagtagttgcttaatgtgacttttaaacattctattcagtttggatgttccttgtcttgctacttcacagcttgccaagccagtaatctttggattcatgtttggttgctctttggtctttgctgtcgttcctgtaaataaatattggcgtttggccttctcttacgtcgttcatgggatgacggggtgccctttcgagttggcaatagatctgctgttcatccaaactcagttggttttgtttgtatttgttccgaatcatgttggtacagttagcatgtgaatggacaagccattagccatggtctatttttttggttggtttgtttgaaaatgtc

SEQ ID NO: 57188 - DNA, 4327 bp, Zea Mays
gtcatcggcaggacatccacaccaacccgtgctcaaggaaaaaaaaccggggcggcgaaaaccctcgaaccctaatccttacgcccctcatggcggacgctgatgcggcgctgccaacgccgcctccggaggtagtagcccccgaggagcatcccgtgggcgccgaatccaccgtcgccgcgccggccgaagtcgataacaagcggaagctagaggaggtcagcgccgacgcggaggtgaaaggcaccagcgaggacgccaagcgcccgcgcgtggacggcgagcccgacgccgcaacaggggttgagcagcaaatcgatgggtcctccgtgaatgcggatcccgcagctccggaggataaggctgctcttaacgttggcgcagcaatggatggtgataatgacacgcctgctcccgctcccgctccagactcgcaggcggtttctgacgagaagccgcttgaagcagcagctgaagctccacagcaggaaggtgatgcagcaactgctgtacaggagatttctcgtaagatcgaagtgcccaacagcaaggttggtgtcgttattggaaaagctggtgagacaatcaggaacttgcaaatcagctcgggtgcaaagatccaaatcaccaaggacatcgaagcggactcaaatgccctgactcggccggttgaactagttggaacacctggcagcgttgataaagctgagcagcttattaagagtgtcatagctgaggctgaggctggtggttcccctgccttaatagctagaggatttggaagtggacagcctggatcagagcaatttgagatgacagttcctgataacaaggtcggtctcattatcggaaaaggtggtgagacaattaaaggcatgcagaccaaatctggtgctcgtattcagttaataccccaacatcctccagagggtgttacattgactgaaagaattgtacgtgttactgggaataagaagcagattgaagctgcaaaggatttgatcaagcaagctatgaatcaggtgatgtgatcttcctttgtgattttttggtagtcgatttgtgtttcaattgttaagtcatggtagatgctggtatgatactatatgcttttaattgttcatgctttatgtgattttactctgatggttgctgatgatgtcatcacatttcatgattcattgttcatgatatggttacttttgtgatcgtagataccgaattcaatgttgtcttcatggtattttttgaccaaggcaaattcaacctatcgagaacattgccttattacaatgctatgatggaccaattgattttttagctttgggtttcataatatgcctgtttttatcattgcatacattttgtacaattttcctgatcaagccaaacttgagaatccatgataagctttgtagcttgcatatatttgggttccataatatgcctgttttatcattgcacgcaattcatagtttcatactgtctttctgttcaaactaagcttgagaattccctgatgagctttgtagcttatataggtgtcccaagtgtactgatatttttgttatgaacaaaacatgatttgattttgtacttcattcatactgtgaatatattactatttctcttgtatcggacccttgaattttaagtgttgttttaaactaatcaatcttctctacacttggccttgtatgaagtatccatgatatatagcagagcctaattgggctggaaggtaagtttcttttaatgtttgagttctcatctttagatgaaagacaaatgggacaccgttgcgttttcaagattataaggatgtaaaacttttaaatccgatttactagctcaatgaatatttcactttctttcccttgtcaaaatctcttatcctgggtgttaagcactgcgaactttggcttattttgccttcttgtttttactggatcatacacgcttccattttgtacctgttcgttggagcatagttcttgatttatgcattaatgacatatgatatatgaattatggaagagtaaaaaatgagtgcatgatcatacgattcagaaatgaacttttgagctgtaatacatagcatatgatttgtctggaaatctgggtactgattgaattcttgatcccattagcttgactattcttcgtaggatatacactatgagtaggacttctcatcttcatctatcagccttaacagtaaacatgggcatgctttggatcaatgtccatgactatagctttggaagtgttgtataccagcggatcatccagttgctagatgagatatgattctgtttcctacataagcagtctgaactgacacatcaagttccctcgcttctagttttcgtcaattatttttgttgaaggtgccgatttggagttggtcaggtatcctaatgcagatacagctagctttcttcatggggggtcatcgctcttcatcgtttacttgcaccgaagagggacattgaccattatcccttagccttgcatggtgtatgtagttggtaactggtaaggctgcctattgccgaaaggaaacataaactgtttggcattggaagactgcaacaagtgtatcattgccatgacaaggcttctacatcaccagacattttcaaagcatacaaatcagtctggcggatatggtccacaaggttaccgacctcagggtcatggtgccgcttctcagttggggccacgctctcagaatcatggctatggatacccacctagaggtatgcctccacctcaaaactacaacgcaccctacggtggctacccaccgcagggaccgtcaagaggtggcatgggctgggaccagaggccgggcccaccaacccatccttcgtaccagggtggtggttctgactactacaagcagggatctcagccatatgatagccagccacccagctaccctcctgggccagggaattacaacagttatgggcaatcccagggccctaactatggccaacctcagtatccgcaacatgcacctcaacagaactacagccatggctatggtgatcctagatacaatgccccccctccgaaccagcagtactatggtcagccaccgatggccccgcagcaaggctatcctcaacagccagatccctatgctaggcctccatacagtggacctggtcaatggacccccaggggtgctcccgccgcagatggctcctaccaggcgccaccttcatcttatgggccaccgtctcagcaacctcctgcttatgggcaaacatatggtgcagcaacgggacctgatgggtatggtcaacagggttacccacagcagggtggccaggtaccagcttcatatggtcagagtgcaccagcagctccaggatatcctcagcaaggcacgcagcaaggtggctatgcacagtacccgcagacccaaccagcatatggtgatcaagcagctcaagccaatgcgaactatgggtaccagggagctccagcagatcccaactacggaagtgcgtacccacagcagccagggtatggtcctcctggtcaggcaactggtcaggctggttatgcatcctctgcgccagcggccagccagcctgtgtatggccaggctggatatacccagccacctacaaatcctccaagttatgatcagtctgcagcaccagcggcgactcagagcggttatgctgcgccccctgcaaatccacaacagcctgctgcagcaaaaggggtctcgccacagcctgctgctgctgctgctgctggatatggtgctagcgggcagtggacggcatgagcctcgtcttccgaacttcgatgacagcaaggtcaggttggatatccgcttttggcgcgtgtttgaatgtttgcatcttttggatgtctgtggacgcatcatgtagggcttgaccccgttatcgaaagagattgtaaccccttgagttgtgatactggacatcttctgtagtatctacgagtagttgcttaatgtgacttttaaacattctattcagtttggatgttccttgtcttgctacttcacagcttgccaagccagtaatctttggattcatgtttggttgctctttggtctttgctgtcgttcctgtaaataaatattggcgtttggccttctcttacgtcgttcatgggatgacggggtgccctttcgagttggcaatagatctgctgttcatccaaactcagttggttttgtttgtatttgttccgaatcatgttggtacagttagcatgtgaatggacaagccattagccatggtctatttttttggttggtttgtttgaaaatgtc

SEQ ID NO: 57189 - DNA, 4359 bp, Zea Mays
gtcatcggcaggacatccacaccaacccgtgctcaaggaaaaaaaaccggggcggcgaaaaccctcgaaccctaatccttacgcccctcatggcggacgctgatgcggcgctgccaacgccgcctccggaggtagtagcccccgaggagcatcccgtgggcgccgaatccaccgtcgccgcgccggccgaagtcgataacaagcggaagctagaggaggtcagcgccgacgcggaggtgaaaggcaccagcgaggacgccaagcgcccgcgcgtggacggcgagcccgacgccgcaacaggggttgagcagcaaatcgatgggtcctccgtgaatgcggatcccgcagctccggaggataaggctgctcttaacgttggcgcagcaatggatggtgataatgacacgcctgctcccgctcccgctccagactcgcaggcggtttctgacgagaagccgcttgaagcagcagctgaagctccacagcaggaaggtgatgcagcaactgctgtacaggagatttctcgtaagatcgaagtgcccaacagcaaggttggtgtcgttattggaaaagctggtgagacaatcaggaacttgcaaatcagctcgggtgcaaagatccaaatcaccaaggacatcgaagcggactcaaatgccctgactcggccggttgaactagttggaacacctggcagcgttgataaagctgagcagcttattaagagtgtcatagctgaggctgaggctggtggttcccctgccttaatagctagaggatttggaagtggacagcctggatcagagcaatttgagatgacagttcctgataacaaggtcggtctcattatcggaaaaggtggtgagacaattaaaggcatgcagaccaaatctggtgctcgtattcagttaataccccaacatcctccagagggtgttacattgactgaaagaattgtacgtgttactgggaataagaagcagattgaagctgcaaaggatttgatcaagcaagctatgaatcaggtgatgtgatcttcctttgtgattttttggtagtcgatttgtgtttcaattgttaagtcatggtagatgctggtatgatactatatgcttttaattgttcatgctttatgtgattttactctgatggttgctgatgatgtcatcacatttcatgattcattgttcatgatatggttacttttgtgatcgtagataccgaattcaatgttgtcttcatggtattttttgaccaaggcaaattcaacctatcgagaacattgccttattacaatgctatgatggaccaattgattttttagctttgggtttcataatatgcctgtttttatcattgcatacattttgtacaattttcctgatcaagccaaacttgagaatccatgataagctttgtagcttgcatatatttgggttccataatatgcctgttttatcattgcacgcaattcatagtttcatactgtctttctgttcaaactaagcttgagaattccctgatgagctttgtagcttatataggtgtcccaagtgtactgatatttttgttatgaacaaaacatgatttgattttgtacttcattcatactgtgaatatattactatttctcttgtatcggacccttgaattttaagtgttgttttaaactaatcaatcttctctacacttggccttgtatgaagtatccatgatatatagcagagcctaattgggctggaaggtaagtttcttttaatgtttgagttctcatctttagatgaaagacaaatgggacaccgttgcgttttcaagattataaggatgtaaaacttttaaatccgatttactagctcaatgaatatttcactttctttcccttgtcaaaatctcttatcctgggtgttaagcactgcgaactttggcttattttgccttcttgtttttactggatcatacacgcttccattttgtacctgttcgttggagcatagttcttgatttatgcattaatgacatatgatatatgaattatggaagagtaaaaaatgagtgcatgatcatacgattcagaaatgaacttttgagctgtaatacatagcatatgatttgtctggaaatctgggtactgattgaattcttgatcccattagcttgactattcttcgtaggatatacactatgagtaggacttctcatcttcatctatcagccttaacagtaaacatgggcatgctttggatcaatgtccatgactatagctttggaagtgttgtataccagcggatcatccagttgctagatgagatatgattctgtttcctacataagcagtctgaactgacacatcaagttccctcgcttctagttttcgtcaattatttttgttgaaggtgccgatttggagttggtcaggtatcctaatgcagatacagctagctttcttcatggggggtcatcgctcttcatcgtttacttgcaccgaagagggacattgaccattatcccttagccttgcatggtgtatgtagttggtaactggtaaggctgcctattgccgaaaggaaacataaactgtttggcattggaagactgcaacaagtgtatcattgccatgacaaggcttctacatcaccatgttaggtttgctaagctgaatcatttgtgactacattttcaaagcatacaaatcagtctggcggatatggtccacaaggttaccgacctcagggtcatggtgccgcttctcagttggggccacgctctcagaatcatggctatggatacccacctagaggtatgcctccacctcaaaactacaacgcaccctacggtggctacccaccgcagggaccgtcaagaggtggcatgggctgggaccagaggccgggcccaccaacccatccttcgtaccagggtggtggttctgactactacaagcagggatctcagccatatgatagccagccacccagctaccctcctgggccagggaattacaacagttatgggcaatcccagggccctaactatggccaacctcagtatccgcaacatgcacctcaacagaactacagccatggctatggtgatcctagatacaatgccccccctccgaaccagcagtactatggtcagccaccgatggccccgcagcaaggctatcctcaacagccagatccctatgctaggcctccatacagtggacctggtcaatggacccccaggggtgctcccgccgcagatggctcctaccaggcgccaccttcatcttatgggccaccgtctcagcaacctcctgcttatgggcaaacatatggtgcagcaacgggacctgatgggtatggtcaacagggttacccacagcagggtggccaggtaccagcttcatatggtcagagtgcaccagcagctccaggatatcctcagcaaggcacgcagcaaggtggctatgcacagtacccgcagacccaaccagcatatggtgatcaagcagctcaagccaatgcgaactatgggtaccagggagctccagcagatcccaactacggaagtgcgtacccacagcagccagggtatggtcctcctggtcaggcaactggtcaggctggttatgcatcctctgcgccagcggccagccagcctgtgtatggccaggctggatatacccagccacctacaaatcctccaagttatgatcagtctgcagcaccagcggcgactcagagcggttatgctgcgccccctgcaaatccacaacagcctgctgcagcaaaaggggtctcgccacagcctgctgctgctgctgctgctggatatggtgctagcgggcagtggacggcatgagcctcgtcttccgaacttcgatgacagcaaggtcaggttggatatccgcttttggcgcgtgtttgaatgtttgcatcttttggatgtctgtggacgcatcatgtagggcttgaccccgttatcgaaagagattgtaaccccttgagttgtgatactggacatcttctgtagtatctacgagtagttgcttaatgtgacttttaaacattctattcagtttggatgttccttgtcttgctacttcacagcttgccaagccagtaatctttggattcatgtttggttgctctttggtctttgctgtcgttcctgtaaataaatattggcgtttggccttctcttacgtcgttcatgggatgacggggtgccctttcgagttggcaatagatctgctgttcatccaaactcagttggttttgtttgtatttgttccgaatcatgttggtacagttagcatgtgaatggacaagccattagccatggtctatttttttggttggtttgtttgaaaatgtc

SEQ ID NO: 57190 - DNA, 4332 bp, Zea Mays
gtcatcggcaggacatccacaccaacccgtgctcaaggaaaaaaaaccggggcggcgaaaaccctcgaaccctaatccttacgcccctcatggcggacgctgatgcggcgctgccaacgccgcctccggaggtagtagcccccgaggagcatcccgtgggcgccgaatccaccgtcgccgcgccggccgaagtcgataacaagcggaagctagaggaggtcagcgccgacgcggaggtgaaaggcaccagcgaggacgccaagcgcccgcgcgtggacggcgagcccgacgccgcaacaggggttgagcagcaaatcgatgggtcctccgtgaatgcggatcccgcagctccggaggataaggctgctcttaacgttggcgcagcaatggatggtgataatgacacgcctgctcccgctcccgctccagactcgcaggcggtttctgacgagaagccgcttgaagcagcagctgaagctccacagcaggaaggtgatgcagcaactgctgtacaggagatttctcgtaagatcgaagtgcccaacagcaaggttggtgtcgttattggaaaagctggtgagacaatcaggaacttgcaaatcagctcgggtgcaaagatccaaatcaccaaggacatcgaagcggactcaaatgccctgactcggccggttgaactagttggaacacctggcagcgttgataaagctgagcagcttattaagagtgtcatagctgaggctgaggctggtggttcccctgccttaatagctagaggatttggaagtggacagcctggatcagagcaatttgagatgacagttcctgataacaaggtcggtctcattatcggaaaaggtggtgagacaattaaaggcatgcagaccaaatctggtgctcgtattcagttaataccccaacatcctccagagggtgttacattgactgaaagaattgtacgtgttactgggaataagaagcagattgaagctgcaaaggatttgatcaagcaagctatgaatcaggtgatgtgatcttcctttgtgattttttggtagtcgatttgtgtttcaattgttaagtcatggtagatgctggtatgatactatatgcttttaattgttcatgctttatgtgattttactctgatggttgctgatgatgtcatcacatttcatgattcattgttcatgatatggttacttttgtgatcgtagataccgaattcaatgttgtcttcatggtattttttgaccaaggcaaattcaacctatcgagaacattgccttattacaatgctatgatggaccaattgattttttagctttgggtttcataatatgcctgtttttatcattgcatacattttgtacaattttcctgatcaagccaaacttgagaatccatgataagctttgtagcttgcatatatttgggttccataatatgcctgttttatcattgcacgcaattcatagtttcatactgtctttctgttcaaactaagcttgagaattccctgatgagctttgtagcttatataggtgtcccaagtgtactgatatttttgttatgaacaaaacatgatttgattttgtacttcattcatactgtgaatatattactatttctcttgtatcggacccttgaattttaagtgttgttttaaactaatcaatcttctctacacttggccttgtatgaagtatccatgatatatagcagagcctaattgggctggaaggtaagtttcttttaatgtttgagttctcatctttagatgaaagacaaatgggacaccgttgcgttttcaagattataaggatgtaaaacttttaaatccgatttactagctcaatgaatatttcactttctttcccttgtcaaaatctcttatcctgggtgttaagcactgcgaactttggcttattttgccttcttgtttttactggatcatacacgcttccattttgtacctgttcgttggagcatagttcttgatttatgcattaatgacatatgatatatgaattatggaagagtaaaaaatgagtgcatgatcatacgattcagaaatgaacttttgagctgtaatacatagcatatgatttgtctggaaatctgggtactgattgaattcttgatcccattagcttgactattcttcgtaggatatacactatgagtaggacttctcatcttcatctatcagccttaacagtaaacatgggcatgctttggatcaatgtccatgactatagctttggaagtgttgtataccagcggatcatccagttgctagatgagatatgattctgtttcctacataagcagtctgaactgacacatcaagttccctcgcttctagttttcgtcaattatttttgttgaaggtgccgatttggagttggtcaggtatcctaatgcagatacagctagctttcttcatggggggtcatcgctcttcatcgtttacttgcaccgaagagggacattgaccattatcccttagccttgcatggtgtatgtagttggtaactggtaaggctgcctattgccgaaaggaaacataaactgtttggcattggaagactgcaacaagtgtatcattgccatgacaaggcttctacatcaccatgttagacattttcaaagcatacaaatcagtctggcggatatggtccacaaggttaccgacctcagggtcatggtgccgcttctcagttggggccacgctctcagaatcatggctatggatacccacctagaggtatgcctccacctcaaaactacaacgcaccctacggtggctacccaccgcagggaccgtcaagaggtggcatgggctgggaccagaggccgggcccaccaacccatccttcgtaccagggtggtggttctgactactacaagcagggatctcagccatatgatagccagccacccagctaccctcctgggccagggaattacaacagttatgggcaatcccagggccctaactatggccaacctcagtatccgcaacatgcacctcaacagaactacagccatggctatggtgatcctagatacaatgccccccctccgaaccagcagtactatggtcagccaccgatggccccgcagcaaggctatcctcaacagccagatccctatgctaggcctccatacagtggacctggtcaatggacccccaggggtgctcccgccgcagatggctcctaccaggcgccaccttcatcttatgggccaccgtctcagcaacctcctgcttatgggcaaacatatggtgcagcaacgggacctgatgggtatggtcaacagggttacccacagcagggtggccaggtaccagcttcatatggtcagagtgcaccagcagctccaggatatcctcagcaaggcacgcagcaaggtggctatgcacagtacccgcagacccaaccagcatatggtgatcaagcagctcaagccaatgcgaactatgggtaccagggagctccagcagatcccaactacggaagtgcgtacccacagcagccagggtatggtcctcctggtcaggcaactggtcaggctggttatgcatcctctgcgccagcggccagccagcctgtgtatggccaggctggatatacccagccacctacaaatcctccaagttatgatcagtctgcagcaccagcggcgactcagagcggttatgctgcgccccctgcaaatccacaacagcctgctgcagcaaaaggggtctcgccacagcctgctgctgctgctgctgctggatatggtgctagcgggcagtggacggcatgagcctcgtcttccgaacttcgatgacagcaaggtcaggttggatatccgcttttggcgcgtgtttgaatgtttgcatcttttggatgtctgtggacgcatcatgtagggcttgaccccgttatcgaaagagattgtaaccccttgagttgtgatactggacatcttctgtagtatctacgagtagttgcttaatgtgacttttaaacattctattcagtttggatgttccttgtcttgctacttcacagcttgccaagccagtaatctttggattcatgtttggttgctctttggtctttgctgtcgttcctgtaaataaatattggcgtttggccttctcttacgtcgttcatgggatgacggggtgccctttcgagttggcaatagatctgctgttcatccaaactcagttggttttgtttgtatttgttccgaatcatgttggtacagttagcatgtgaatggacaagccattagccatggtctatttttttggttggtttgtttgaaaatgtc

SEQ ID NO: 57191 - DNA, 3433 bp, Zea Mays
gtcatcggcaggacatccacaccaacccgtgctcaaggaaaaaaaaccggggcggcgaaaaccctcgaaccctaatccttacgcccctcatggcggacgctgatgcggcgctgccaacgccgcctccggaggtagtagcccccgaggagcatcccgtgggcgccgaatccaccgtcgccgcgccggccgaagtcgataacaagcggaagctagaggaggtcagcgccgacgcggaggtgaaaggcaccagcgaggacgccaagcgcccgcgcgtggacggcgagcccgacgccgcaacaggggttgagcagcaaatcgatgggtcctccgtgaatgcggatcccgcagctccggaggataaggctgctcttaacgttggcgcagcaatggatggtgataatgacacgcctgctcccgctcccgctccagactcgcaggcggtttctgacgagaagccgcttgaagcagcagctgaagctccacagcaggaaggtgatgcagcaactgctgtacaggagatttctcgtaagatcgaagtgcccaacagcaaggttggtgtcgttattggaaaagctggtgagacaatcaggaacttgcaaatcagctcgggtgcaaagatccaaatcaccaaggacatcgaagcggactcaaatgccctgactcggccggttgaactagttggaacacctggcagcgttgataaagctgagcagcttattaagagtgtcatagctgaggctgaggctggtggttcccctgccttaatagctagaggatttggaagtggacagcctggatcagagcaatttgagatgacagttcctgataacaaggtcggtctcattatcggaaaaggtggtgagacaattaaaggcatgcagaccaaatctggtgctcgtattcagttaataccccaacatcctccagagggtgttacattgactgaaagaattgtacgtgttactgggaataagaagcagattgaagctgcaaaggatttgatcaagcaagctatgaatcaggtgatgtgatcttcctttgtgattttttggtagtcgatttgtgtttcaattgttaagtcatggtagatgctggtatgatactatatgcttttaattgttcatgctttatgtgattttactctgatggttgctgatgatgtcatcacatttcatgattcattgttcatgatatggttacttttgtgatcgtagataccgaattcaatgttgtcttcatggtattttttgaccaaggcaaattcaacctatcgagaacattgccttattacaatgctatgatggaccaattgattttttagctttgggtttcataatatgcctgtttttatcattgcatacattttgtacaattttcctgatcaagccaaacttgagaatccatgataagctttgtagcttgcatatatttgggttccataatatgcctgttttatcattgcacgcaattcatagtttcatactgtctttctgttcaaactaagcttgagaattccctgatgagctttgtagcttatataggtgtcccaagtgtactgatatttttgttatgaacaaaacatgatttgattttgtacttcattcatactgtgaatatattactatttctcttgtatcggacccttgaattttaagtgttgttttaaactaatcaatcttctctacacttggccttgtatgaagtatccatgatatatagcagagcctaattgggctggaagacattttcaaagcatacaaatcagtctggcggatatggtccacaaggttaccgacctcagggtcatggtgccgcttctcagttggggccacgctctcagaatcatggctatggatacccacctagaggtatgcctccacctcaaaactacaacgcaccctacggtggctacccaccgcagggaccgtcaagaggtggcatgggctgggaccagaggccgggcccaccaacccatccttcgtaccagggtggtggttctgactactacaagcagggatctcagccatatgatagccagccacccagctaccctcctgggccagggaattacaacagttatgggcaatcccagggccctaactatggccaacctcagtatccgcaacatgcacctcaacagaactacagccatggctatggtgatcctagatacaatgccccccctccgaaccagcagtactatggtcagccaccgatggccccgcagcaaggctatcctcaacagccagatccctatgctaggcctccatacagtggacctggtcaatggacccccaggggtgctcccgccgcagatggctcctaccaggcgccaccttcatcttatgggccaccgtctcagcaacctcctgcttatgggcaaacatatggtgcagcaacgggacctgatgggtatggtcaacagggttacccacagcagggtggccaggtaccagcttcatatggtcagagtgcaccagcagctccaggatatcctcagcaaggcacgcagcaaggtggctatgcacagtacccgcagacccaaccagcatatggtgatcaagcagctcaagccaatgcgaactatgggtaccagggagctccagcagatcccaactacggaagtgcgtacccacagcagccagggtatggtcctcctggtcaggcaactggtcaggctggttatgcatcctctgcgccagcggccagccagcctgtgtatggccaggctggatatacccagccacctacaaatcctccaagttatgatcagtctgcagcaccagcggcgactcagagcggttatgctgcgccccctgcaaatccacaacagcctgctgcagcaaaaggggtctcgccacagcctgctgctgctgctgctgctggatatggtgctagcgggcagtggacggcatgagcctcgtcttccgaacttcgatgacagcaaggtcaggttggatatccgcttttggcgcgtgtttgaatgtttgcatcttttggatgtctgtggacgcatcatgtagggcttgaccccgttatcgaaagagattgtaaccccttgagttgtgatactggacatcttctgtagtatctacgagtagttgcttaatgtgacttttaaacattctattcagtttggatgttccttgtcttgctacttcacagcttgccaagccagtaatctttggattcatgtttggttgctctttggtctttgctgtcgttcctgtaaataaatattggcgtttggccttctcttacgtcgttcatgggatgacggggtgccctttcgagttggcaatagatctgctgttcatccaaactcagttggttttgtttgtatttgttccgaatcatgttggtacagttagcatgtgaatggacaagccattagccatggtctatttttttggttggtttgtttgaaaatgtc

SEQ ID NO: 57192 - DNA, 4230 bp, Zea Mays
gtcatcggcaggacatccacaccaacccgtgctcaaggaaaaaaaaccggggcggcgaaaaccctcgaaccctaatccttacgcccctcatggcggacgctgatgcggcgctgccaacgccgcctccggaggtagtagcccccgaggagcatcccgtgggcgccgaatccaccgtcgccgcgccggccgaagtcgataacaagcggaagctagaggaggtcagcgccgacgcggaggtgaaaggcaccagcgaggacgccaagcgcccgcgcgtggacggcgagcccgacgccgcaacaggggttgagcagcaaatcgatgggtcctccgtgaatgcggatcccgcagctccggaggataaggctgctcttaacgttggcgcagcaatggatggtgataatgacacgcctgctcccgctcccgctccagactcgcaggcggtttctgacgagaagccgcttgaagcagcagctgaagctccacagcaggaaggtgatgcagcaactgctgtacaggagatttctcgtaagatcgaagtgcccaacagcaaggttggtgtcgttattggaaaagctggtgagacaatcaggaacttgcaaatcagctcgggtgcaaagatccaaatcaccaaggacatcgaagcggactcaaatgccctgactcggccggttgaactagttggaacacctggcagcgttgataaagctgagcagcttattaagagtgtcatagctgaggctgaggctggtggttcccctgccttaatagctagaggatttggaagtggacagcctggatcagagcaatttgagatgacagttcctgataacaaggtcggtctcattatcggaaaaggtggtgagacaattaaaggcatgcagaccaaatctggtgctcgtattcagttaataccccaacatcctccagagggtgttacattgactgaaagaattgtacgtgttactgggaataagaagcagattgaagctgcaaaggatttgatcaagcaagctatgaatcaggtgatgtgatcttcctttgtgattttttggtagtcgatttgtgtttcaattgttaagtcatggtagatgctggtatgatactatatgcttttaattgttcatgctttatgtgattttactctgatggttgctgatgatgtcatcacatttcatgattcattgttcatgatatggttacttttgtgatcgtagataccgaattcaatgttgtcttcatggtattttttgaccaaggcaaattcaacctatcgagaacattgccttattacaatgctatgatggaccaattgattttttagctttgggtttcataatatgcctgtttttatcattgcatacattttgtacaattttcctgatcaagccaaacttgagaatccatgataagctttgtagcttgcatatatttgggttccataatatgcctgttttatcattgcacgcaattcatagtttcatactgtctttctgttcaaactaagcttgagaattccctgatgagctttgtagcttatataggtgtcccaagtgtactgatatttttgttatgaacaaaacatgatttgattttgtacttcattcatactgtgaatatattactatttctcttgtatcggacccttgaattttaagtgttgttttaaactaatcaatcttctctacacttggccttgtatgaagtatccatgatatatagcagagcctaattgggctggaaggtaagtttcttttaatgtttgagttctcatctttagatgaaagacaaatgggacaccgttgcgttttcaagattataaggatgtaaaacttttaaatccgatttactagctcaatgaatatttcactttctttcccttgtcaaaatctcttatcctgggtgttaagcactgcgaactttggcttattttgccttcttgtttttactggatcatacacgcttccattttgtacctgttcgttggagcatagttcttgatttatgcattaatgacatatgatatatgaattatggaagagtaaaaaatgagtgcatgatcatacgattcagaaatgaacttttgagctgtaatacatagcatatgatttgtctggaaatctgggtactgattgaattcttgatcccattagcttgactattcttcgtaggatatacactatgagtaggacttctcatcttcatctatcagccttaacagtaaacatgggcatgctttggatcaatgtccatgactatagctttggaagtgttgtataccagcggatcatccagttgctagatgagatatgattctgtttcctacataagcagtctgaactgacacatcaagttccctcgcttctagttttcgtcaattatttttgttgaaggtgccgatttggagttggtcaggtatcctaatgcagatacagctagctttcttcatggggggtcatcgctcttcatcgtttacttgcaccgaagagggacattgaccattatcccttagccttgcatggtgtatgtagttggtaactgacattttcaaagcatacaaatcagtctggcggatatggtccacaaggttaccgacctcagggtcatggtgccgcttctcagttggggccacgctctcagaatcatggctatggatacccacctagaggtatgcctccacctcaaaactacaacgcaccctacggtggctacccaccgcagggaccgtcaagaggtggcatgggctgggaccagaggccgggcccaccaacccatccttcgtaccagggtggtggttctgactactacaagcagggatctcagccatatgatagccagccacccagctaccctcctgggccagggaattacaacagttatgggcaatcccagggccctaactatggccaacctcagtatccgcaacatgcacctcaacagaactacagccatggctatggtgatcctagatacaatgccccccctccgaaccagcagtactatggtcagccaccgatggccccgcagcaaggctatcctcaacagccagatccctatgctaggcctccatacagtggacctggtcaatggacccccaggggtgctcccgccgcagatggctcctaccaggcgccaccttcatcttatgggccaccgtctcagcaacctcctgcttatgggcaaacatatggtgcagcaacgggacctgatgggtatggtcaacagggttacccacagcagggtggccaggtaccagcttcatatggtcagagtgcaccagcagctccaggatatcctcagcaaggcacgcagcaaggtggctatgcacagtacccgcagacccaaccagcatatggtgatcaagcagctcaagccaatgcgaactatgggtaccagggagctccagcagatcccaactacggaagtgcgtacccacagcagccagggtatggtcctcctggtcaggcaactggtcaggctggttatgcatcctctgcgccagcggccagccagcctgtgtatggccaggctggatatacccagccacctacaaatcctccaagttatgatcagtctgcagcaccagcggcgactcagagcggttatgctgcgccccctgcaaatccacaacagcctgctgcagcaaaaggggtctcgccacagcctgctgctgctgctgctgctggatatggtgctagcgggcagtggacggcatgagcctcgtcttccgaacttcgatgacagcaaggtcaggttggatatccgcttttggcgcgtgtttgaatgtttgcatcttttggatgtctgtggacgcatcatgtagggcttgaccccgttatcgaaagagattgtaaccccttgagttgtgatactggacatcttctgtagtatctacgagtagttgcttaatgtgacttttaaacattctattcagtttggatgttccttgtcttgctacttcacagcttgccaagccagtaatctttggattcatgtttggttgctctttggtctttgctgtcgttcctgtaaataaatattggcgtttggccttctcttacgtcgttcatgggatgacggggtgccctttcgagttggcaatagatctgctgttcatccaaactcagttggttttgtttgtatttgttccgaatcatgttggtacagttagcatgtgaatggacaagccattagccatggtctatttttttggttggtttgtttgaaaatgtc

SEQ ID NO: 57193 - DNA, 1406 bp, Zea Mays
atgaactatattagaagtcctacaaatcctaagaagagaaaactactccgtgcacctgatgatagcgaagtattgatgaaagatgatgatggtcccattactcaagcagacttagaaaggtggtttgttcatgattgggataaaggaactcctataaaggtatcgacagatgagtgcaccaacgactttttaatgagtggtctttccacaaaggatatgctcatgaccaaagccaatttaatagatgttctatgcgattacatcatggcaatccaagacgatatgacattacagtaagtgctcattgttttatctattttatgtataccaactacgtatagtcttgatatagactttcgtcatgctacatcacaggatgacatgggtgcgaagtttcaacccttttaagatagacatatctgtcaaagacttgcaaaatatattaaggataactctagatatgactctaaaatgttttgacatggatgtttgactgcttgccaataaagattcactatgtcaaaaggtgaaaagataaaggatataaagcattatatggatatgcgcttctgggtaagtttgtttccaatcaataatgtagcaatatatagtatctacctctaatcctcatgtggtcatgtatatatatttatccagagaatggttagttttgacaaactttcaaagtaccacgaggaccctacaacagaagagctagccaaaacactcaactgttggtcatcaatgaactattatatcactggttgtaaatatgttcttatgccatggaaattcaacgagtgctacgcccttttcgtaattgatcatggtaaaaagcacataacttttatcgactttacacccactcaagattggtgtaagcatatgccatacaagagggttaataccagctaccccgttctacaagctatggtcatgtggggaaatggtaggcgaatggaatttgttagggatgcaaagattcttcgaagaaactttgtgattgatctattaggttatgaggacaattcatcaaccaagttatcaatatctctacaaaggaatagattagtgtacggttgtcgatatattgttcgttttcatatttaccagagctgtcttcattcatgcaattcagaggttggccagctgctcctgaggcaacagaggtgctagcatggtttaaaaggcggctaggcggaactaggcgcccagccaccgcctgaccgcctaggcgacttaggcgggcgcctaggcgacgccttagtagctgttacaaacagctgttagcctataacaaaataccaagcaactaaagtaccaaacagatgttacagctcataaactagaaatcatcacaaattcacaatagcacaatagtggatctgaaatagccacaaagtagt

SEQ ID NO: 57194 - DNA, 754 bp, Zea Mays
ccggatcaacctcgccgtgctggcgtcattcccagcgcggcgtccggcgcttgaggacgtggctgccacagccaccccttcctcatactcctcttctaactcctcatgcctcttgctggaactggaactaaccaggcgcttcagcgagttgctcgagggccgccggcgcggcttgccgtccccacggtcgtccccgccgtggaattgtctggaactgacacagcccataggacgacagggcgatcccggcgagggacctcactccacggagcccagacgaagatttcaagaaaccttcccccagtactcctcccgcatctggcagcgcatcaacaagattcaaggaccctcattgccggccaaccaaattggagcaggagagcagccccctccgcagatccgaacgggaatcccacgacacgcgctccccacctcactccagcagctggcgaatcggaacctcgcaaaacgaaggtagcggggggcggcggcgccaccacgaactgctaccggataaaaaggaaatcgggatcttttcctacggttgctccgccggaagcggcgactgttactgggatgagcaacctggggccgcgtctggatcaaaaccgaaccttgccaccggaaatcgcgagacgtcgaccctcggggggtctccttcctctttcttgccgtcagtgatggccttttgctttggtctttgctatgcttggtttttggcgaacacttggtcagttggtcgatttccctttcc

SEQ ID NO: 57195 - DNA, 458 bp, Zea Mays
aggcggccgataacctcatcgtctcatcctcttcctcctcccgtccaaacgcagccgaagaggaaaggagagagagaggcggcgaggatggggcggaagcggaaggagctgctgtcgtcggctccatggaggacgggggaggcggcggaggacgaggacgcggcaaggatgagccgcgaggggaaggtcagcgtcaccagcaaccccggggagacgcccaccatgagcatgccccggagcaagcgccaggacctcgacctcaccgtcgacgacttcgaggaggacgagatcgaccctgagctgcgctactccttccagcggaacagcaggtttctgaagagagtttttagcgtggacacacttgtcaagcctctccctcctgtaatggcatacagcgtatcccgcaatataaacttcttcttccggatcttcacacagttttgggccaactggaaccg

SEQ ID NO: 57196 - DNA, 1588 bp, Zea Mays
cacacacacacaccaccaccaccaccagtttggaactttgcatgcatccatgcatgagcgagtagcacggatctacctccaacgtacagcagggactgctatctcgtagccgtagagcagttcaggaccgctggaccccgcgccaccgcacgccctgaccaaccaggcggccgcgtccacctcgcagcagcaagcaagcgcgaccaaatggcgcctctaggagacggcggagctgctgccgcggcggcgtccaacaacctggtggtgtcgttcggcgagatgctgatcgacttcgtccccaacgtcgcctgcgccatcgccaagctcggcggatcctccgccttcgtaggcaagttcggcgacgacgagttcgggcacatgctggtgaacatcctgaagcagaacaacgtgaacgcggaggggtgcctgttcgacaagcacgcgcggacggcgctggccttcgtgacgctcaagcacgacggggagcgcgagttcatgttctacaggaacccgagcgcggacatgctgctgacggaggcggagctggacctgggcctggtgcggcgcgccagggtgttccactacggctccatctcgctcatctccgagccgtgccgctcggcgcacatggccgccatgcgcgcagccaaggccgcgggcgtgctctgctcctacgaccccaacgtgcgcctcccgctctggccgtcgcccgacgccgcacgcgagggcatcctcagcatctggaaggaggccgacttcatcaaggtcagcgacgacgaggtggccttcctcacgcgcggggacgccaacgacgagaagaacgtgctgtccctgtggtttgacgggctcaagctgctcgtcgtcaccgacggggacaagggatgcaggtacttcaccaaggacttcaagggcagcgtgcccggcttcaaggtcgacaccgtcgacaccaccggcgccggcgacgccttcgtcggctccctcctcgtcaacgtcgccaaggacgactccatcttccacaacgaggagaagctccgcgaggctctcaagttctccaacgcctgcggcgccatctgcaccaccaagaagggcgccatcccggcgctgcccacggtcgccaccgcccaggacctcatcgccaaggccaactagatggccgcacgccccgccgttccaccacgtcactgtcccccgccgccccgcccctcgtcgtcgacgtcctcggtttcggttcattaggtagatcgagtcttagcgtccgtctctgcgcctctacgctgagacggtttgtttgggttaattaagttagctttcgtggagatttcgccccggggcatcaataaaatgttggcatgcgtggtgggatgctatcctttttttttattttattttattttatttttagcttggatcagttggggttttgaacattgctagtgtcgtgtgattgggaaggctaatgtgatgccttcgatgcagagttttcaatgaatgccttggtgcaaacgtacgattgtgtaataatgccttctattgatcagcgactccaatagtccaatgtgcaagtattcttcgtcttcttggctacaaa

SEQ ID NO: 57197 - DNA, 1404 bp, Zea Mays
atctattttacgggcggataaagacgggcggtaaatcctagtcccatccaatcccgtcacgttcggcgaaacccgggttataaaaccggagcacctcgccccccctctaccaccaccgcagccgcagcacaatcgcctcgccttcccttccccaccagcccgtctctctcttctctctgactctctctctcgtagccgcgtccacctcgcagcagcaagcaagcgcgaccaaatggcgcctctaggagacggcggagctgctgccgcggcggcgtccaacaacctggtggtgtcgttcggcgagatgctgatcgacttcgtccccaacgtcgcctgcgccatcgccaagctcggcggagctggacctgggcctggtgcggcgcgccagggtgttccactacggctccatctcgctcatctccgagccgtgccgctcggcgcacatggccgccatgcgcgcagccaaggccgcgggcgtgctctgctcctacgaccccaacgtgcgcctcccgctctggccgtcgcccgacgccgcacgcgagggcatcctcagcatctggaaggaggccgacttcatcaaggtcagcgacgacgaggtggccttcctcacgcgcggggacgccaacgacgagaagaacgtgctgtccctgtggtttgacgggctcaagctgctcgtcgtcaccgacggggacaagggatgcaggtacttcaccaaggacttcaagggcagcgtgcccggcttcaaggtcgacaccgtcgacaccaccggcgccggcgacgccttcgtcggctccctcctcgtcaacgtcgccaaggacgactccatcttccacaacgaggagaagctccgcgaggctctcaagttctccaacgcctgcggcgccatctgcaccaccaagaagggcgccatcccggcgctgcccacggtcgccaccgcccaggacctcatcgccaaggccaactagatggccgcacgccccgccgttccaccacgtcactgtcccccgccgccccgcccctcgtcgtcgacgtcctcggtttcggttcattaggtagatcgagtcttagcgtccgtctctgcgcctctacgctgagacggtttgtttgggttaattaagttagctttcgtggagatttcgccccggggcatcaataaaatgttggcatgcgtggtgggatgctatcctttttttttattttattttattttatttttagcttggatcagttggggttttgaacattgctagtgtcgtgtgattgggaaggctaatgtgatgccttcgatgcagagttttcaatgaatgccttggtgcaaacgtacgattgtgtaataatgccttctattgatcagcgactccaatagtccaatgtgcaagtattcttcgtcttcttggctacaaa

SEQ ID NO: 57198 - DNA, 909 bp, Zea Mays
ctgaattatgcttcattcggtattgcgggaaccagcttcttttcaagaagcacattacatgctcgggttatctcttgtcaacagccaaagattatcagaaggaataaaatcactggagaagtccttggagcttggaaggggtgcacatcctgcaagctacatggttgaagagatatggcaggagctttctaaagcaaaatacatcgaatgggagagcttatcaagagaccgaacttgtcaactgcaaaagctgaaggtagcatgtaaagaggccctaacgagttacaacagccttgataacccagccgcaggtgcgccagtagaacagctaaatgagctcgaggaagttttcaagaaggctgcaaagactgatactccagcagaagtacctgaccatctctgttgcaaaatcacacttgatatcttcagagacccggtgatcaccccgagcgggattacctacgagagggccgtacttctcgaccaccttcaaacggtggggaggtttgaccccgtgacccgtgaggctcttgaaccgcaccagctggttcctaatcttgccatcaaggaagctgtgcatgcgtttttgagtgagcatggttgggcttacaagattagatgatcgctttggaatacaggttttggatactgtcggatgtgacggtgggatttttttgttcactgttggggggcagattttaatctgggatggctgcgtacagattcaccttctccagttgtgtacatatgagatgctcattatgatagtaattgtgaacagtacaccaaaggaagtgaagttgagcgtctgagttcctgactgcatcttcagttttaaattgtgtgtgagggagggcgaactgtgctgtcaaagcacccatagaggagaactgagccgactgcgtgaag

SEQ ID NO: 57199 - DNA, 3730 bp, Zea Mays
ctcactttagccacacttgttcgtcggaacgaagcccaactctatctccccactcctaccggcctgcagctgtttgcgaggcaagcgtgtcttctgcgcgcgcgacggacggcgcgagggcaagcagcgcctccgtgttccgcccgtgcgaagggaggggaacgagagctccggcggcggcccccgcctcgccccatgtctgtgcctctcgtcgggttggctgatacccctatcccaacatcttcttccctcccattcccatggagctcctcccggctccctttccctctttcctccctagaccccaccaactgcctctttccagaccctgccatggccgcctccaagagcccatcacggctgctttcgcgcaggctcctcccctcgcgctccccttccaagaagcaactagaagaagcagcagctcccataccccacgcccaagtacccgtccgtgcccccccgcccagagaccaacaacaactcacccgctgccgccgccgctgccgcctggcccttccccttcctccggcagcactggcagtgagcgcctgattgtttccgagacgaagctcatcacggtgcactcctgcgctgggcgcctaggggacgctcgcaaggtgttcgaaggaatggcgtgcagggacctgctcgcctggtcggccatgatcggtgcctacgccatcaggggcctgtacgaggaggtcgtcgcgctcgcggtggccatggtcagggaaggggtcatcccggacaggttcctgatcacccggattctacaggcctgtgcgtacacagaggacctggagctcgggacggcgatgcattccctggcgatccggagaggtttcatggcggagggagcgagggacgtgcccgtggggaactcggtgctggccatgtacgtcaagtgcggagagttgggccgtgcgcgcgccgcgttcgacatgatggggcagcgggacctgtgcacgtggaactcgatgatcttcgggtgctgccgctccaacgaatgggaagaggcacggaggctgctcgacgatatgaggcgccaaggtacagagcctgggcttgtcacatggaacacgctggtttcgagctacgcgaggtctggggaacttgatgtggccatggagatgctggagcagatggaggagtccggtgttgctccggacgtcgtcacctggactagccttgtgtctggttttgtccacggtgataggggtggcgaagcactttggtgtttcgcgcgcatgcgccttgctggagtcgaaccaaacggcatgacaattgcgagtgccatctcagcttgtgctagtttgcggttgctgagtcagggcatggagctccattgccacgcaattaaggttgggagtgtgaacaatgtgctctcggggaactccttggttgacatgtatgcaaaatgtggagaaatcattgcagctaagagagtatttgatgaaatacccgagaaggatatcttctcctggaactcgatggttgcagggtatgcacaggcgggctattgcggcaaagcatatgagcttttctgtgagatggagagccttggtgttcggcgcaatgtgatcacgtggaatataatgatctcgggatacataagaaatggggatgatgagagagcttttgaactatttcagatgatggaaagctgtggagtaaaaagggacacagcttcatggaatgcactcattgctggttcggtgcataatggtcattctgatagagccctgagaatattctggcagatgcaatcactcttggtgagaccagacttcattacaatattaagtatcattccagcttttgcgaacctagctggattttggaaagtacgggagatccacgcctgcatttatcacaacaatttagaaatggatggcaaaatagcaaatgcactcatcaatgcctattcaaaatctggtgaccttgctggtgcttgtgctgtttttgataggcactcatcaaggaacattatttcttggaattgtataattcttgcacacttgctgcatggttctccaagtgaagcactggatcgcttttgtgagatgaaacaagaaggcgtgcggccagatcatacaactttgactgccgtaatcaaggcctatggcctccagggaaaggtatctgaggcgaaacgaatatttcacaatatgacccacgattacaacattattccagatttagatcattacacagctatagttgatctccttggccgctcagggagtctacaagaagcgtacgagtttattggtaatatgccactcatacccaatttagcagtctgggaggcattgcttactgctgcaactattcatggaaatgcaaggctcgcaaacctgacagcaagagagttgtcatcgcttgatccgagtgaccctagaatccaaagactggtttttaattactggggtctaactggaaagtctgttgatgtgccactcatgacggtatacaacggaggaagagagttggaagatgttgatagttgttcggttgaaatcaagaacaatgtctatttgttctcaaccggtgataatttagcattagagagtacagttgctgaattgaagctgattatgattcagatccgaatgtcattgctgaacatctctaatgagactaacgctgaagaagagaaagaagaattatcaggaatacattgtgagaagctagcaattgcttttgcaatttcaaattcccctcctttcagaagcatacggataataaagaccttaaggatgtgtagccattgtcacatctttgccaagctagtttcagaaaaatacgagcggcagatactaatcaaggattcaaattgtttgcacaagtttgaggatggaaagtgctcttgtgaagcttgtgccactcttgatgattaccttctcaagagctactacaaaaccacgtctctgatcgcagcaagcacaaggtcagctgttgatgacatccacatcccggactttacccaatcagctgagcaacttggcaaaacagtcggaagtgacttggcaaagggaaacctgacggctccagtcatctttgctttgcaagatgaaccagagctaagagagatcatcgactccgagtttagtgagactgattcgtttgctgctgcgatagatcttgttcacaagagctgtggaataagaagggcacgcgagcttgcgagagagaagggtgacttggctatccaaaacctgcagtgccttccgagaagtgatttcagaagtaccgttgagagtatggtaaaatataatcttgaaaggattgagtagatagattcagttgattcctctaccagtccactagatacaggcctccagtatgggatccatgtagctccaaaacccatctttcagcctcttcgtggaaggtgaatctttggcttggagttcaaggatcagatattacctcatctacaacaccagaatttataagcacccggttctgcagaaatataaactatggatttttctttttactttcagttggcaaaagaaattgcaatggttgaagtattttaccatttatagttgtttttcgtgcattggtaatttacacttatttgtttgggcttacaaaaagtgaagaacacttttttgctgaagatgttggtgtggaatcttccgtgacaacaggaccaaataaacaaacaattgaagatgacacaaagatttcatattcggtcaaggagccgcagaaccag

SEQ ID NO: 57200 - DNA, 3715 bp, Zea Mays
cgaagcccaactctatctccccactcctaccggcctgcagctgtttgcgaggcaagcgtgtcttctgcgcgcgcgacggacggcgcgagggcaagcagcgcctccgtgttccgcccgtgcgaagggaggggaacgagagctccggcggcggcccccgcctcgccccatgtctgtgcctctcgtcgggttggctgatacccctatcccaacatcttcttccctcccattcccatggagctcctcccggctccctttccctctttcctccctagaccccaccaactgcctctttccagaccctgccatggccgcctccaagagcccatcacggctgctttcgcgcaggctcctcccctcgcgctccccttccaagaagcaactagaagaagcagcagctcccataccccacgcccaagtacccgtccgtgcccccccgcccagagaccaacaacaactcacccgctgccgccgccgctgccgcctggcccttccccttcctccggcagcactggcagtgagcgcctgattgtttccgagacgaagctcatcacggtgcactcctgcgctgggcgcctaggggacgctcgcaaggtgttcgaaggaatggcgtgcagggacctgctcgcctggtcggccatgatcggtgcctacgccatcaggggcctgtacgaggaggtcgtcgcgctcgcggtggccatggtcagggaaggggtcatcccggacaggttcctgatcacccggattctacaggcctgtgcgtacacagaggacctggagctcgggacggcgatgcattccctggcgatccggagaggtttcatggcggagggagcgagggacgtgcccgtggggaactcggtgctggccatgtacgtcaagtgcggagagttgggccgtgcgcgcgccgcgttcgacatgatggggcagcgggacctgtgcacgtggaactcgatgatcttcgggtgctgccgctccaacgaatgggaagaggcacggaggctgctcgacgatatgaggcgccaaggtacagagcctgggcttgtcacatggaacacgctggtttcgagctacgcgaggtctggggaacttgatgtggccatggagatgctggagcagatggaggagtccggtgttgctccggacgtcgtcacctggactagccttgtgtctggttttgtccacggtgataggggtggcgaagcactttggtgtttcgcgcgcatgcgccttgctggagtcgaaccaaacggcatgacaattgcgagtgccatctcagcttgtgctagtttgcggttgctgagtcagggcatggagctccattgccacgcaattaaggttgggagtgtgaacaatgtgctctcggggaactccttggttgacatgtatgcaaaatgtggagaaatcattgcagctaagagagtatttgatgaaatacccgagaaggatatcttctcctggaactcgatggttgcagggtatgcacaggcgggctattgcggcaaagcatatgagcttttctgtgagatggagagccttggtgttcggcgcaatgtgatcacgtggaatataatgatctcgggatacataagaaatggggatgatgagagagcttttgaactatttcagatgatggaaagctgtggagtaaaaagggacacagcttcatggaatgcactcattgctggttcggtgcataatggtcattctgatagagccctgagaatattctggcagatgcaatcactcttggtgagaccagacttcattacaatattaagtatcattccagcttttgcgaacctagctggattttggaaagtacgggagatccacgcctgcatttatcacaacaatttagaaatggatggcaaaatagcaaatgcactcatcaatgcctattcaaaatctggtgaccttgctggtgcttgtgctgtttttgataggcactcatcaaggaacattatttcttggaattgtataattcttgcacacttgctgcatggttctccaagtgaagcactggatcgcttttgtgagatgaaacaagaaggcgtgcggccagatcatacaactttgactgccgtaatcaaggcctatggcctccagggaaaggtatctgaggcgaaacgaatatttcacaatatgacccacgattacaacattattccagatttagatcattacacagctatagttgatctccttggccgctcagggagtctacaagaagcgtacgagtttattggtaatatgccactcatacccaatttagcagtctgggaggcattgcttactgctgcaactattcatggaaatgcaaggctcgcaaacctgacagcaagagagttgtcatcgcttgatccgagtgaccctagaatccaaagactggtttttaattactggggtctaactggaaagtctgttgatgtgccactcatgacggtatacaacggaggaagagagttggaagatgttgatagttgttcggttgaaatcaagaacaatgtctatttgttctcaaccggtgataatttagcattagagagtacagttgctgaattgaagctgattatgattcagatccgaatgtcattgctgaacatctctaatgagactaacgctgaagaagagaaagaagaattatcaggaatacattgtgagaagctagcaattgcttttgcaatttcaaattcccctcctttcagaagcatacggataataaagaccttaaggatgtgtagccattgtcacatctttgccaagctagtttcagaaaaatacgagcggcagatactaatcaaggattcaaattgtttgcacaagtttgaggatggaaagtgctcttgtgaaggttattggtgaatacaactaatataagtgcaccaatggtttctgttcatttatgcgtcgtccatactggctttttcatttggaagtagtagatatctttatcttctttggctgaggcttactatactttagttaagttctcgcaagcttgaatttactggtgttcaaatgctatctgctacggacagaggaagagctccccctacggtttctagcaactctaataagggaatgacaacgttcagcggtttatggaatctagatcaaccattagacaagtatgttgcaacaatataagggaatgacaacgttcagcggtttatggaatctagatcaaccattagacagcaagcacaaggtcagctgttgatgacatccacatcccggactttacccaatcagctgagcaacttggcaaaacagtcggaagtgacttggcaaagggaaacctgacggctccagtcatctttgctttgcaagatgaaccagagctaagagagatcatcgactccgagtttagtgagactgattcgtttgctgctgcgatagatcttgttcacaagagctgtggaataagaagggcacgcgagcttgcgagagagaagggtgacttggctatccaaaacctgcagtgccttccgagaagtgatttcagaagtaccgttgagagtatgtttaattcacagaattcctctatatcttcccagttggcaaaagaaattgcaatggttgaagtattttaccatttatagttgtttttcgtgcattggtaatttacacttatttgtttgggcttacaaaaagtgaagaacacttttttgctgaagatgttggtgtggaatcttccgtgacaacaggaccaaat

SEQ ID NO: 57201 - DNA, 3908 bp, Zea Mays
actctatctccccactcctaccggcctgcagctgtttgcgaggcaagcgtgtcttctgcgcgcgcgacggacggcgcgagggcaagcagcgcctccgtgttccgcccgtgcgaagggaggggaacgagagctccggcggcggcccccgcctcgccccatgtctgtgcctctcgtcgggttggctgatacccctatcccaacatcttcttccctcccattcccatggagctcctcccggctccctttccctctttcctccctagaccccaccaactgcctctttccagaccctgccatggccgcctccaagagcccatcacggctgctttcgcgcaggctcctcccctcgcgctccccttccaagaagcaactagaagaagcagcagctcccataccccacgcccaagtacccgtccgtgcccccccgcccagagaccaacaacaactcacccgctgccgccgccgctgccgcctggcccttccccttcctccggcagcactggcagtgagcgcctgattgtttccgagacgaagctcatcacggtgcactcctgcgctgggcgcctaggggacgctcgcaaggtgttcgaaggaatggcgtgcagggacctgctcgcctggtcggccatgatcggtgcctacgccatcaggggcctgtacgaggaggtcgtcgcgctcgcggtggccatggtcagggaaggggtcatcccggacaggttcctgatcacccggattctacaggcctgtgcgtacacagaggacctggagctcgggacggcgatgcattccctggcgatccggagaggtttcatggcggagggagcgagggacgtgcccgtggggaactcggtgctggccatgtacgtcaagtgcggagagttgggccgtgcgcgcgccgcgttcgacatgatggggcagcgggacctgtgcacgtggaactcgatgatcttcgggtgctgccgctccaacgaatgggaagaggcacggaggctgctcgacgatatgaggcgccaaggtacagagcctgggcttgtcacatggaacacgctggtttcgagctacgcgaggtctggggaacttgatgtggccatggagatgctggagcagatggaggagtccggtgttgctccggacgtcgtcacctggactagccttgtgtctggttttgtccacggtgataggggtggcgaagcactttggtgtttcgcgcgcatgcgccttgctggagtcgaaccaaacggcatgacaattgcgagtgccatctcagcttgtgctagtttgcggttgctgagtcagggcatggagctccattgccacgcaattaaggttgggagtgtgaacaatgtgctctcggggaactccttggttgacatgtatgcaaaatgtggagaaatcattgcagctaagagagtatttgatgaaatacccgagaaggatatcttctcctggaactcgatggttgcagggtatgcacaggcgggctattgcggcaaagcatatgagcttttctgtgagatggagagccttggtgttcggcgcaatgtgatcacgtggaatataatgatctcgggatacataagaaatggggatgatgagagagcttttgaactatttcagatgatggaaagctgtggagtaaaaagggacacagcttcatggaatgcactcattgctggttcggtgcataatggtcattctgatagagccctgagaatattctggcagatgcaatcactcttggtgagaccagacttcattacaatattaagtatcattccagcttttgcgaacctagctggattttggaaagtacgggagatccacgcctgcatttatcacaacaatttagaaatggatggcaaaatagcaaatgcactcatcaatgcctattcaaaatctggtgaccttgctggtgcttgtgctgtttttgataggcactcatcaaggaacattatttcttggaattgtataattcttgcacacttgctgcatggttctccaagtgaagcactggatcgcttttgtgagatgaaacaagaaggcgtgcggccagatcatacaactttgactgccgtaatcaaggcctatggcctccagggaaaggtatctgaggcgaaacgaatatttcacaatatgacccacgattacaacattattccagatttagatcattacacagctatagttgatctccttggccgctcagggagtctacaagaagcgtacgagtttattggtaatatgccactcatacccaatttagcagtctgggaggcattgcttactgctgcaactattcatggaaatgcaaggctcgcaaacctgacagcaagagagttgtcatcgcttgatccgagtgaccctagaatccaaagactggtttttaattactggggtctaactggaaagtctgttgatgtgccactcatgacggtatacaacggaggaagagagttggaagatgttgatagttgttcggttgaaatcaagaacaatgtctatttgttctcaaccggtgataatttagcattagagagtacagttgctgaattgaagctgattatgattcagatccgaatgtcattgctgaacatctctaatgagactaacgctgaagaagagaaagaagaattatcaggaatacattgtgagaagctagcaattgcttttgcaatttcaaattcccctcctttcagaagcatacggataataaagaccttaaggatgtgtagccattgtcacatctttgccaagctagtttcagaaaaatacgagcggcagatactaatcaaggattcaaattgtttgcacaagtttgaggatggaaagtgctcttgtgaaggttattggtgaatacaactaatataagtgcaccaatggtttctgttcatttatgcgtcgtccatactggctttttcatgtatgtgagtgtagtgttatcagttcatagttgtattggtacgaaaaattactgtagccagttttgctcataaaaaaacctaatgttgtcttattgctatattttagttggaagtagtagatatctttatcttctttggctgaggcttactatactttagttaagttctcgcaagcttgaatttactggtgttcaaatgctatctgctacggacagaggaagagctccccctacggtttctagcaactctaataagggaatgacaacgttcagcggtttatggaatctagatcaaccattagacaagtatgttgcaacaatataagggaatgacaacgttcagcggtttatggaatctagatcaaccattagacagcaagcacaaggtcagctgttgatgacatccacatcccggactttacccaatcagctgagcaacttggcaaaacagtcggaagtgacttggcaaagggaaacctgacggctccagtcatctttgctttgcaagatgaaccagagctaagagagatcatcgactccgagtttagtgagactgattcgtttgctgctgcgatagatcttgttcacaagagctgtggaataagaagggcacgcgagcttgcgagagagaagggtgacttggctatccaaaacctgcagtgccttccgagaagtgatttcagaagtaccgttgagagtatggtaaaatataatcttgaaaggattgagtagatagattcagttgattcctctaccagtccactagatacaggcctccagtatgggatccatgtagctccaaaacccatctttcagcctcttcgtggaagttggcaaaagaaattgcaatggttgaagtattttaccatttatagttgtttttcgtgcattggtaatttacacttatttgtttgggcttacaaaaagtgaagaacacttttttgctgaagatgttggtgtggaatcttccgtgacaacaggaccaaat

SEQ ID NO: 57202 - DNA, 3592 bp, Zea Mays
atctccccactcctaccggcctgcagctgtttgcgaggcaagcgtgtcttctgcgcgcgcgacggacggcgcgagggcaagcagcgcctccgtgttccgcccgtgcgaagggaggggaacgagagctccggcggcggcccccgcctcgccccatgtctgtgcctctcgtcgggttggctgatacccctatcccaacatcttcttccctcccattcccatggagctcctcccggctccctttccctctttcctccctagaccccaccaactgcctctttccagaccctgccatggccgcctccaagagcccatcacggctgctttcgcgcaggctcctcccctcgcgctccccttccaagaagcaactagaagaagcagcagctcccataccccacgcccaagtacccgtccgtgcccccccgcccagagaccaacaacaactcacccgctgccgccgccgctgccgcctggcccttccccttcctccggcagcactggcagtgagcgcctgattgtttccgagacgaagctcatcacggtgcactcctgcgctgggcgcctaggggacgctcgcaaggtgttcgaaggaatggcgtgcagggacctgctcgcctggtcggccatgatcggtgcctacgccatcaggggcctgtacgaggaggtcgtcgcgctcgcggtggccatggtcagggaaggggtcatcccggacaggttcctgatcacccggattctacaggcctgtgcgtacacagaggacctggagctcgggacggcgatgcattccctggcgatccggagaggtttcatggcggagggagcgagggacgtgcccgtggggaactcggtgctggccatgtacgtcaagtgcggagagttgggccgtgcgcgcgccgcgttcgacatgatggggcagcgggacctgtgcacgtggaactcgatgatcttcgggtgctgccgctccaacgaatgggaagaggcacggaggctgctcgacgatatgaggcgccaaggtacagagcctgggcttgtcacatggaacacgctggtttcgagctacgcgaggtctggggaacttgatgtggccatggagatgctggagcagatggaggagtccggtgttgctccggacgtcgtcacctggactagccttgtgtctggttttgtccacggtgataggggtggcgaagcactttggtgtttcgcgcgcatgcgccttgctggagtcgaaccaaacggcatgacaattgcgagtgccatctcagcttgtgctagtttgcggttgctgagtcagggcatggagctccattgccacgcaattaaggttgggagtgtgaacaatgtgctctcggggaactccttggttgacatgtatgcaaaatgtggagaaatcattgcagctaagagagtatttgatgaaatacccgagaaggatatcttctcctggaactcgatggttgcagggtatgcacaggcgggctattgcggcaaagcatatgagcttttctgtgagatggagagccttggtgttcggcgcaatgtgatcacgtggaatataatgatctcgggatacataagaaatggggatgatgagagagcttttgaactatttcagatgatggaaagctgtggagtaaaaagggacacagcttcatggaatgcactcattgctggttcggtgcataatggtcattctgatagagccctgagaatattctggcagatgcaatcactcttggtgagaccagacttcattacaatattaagtatcattccagcttttgcgaacctagctggattttggaaagtacgggagatccacgcctgcatttatcacaacaatttagaaatggatggcaaaatagcaaatgcactcatcaatgcctattcaaaatctggtgaccttgctggtgcttgtgctgtttttgataggcactcatcaaggaacattatttcttggaattgtataattcttgcacacttgctgcatggttctccaagtgaagcactggatcgcttttgtgagatgaaacaagaaggcgtgcggccagatcatacaactttgactgccgtaatcaaggcctatggcctccagggaaaggtatctgaggcgaaacgaatatttcacaatatgacccacgattacaacattattccagatttagatcattacacagctatagttgatctccttggccgctcagggagtctacaagaagcgtacgagtttattggtaatatgccactcatacccaatttagcagtctgggaggcattgcttactgctgcaactattcatggaaatgcaaggctcgcaaacctgacagcaagagagttgtcatcgcttgatccgagtgaccctagaatccaaagactggtttttaattactggggtctaactggaaagtctgttgatgtgccactcatgacggtatacaacggaggaagagagttggaagatgttgatagttgttcggttgaaatcaagaacaatgtctatttgttctcaaccggtgataatttagcattagagagtacagttgctgaattgaagctgattatgattcagatccgaatgtcattgctgaacatctctaatgagactaacgctgaagaagagaaagaagaattatcaggaatacattgtgagaagctagcaattgcttttgcaatttcaaattcccctcctttcagaagcatacggataataaagaccttaaggatgtgtagccattgtcacatctttgccaagctagtttcagaaaaatacgagcggcagatactaatcaaggattcaaattgtttgcacaagtttgaggatggaaagtgctcttgtgaaggttattggtgaatacaactaatataagtgcaccaatggtttctgttcatttatgcgtcgtccatactggctttttcataggaagagctccccctacggtttctagcaactctaataagggaatgacaacgttcagcggtttatggaatctagatcaaccattagacaagtatgttgcaacaatataagggaatgacaacgttcagcggtttatggaatctagatcaaccattagacagcaagcacaaggtcagctgttgatgacatccacatcccggactttacccaatcagctgagcaacttggcaaaacagtcggaagtgacttggcaaagggaaacctgacggctccagtcatctttgctttgcaagatgaaccagagctaagagagatcatcgactccgagtttagtgagactgattcgtttgctgctgcgatagatcttgttcacaagagctgtggaataagaagggcacgcgagcttgcgagagagaagggtgacttggctatccaaaacctgcagtgccttccgagaagtgatttcagaagtaccgttgagagtatgtttaattcacagaattcctctatatcttcccagttggcaaaagaaattgcaatggttgaagtattttaccatttatagttgtttttcgtgcattggtaatttacacttatttgtttgggcttacaaaaagtgaagaacacttttttgctgaagatgttggtgtggaatcttccgtgacaacaggaccaaat

SEQ ID NO: 57203 - DNA, 3687 bp, Zea Mays
atctccccactcctaccggcctgcagctgtttgcgaggcaagcgtgtcttctgcgcgcgcgacggacggcgcgagggcaagcagcgcctccgtgttccgcccgtgcgaagggaggggaacgagagctccggcggcggcccccgcctcgccccatgtctgtgcctctcgtcgggttggctgatacccctatcccaacatcttcttccctcccattcccatggagctcctcccggctccctttccctctttcctccctagaccccaccaactgcctctttccagaccctgccatggccgcctccaagagcccatcacggctgctttcgcgcaggctcctcccctcgcgctccccttccaagaagcaactagaagaagcagcagctcccataccccacgcccaagtacccgtccgtgcccccccgcccagagaccaacaacaactcacccgctgccgccgccgctgccgcctggcccttccccttcctccggcagcactggcagtgagcgcctgattgtttccgagacgaagctcatcacggtgcactcctgcgctgggcgcctaggggacgctcgcaaggtgttcgaaggaatggcgtgcagggacctgctcgcctggtcggccatgatcggtgcctacgccatcaggggcctgtacgaggaggtcgtcgcgctcgcggtggccatggtcagggaaggggtcatcccggacaggttcctgatcacccggattctacaggcctgtgcgtacacagaggacctggagctcgggacggcgatgcattccctggcgatccggagaggtttcatggcggagggagcgagggacgtgcccgtggggaactcggtgctggccatgtacgtcaagtgcggagagttgggccgtgcgcgcgccgcgttcgacatgatggggcagcgggacctgtgcacgtggaactcgatgatcttcgggtgctgccgctccaacgaatgggaagaggcacggaggctgctcgacgatatgaggcgccaaggtacagagcctgggcttgtcacatggaacacgctggtttcgagctacgcgaggtctggggaacttgatgtggccatggagatgctggagcagatggaggagtccggtgttgctccggacgtcgtcacctggactagccttgtgtctggttttgtccacggtgataggggtggcgaagcactttggtgtttcgcgcgcatgcgccttgctggagtcgaaccaaacggcatgacaattgcgagtgccatctcagcttgtgctagtttgcggttgctgagtcagggcatggagctccattgccacgcaattaaggttgggagtgtgaacaatgtgctctcggggaactccttggttgacatgtatgcaaaatgtggagaaatcattgcagctaagagagtatttgatgaaatacccgagaaggatatcttctcctggaactcgatggttgcagggtatgcacaggcgggctattgcggcaaagcatatgagcttttctgtgagatggagagccttggtgttcggcgcaatgtgatcacgtggaatataatgatctcgggatacataagaaatggggatgatgagagagcttttgaactatttcagatgatggaaagctgtggagtaaaaagggacacagcttcatggaatgcactcattgctggttcggtgcataatggtcattctgatagagccctgagaatattctggcagatgcaatcactcttggtgagaccagacttcattacaatattaagtatcattccagcttttgcgaacctagctggattttggaaagtacgggagatccacgcctgcatttatcacaacaatttagaaatggatggcaaaatagcaaatgcactcatcaatgcctattcaaaatctggtgaccttgctggtgcttgtgctgtttttgataggcactcatcaaggaacattatttcttggaattgtataattcttgcacacttgctgcatggttctccaagtgaagcactggatcgcttttgtgagatgaaacaagaaggcgtgcggccagatcatacaactttgactgccgtaatcaaggcctatggcctccagggaaaggtatctgaggcgaaacgaatatttcacaatatgacccacgattacaacattattccagatttagatcattacacagctatagttgatctccttggccgctcagggagtctacaagaagcgtacgagtttattggtaatatgccactcatacccaatttagcagtctgggaggcattgcttactgctgcaactattcatggaaatgcaaggctcgcaaacctgacagcaagagagttgtcatcgcttgatccgagtgaccctagaatccaaagactggtttttaattactggggtctaactggaaagtctgttgatgtgccactcatgacggtatacaacggaggaagagagttggaagatgttgatagttgttcggttgaaatcaagaacaatgtctatttgttctcaaccggtgataatttagcattagagagtacagttgctgaattgaagctgattatgattcagatccgaatgtcattgctgaacatctctaatgagactaacgctgaagaagagaaagaagaattatcaggaatacattgtgagaagctagcaattgcttttgcaatttcaaattcccctcctttcagaagcatacggataataaagaccttaaggatgtgtagccattgtcacatctttgccaagctagtttcagaaaaatacgagcggcagatactaatcaaggattcaaattgtttgcacaagtttgaggatggaaagtgctcttgtgaaggttattggtgaatacaactaatataagtgcaccaatggtttctgttcatttatgcgtcgtccatactggctttttcataggaagagctccccctacggtttctagcaactctaataagggaatgacaacgttcagcggtttatggaatctagatcaaccattagacaagtatgttgcaacaatataagggaatgacaacgttcagcggtttatggaatctagatcaaccattagacagcaagcacaaggtcagctgttgatgacatccacatcccggactttacccaatcagctgagcaacttggcaaaacagtcggaagtgacttggcaaagggaaacctgacggctccagtcatctttgctttgcaagatgaaccagagctaagagagatcatcgactccgagtttagtgagactgattcgtttgctgctgcgatagatcttgttcacaagagctgtggaataagaagggcacgcgagcttgcgagagagaagggtgacttggctatccaaaacctgcagtgccttccgagaagtgatttcagaagtaccgttgagagtatggtaaaatataatcttgaaaggattgagtagatagattcagttgattcctctaccagtccactagatacaggcctccagtatgggatccatgtagctccaaaacccatctttcagcctcttcgtggaagttggcaaaagaaattgcaatggttgaagtattttaccatttatagttgtttttcgtgcattggtaatttacacttatttgtttgggcttacaaaaagtgaagaacacttttttgctgaagatgttggtgtggaatcttccgtgacaacaggaccaaat

SEQ ID NO: 57204 - DNA, 1479 bp, Zea Mays
tccgtccacttgtgtacatgtctagctagaagctaggctgcgtggacgggagggtaatgacacgagcagcagcatcaggccgccgtcgaccgagctcgagcatggggggagcatccggaggcgaccagcagccgcagcagcacggcggcgccgacgacgcagacgatgggcacctgcagcaagcaagcggaggcgacatggtgatgcccgggttccggttccaccccacggaggaagagctcatcgacttctacctccgccgtagggtggagggcaagcgcttcaacatcgagctcatcaacctcgtcgacctctaccgttacgacccatgggatctccctgctctggcctccattggggacaaggagtggtacttctacgtgccgagagaccgcaagtaccgcaacggcgaccgccccaaccgggtgacgccgtcgggctactggaaggccacgggggccgaccggacggtgtacgtcgaggtcaagcggccgatcgggctcaagaagacgctggtattctacgtggggaaggcgcccaagggacttaggagcagctggatcatgaacgagtatcgccttccttccggcgaggctgaccgctaccaaaaggaaatttctctttgcaaagtgtacaaacgaccagggatcgaggacaactttcacctcagcaccaccacggcaagatcatctggctcaaaggcagcagcaaacatggacaagaagcaccaccggacgtcggcgtcgccccgcctggcgccgatgttcgacggtggccactcatcagctcacatgaacaagccatacggtggagcaaacaccgccatagccataacatcatcagctgcagctcgagcagtaacaatggtgcctcagacgtcaatgttcctatcaacaccctcacttagctccaccacgtcgacggaggaggacggtacatcactctacctcatgaagggtgctaataactcaccgatgttgcattcttccacacatgccctgcttaatgcaaactcggctacaatggcaacaattccaatagatgagctgagtagggcaatcggatcatatagtagccaaggaaaccctaaccatcccttgccatcacaaggtccattgcttccttttcctagtatggaaaagatttgggattggaatccactcctagaatctcccaaggtttgcacaagcttcaagtgacttccaagtgactcgaagcatatatatgcatgcatgcttgcacgtattatatatatgaatacaggtgtgtgtatatgtgcaggcgccacaaaattattatttgggctagaatatggttaagatgtaatggaatatatagggtgagttagttctagtcctatgcaatgcatgctccgctatattaatcagttcaccatctccacacatcaatagttggtgtaacgatatgttaatttctattatttgataatgcagaccttgtagttgaactcgattaaat

SEQ ID NO: 57205 - DNA, 748 bp, Zea Mays
cgtagacagatggccacaagtggacgcgccgccccccgccctagccttggccgccttcgttcctcagttcgcgctttcgcgcgcatgcaccttcctcttcctgcgtgcgtgcctatattaggcggatgagctcaccgcgccgtgatctgacccaattgacgatgcgccagatgcagccgactgaccaccagcacccgagcagcagcgagagagcgccgccgctcgcggccgccgtcggcaaagatgatggcgcgtcgtcgtcgtcgtcgtcggtggtggtcaagatcgacgacctccgctgccacggagactggggggcggccgctgggtccgccgccgtggacgtgtgcctcgccgcggccgccgtggccggcgccgcgctgctggcgtggtgggccgtcgcgttccacccgtcgtacgcgcagctgtggatggtgccgctcggactcgtgctcgccggcaccccgcccgtcgtctgcctcgcgctccgcttcagccccgacgcccgcgcgccgccgccgccgggaaaagacggacccgcgggtgcgcgtgcgccgccgccgccgccgccgttggtcgccgttgtcatcgacaagcagtagcgcgttcgtacgtgtgtgcatgaggtagacgacgatggagtcatggagatcatcctgagatgtacgtgctttgatttggggtacgaaaaaaaaggcatcgaataaagaatgtaataaacagcaacaaacaattctgtgattgttga

SEQ ID NO: 57206 - DNA, 2413 bp, Zea Mays
gaaagagctagcagccagcagcagcagcagatacgtacaggtacaacaagcagagctatctaggtaggtagcaacagagagagagagagagtgaagcaggcagaggcagcagcatggaaatggaatggtggccatatgattcatggatgatgggtgcatggtggacgcgatcgaatcgaacgcgatcccctcccccctcaccccctaatttcactcggatccatgcctgtgtgtgctagctgccgtcgtcggccttgcctcgcaaaagtacccccaaccccccactatatataagtgcagcgcctttcctcccctgccaccaccagcttccctcctagctcttctctttcctcatcatcgtcttcctcccctcacatcctctggcctctggtcctccaccgtcctgctagccagagctgctcttgtacgcgcagctggcctctgtgcatatcaccagcacaccgcgcaggggaaggaaattaacaagagaaaaggcaaggagagcaggcaggcaaggaagctgcagaagccaaggaaggagaaggaggatcatcaatgagcatctcggtgaacgggcagtcgtgcgtgccgccggggttccgcttccaccccacggaggaggagctgctcaactactacctccgcaagaaggtggcctcccaggagatcgacctcgacgtcatccgcgacgtcgacctcaacaagctcgagccatgggacatccaagagaaatgcaagatcgggtcgggtccccagaacgactggtacttcttcagccacaaggacaagaagtacccgacggggacgcgcaccaaccgcgccacggccgccgggttctggaaggccaccggccgcgacaaggccatctacaacgccgtcaagcgcatcggcatgcgcaagacgctcgtcttctacaagggccgcgcgccgcacggccagaagtccgactggatcatgcacgagtaccgcctcgacgaccccgctgctgctgctgctgctggatccggtgatgccgtggccaacgacgacgcagccgccacggctgctgctgctgccgccgcgtcgtcggacggcgggcaggaggacggctgggtggtgtgcagggtgttcaagaagaagcaccaccacaaggagtcaggtgggggcgggggcaacaagcacggcagcagtaacagcgagcatgggcacggcggcgccggcaaggcatcggctgcggctgcggctgcggcgcaccagcaccagcaccatggaggcctgcagtactcctccagcgacgaggcgctggaccagatcctgcagtacatgggcaggtcgtgcaagcaggagcacgagctggtgtcgccggcgccggcgccgccgggacgggcggcggcgtccaggtacctccggcccatcgagaccgttctgggcgggcacgcgttcatgaagcttcccgcgctcgagagcccgtccgcggccgcgtccgcatcgctgacacagccggcgcagcacgacgagctctaccgcgccgccgggaacgggatcacggactgggccatgatggaccggctggtggcgtcgcacctgaacgggcagcaggcgcccgccgcggcggaccagctcggcggcggctgcggcttcgacgcggacgccggcgccgaagacgcggacgccggcctcgccttctactccgccgccgccagccggctgctcggctccggcggcggcgccggcagcgacgacgacctgtggagcttcacgcggtcgtcggtttcgtcaacggcggcggcggcggccacgtccacggagcggctcagccacgtgtcactgtagacgccgttcttcgtcgccgtcgccgtcgccttaactatgtacgtacgtacgtcgtaagcccctacgtgatgacatggccagcatgccctggtggtacacgtactagtaaagaagagacaaacaccaacagcaggagcagagagagagaaagaggaaataaaagaagggtctctagagagagagagagtgatttcagaggaggtgattagagtgatgagagagactgaaagtagatcgatggatcgctgattcgctgatacgattaaagctggcagtaagttggagtggcactgtcactcggacgccacatgcatcatctctcctttctatagcttcattctctctccatcatctcagccactgtttaattaacccccggccaccgattgttattactataatatataaccacagcattttactagcagattgatactacatctaccactgttactatatattagattgttcatttcaatataattaggagagagaggaggggagtaattaattgacagcgagcagcatggcaaaaacagtgtaaggcgattattattgctggtttgtttactagtacctacctacgtacgtgctgtgggcg

SEQ ID NO: 57207 - DNA, 616 bp, Zea Mays
ctctctcaatctgatccgtcgtccggtgagtggaagccgcacgaacccatggcctccggcgagcttgcctgcacctacgccgctctcatcctcagcgacgatggcatcgccatcaccgccgagaagatcgccacgatcgtgaaggcggccaacatcaaggtcgagtcctactggccggccctcttcgccaagctcctggagaagcgcaacgtcgaggacctcatcctctccgttggatctggtggcggagctgctccagttgctgctgccgcacctgctggtggtgctgcggctgctgctgccccggctgtcgaggagaagaaggaagaggccaaggaggagtctgatgacgacatgggcttcagcctgttcgactgaggagaccccctcacccagccattagcaaatttcacttgtgctgtcaaagactatcttgtcttatgttatgtctctaggcttttgttacaactacccaagttttgagtttttgagatgtggctatggcatgaactcaaaccatcttatgagggtgaaacctgtttctaatttctatattgttgctgttcattaaaaaaagaaaaaaggctaccaaaagaccgcaaaaaaaaaaaaaaaa

SEQ ID NO: 57208 - DNA, 3205 bp, Zea Mays
cgcttcgcggcgacgagcaccaccaccaggatgtccaacgtgaccgtgtgcgtgcggttccgaccgctgagccacaaggagaggaaggccaacggcgacaacgtctgcttcaagaggctggactcggagtcttttgttctcaaggatgagagggaagaggatgtcgtattcagtttcgacaaggtgttctatgaagatgcccaacagtctgacgtctacaacttccttgcagtccccattgtttcagatgccatcaatggaataaatgggactataattacttacggtcagaccggggcaggaaagacgtacagcatggagggcccaagcatattgcattgcaatgaacagaaaactggactagtacagcgagttgtggatgagctttttatatgtttaggatcatcagcaagcacgtggactgtgaagttgtcaatggtggagatatatttggaaaaggtgagggaccttcttgacttgtccaaagacaacctgcagatcaaggaaagtaaaacccaaggaatttacatttctggagcaacagaggtcagagtgaagaacatgtcaccttccttccattctaattttctgtgatattcagaaagaagtacttggcatcaggacctccatgctttcactttgatatctgaaatgaacctggctagcagtagaagtcactgcttatacattttctcagtacaatatggatgcacttcagatgagagggaagattatacttgttgacttggctggttctgagaaagttgagaaaactggtgctgaaggacgggttcttgatgaggcaaagacaatcaacaaatccctctcagctctaggaaatgtcatcaatgccttaacgactggtaaacagaatcatgtgcctttccgtgactcaaaacttacgcgcattcttcaagattcgttgggtggcaactcaagagcggcattgctgtgttgctgttctccgagcccatcgaatgcagcagagagtctgtccacgcttcgctttggaaccaggacaaagctcataaaggctcctccgaaattgattcctgagtcagtggataacaccaagaagcccgccgtcgagactcatgatcaagatgatctgcgggacaggatactgagcaagctaaggttgagcctgaaggaggaggatgtggatttgttagaagaactgttcgtgcaggaaggcatcatcttcgatgccagttccgtcgtggacatcgactcggtgttccgggacactgcaagcgaggagatctcgttgctgatgcaagccgtcgaggagctcaaagaaactgtggaagagctcacggacgagaacgaaaagctaagacgtagcctccaagtcgcacaggagatgaccactcaggcccagctcgccgccgccgccgccgtcgctggagctgcccggagccgtactctgcttgatttcgtgccggcagtcctcttccggccatttggaaaactaaaaatattcgtcggttcatctactgggcaggatgcacacgtggctccgcatccaaccgttcctgggtcgcacagcccatcccgccgcgccgtctccctctcgccccaaacccctctcctcctctctttctctatccacctttccaccgtcaccatggccaccgccactacgtccgcctatcattgcaacgccgtcctccaccttcccagacctccgcagttccgccggctcctgccccctctcccctccctcgtcacccgcagagccgcgagcgtcgggctgggggtcgcccgtctcggttcgagggcgagggcaagggcaagttccgtaccgccaccgccaccattttttgaaaccgtggaggaggaggaggaggaggaggaggagcgtgggtggtcggatgcggaggcgggattcagtgacgaggcagaggatgagcaggagtggtcgggcggcaacggcgcggcgcgcggggaggacctgggcgcggacgccggcgaggaccttagcgggtgggcgcggcagtggccgcgcccgcgggagctgttcgtgtgcaacctcccgcgccgctgcgacgtccaggacctgctcgagctcttcacgccccacggcaccgtcctctccgtcgagatctcacgcgatgccgagtccggaattagccgaggaacggcttctgtgacgatgcgatctctagcagaagctcgggcagccatcgacgctctggatggattcgacatggatgggcgtgaggttttcgtgaagctagcgtccgacgtcatttccaacaggaaaaacgtgaacctggcccacataacgcccacgaaggaccacatcttcgagaccccgcacaaggtctacgtcggcaacctcgcgtggtctgttcagccgcaagacctgagagagctctttacccagtgcggaaccgttgttagcacgaggctgctgacggaccgcaaagggggcaggaaccgagtctatgggttcctctcgttttcttccgcccaagagcttgaggaagcgttaaagctcgacagaacggtcttcttcggacgggatatcgtagtgaaggaagcccatgtagagcgccagacgcgctgagccgctgagtgttacccttgagaactgcactttttttgtctgcctcgttgactgactaagctcatgctccaggcacaagctacacagctgacgaagaagcaattgagcggttcatcgcgaaagagttaaaaaaaaaaacggtagtgtaaattagtaccattgctgcaactttgtcagcgccgccgtggatgctggtgtgagaaattctaggacgaactgagaactggtattgtagtggtaatacatgttgttttagcttcttataataccctccatacagtaatagtgctccttcaccacacgtttctaatgtctcgaatttttgtttgtgaaagggattctaattgagttggtcagattgtagaagacccggctctggttgtggtttgctgcacttctaaggctatctctagcaatctattcatctccatctctcatttcaaactttactattttaaacttgcaatatatagtgtaaaacaatgttttgcatgattatatgtacaatttagttatagtctaataccctaatatcttcaagtacacaaaggtcctgtgagttgttagatggcttgagtagaagtccggtattggtggtagtcgttctctgtagtttcctgtacatagacgtgg

SEQ ID NO: 57209 - DNA, 1751 bp, Zea Mays
atgtccaacgtgaccgtgtgcgtgcggttccgaccgctgagccacaaggagaggaaggccaacggcgacaacgtctgcttcaagaggctggactcggagtcttttgttctcaaggatgagagggaagaggatgtcgtattcagtttcgacaaggtgttctatgaagatgcccaacagtctgacgtctacaacttccttgcagtccccattgtttcagatgccatcaatggaataaatgggactataattacttacggtcagaccggggcaggaaagacgtacagcatggagggcccaagcatattgcattgcaatgaacagaaaactggactagtacagcgagttgtggatgagctttttatatgtttaggatcatcagcaagcacgtggactgtgaagttgtcaatggtggagatatatttggaaaagggaccttcttgacttgtccaaagacaacctgcagatcaaggaaagtaaaacccaaggaatttacatttctggagcaacagagatatctatcctcaacagttcagatgccttggagaacctttctcaaggaattgccaacagagctgttggggaaacacaaatgaacctggctagcagtagaagtcactgcttatacattttctcagtacaatatggatgcacttcagatgagagggtaacaacagggaagattatacttgttgacttggctggttctgagaaagttgagaaaactggtgctgaaggacgggttcttgatgaggcaaagacaatcaacaaatccctctcagctctaggaaatgtcatcaatgccttaacgactggtaaacagaatcatgtgcctttccgtgactcaaaacttacgcgcattcttcaagattcgttgggtggcaactcaagagcggcattgctgtgttgctgttctccgagcccatcgaatgcagcagagagtctgtccacgcttcgctttggaaccaggacaaagctcataaaggctcctccgaaattgattcctgagtcagtggataacaccaagaagcccgccgtcgagactcatgatcaagatgatctgcgggacaggatactgagcaagctaaggttgagcctgaaggaggaggatgtggatttgttagaagaactgttcgtgcaggaaggcatcatcttcgatgccagttccgtcgtggacatcgactcggtgttccgggacactgcaagcgaggagatctcgttgctgatgcaagccgtcgaggagctcaaagaaactgtggaagagctcacggacgagaacgaaaagctaagacgtagcctccaagtcgcacaggagatgaccactcaggcccagctcgccgccgccgccgccgtcgctggagctgcccggagccgtactctgcttgatttcgtgccggcagtcctcttccggccatttgggtttgtaccagagtgacgacagggtcaatgcccattgtcctgtgaggctgtgaagaaccatacacttgggatatagtagatcacgaccatggtggtacacagtatataatagttgcaatacagatactagactactgatatccttggaacttcagtctgtttgaaatacggcgagaatactgatagctatgtcatgtgtatcggatatttttcgtttttttgtgtgctggaagtgtctactccgtagttgtttttgaggattcgcctcttccccctttcaaagtactgatgaattgtcgtttttctttttaataacagaactttaagttgacttc

SEQ ID NO: 57210 - DNA, 1789 bp, Zea Mays
atgtccaacgtgaccgtgtgcgtgcggttccgaccgctgagccacaaggagaggaaggccaacggcgacaacgtctgcttcaagaggctggactcggagtcttttgttctcaaggatgagagggaagaggatgtcgtattcagtttcgacaaggtgttctatgaagatgcccaacagtctgacgtctacaacttccttgcagtccccattgtttcagatgccatcaatggaataaatgggactataattacttacggtcagaccggggcaggaaagacgtacagcatggagggcccaagcatattgcattgcaatgaacagaaaactggactagtacagcgagttgtggatgagctttttatatgtttaggatcatcagcaagcacgtggactgtgaagttgtcaatggtggagatatatttggaaaaggtgagggaccttcttgacttgtccaaagacaacctgcagatcaaggaaagtaaaacccaaggaatttacatttctggagcaacagagatatctatcctcaacagttcagatgccttggagaacctttctcaaggaattgccaacagagctgttggggaaacacaaatgaacctggctagcagtagaagtcactgcttatacattttctcagtacaatatggatgcacttcagatgagagggtaacaacagggaagattatacttgttgacttggctggttctgagaaagttgagaaaactggtgctgaaggacgggttcttgatgaggcaaagacaatcaacaaatccctctcagctctaggaaatgtcatcaatgccttaacgactggtaaacagaatcatgtgcctttccgtgactcaaaacttacgcgcattcttcaagattcgttgggtggcaactcaagagcggcattgctgtgttgctgttctccgagcccatcgaatgcagcagagagtctgtccacgcttcgctttggaaccaggcatgccagtcaaccagtttcacacctgtaccgcattgttctcataaaggctcctccgaaattgattcctgagtcagtggataacaccaagaagcccgccgtcgagactcatgatcaagatgatctgcgggacaggatactgagcaagctaaggttgagcctgaaggaggaggatgtggatttgttagaagaactgttcgtgcaggaaggcatcatcttcgatgccagttccgtcgtggacatcgactcggtgttccgggacactgcaagcgaggagatctcgttgctgatgcaagccgtcgaggagctcaaagaaactgtggaagagctcacggacgagaacgaaaagctaagacgtagcctccaagtcgcacaggagatgaccactcaggcccagctcgccgccgccgccgccgtcgctggagctgcccggagccgtactctgcttgatttcgtgccggcagtcctcttccggccatttgggtttgtaccagagtgacgacagggtcaatgcccattgtcctgtgaggctgtgaagaaccatacacttgggatatagtagatcacgaccatggtggtacacagtatataatagttgcaatacagatactagactactgatatccttggaacttcagtctgtttgaaatacggcgagaatactgatagctatgtcatgtgtatcggatatttttcgtttttttgtgtgctggaagtgtctactccgtagttgtttttgaggattcgcctcttccccctttcaaagtactgatgaattgtcgtttttctttttaataacagaactttaagttgacttc

SEQ ID NO: 57211 - DNA, 1639 bp, Zea Mays
atgtccaacgtgaccgtgtgcgtgcggttccgaccgctgagccacaaggagaggaaggccaacggcgacaacgtctgcttcaagaggctggactcggagtcttttgttctcaaggatgagagggaagaggatgtcgtattcagtttcgacaaggtgttctatgaagatgcccaacagtctgacgtctacaacttccttgcagtccccattgtttcagatgccatcaatggaataaatgggactataattacttacggtcagaccggggcaggaaagacgtacagcatggaggtggagatatatttggaaaaggtgagggaccttcttgacttgtccaaagacaacctgcagatcaaggaaagtaaaacccaaggaatttacatttctggagcaacagagatatctatcctcaacagttcagatgccttggagaacctttctcaaggaattgccaacagagctgttggggaaacacaaatgaacctggctagcagtagaagtcactgcttatacattttctcagtacaatatggatgcacttcagatgagagggtaacaacagggaagattatacttgttgacttggctggttctgagaaagttgagaaaactggtgctgaaggacgggttcttgatgaggcaaagacaatcaacaaatccctctcagctctaggaaatgtcatcaatgccttaacgactggtaaacagaatcatgtgcctttccgtgactcaaaacttacgcgcattcttcaagattcgttgggtggcaactcaagagcggcattgctgtgttgctgttctccgagcccatcgaatgcagcagagagtctgtccacgcttcgctttggaaccaggacaaagctcataaaggctcctccgaaattgattcctgagtcagtggataacaccaagaagcccgccgtcgagactcatgatcaagatgatctgcgggacaggatactgagcaagctaaggttgagcctgaaggaggaggatgtggatttgttagaagaactgttcgtgcaggaaggcatcatcttcgatgccagttccgtcgtggacatcgactcggtgttccgggacactgcaagcgaggagatctcgttgctgatgcaagccgtcgaggagctcaaagaaactgtggaagagctcacggacgagaacgaaaagctaagacgtagcctccaagtcgcacaggagatgaccactcaggcccagctcgccgccgccgccgccgtcgctggagctgcccggagccgtactctgcttgatttcgtgccggcagtcctcttccggccatttgggtttgtaccagagtgacgacagggtcaatgcccattgtcctgtgaggctgtgaagaaccatacacttgggatatagtagatcacgaccatggtggtacacagtatataatagttgcaatacagatactagactactgatatccttggaacttcagtctgtttgaaatacggcgagaatactgatagctatgtcatgtgtatcggatatttttcgtttttttgtgtgctggaagtgtctactccgtagttgtttttgaggattcgcctcttccccctttcaaagtactgatgaattgtcgtttttctttttaataacagaactttaagttgacttc

SEQ ID NO: 57212 - DNA, 1756 bp, Zea Mays
atgtccaacgtgaccgtgtgcgtgcggttccgaccgctgagccacaaggagaggaaggccaacggcgacaacgtctgcttcaagaggctggactcggagtcttttgttctcaaggatgagagggaagaggatgtcgtattcagtttcgacaaggtgttctatgaagatgcccaacagtctgacgtctacaacttccttgcagtccccattgtttcagatgccatcaatggaataaatgggactataattacttacggtcagaccggggcaggaaagacgtacagcatggagggcccaagcatattgcattgcaatgaacagaaaactggactagtacagcgagttgtggatgagctttttatatgtttaggatcatcagcaagcacgtggactgtgaagttgtcaatggtggagatatatttggaaaaggtgagggaccttcttgacttgtccaaagacaacctgcagatcaaggaaagtaaaacccaaggaatttacatttctggagcaacagagatatctatcctcaacagttcagatgccttggagaacctttctcaaggaattgccaacagagctgttggggaaacacaaatgaacctggctagcagtagaagtcactgcttatacattttctcagtacaatatggatgcacttcagatgagagggtaacaacagggaagattatacttgttgacttggctggttctgagaaagttgagaaaactggtgctgaaggacgggttcttgatgaggcaaagacaatcaacaaatccctctcagctctaggaaatgtcatcaatgccttaacgactggtaaacagaatcatgtgcctttccgtgactcaaaacttacgcgcattcttcaagattcgttgggtggcaactcaagagcggcattgctgtgttgctgttctccgagcccatcgaatgcagcagagagtctgtccacgcttcgctttggaaccaggacaaagctcataaaggctcctccgaaattgattcctgagtcagtggataacaccaagaagcccgccgtcgagactcatgatcaagatgatctgcgggacaggatactgagcaagctaaggttgagcctgaaggaggaggatgtggatttgttagaagaactgttcgtgcaggaaggcatcatcttcgatgccagttccgtcgtggacatcgactcggtgttccgggacactgcaagcgaggagatctcgttgctgatgcaagccgtcgaggagctcaaagaaactgtggaagagctcacggacgagaacgaaaagctaagacgtagcctccaagtcgcacaggagatgaccactcaggcccagctcgccgccgccgccgccgtcgctggagctgcccggagccgtactctgcttgatttcgtgccggcagtcctcttccggccatttgggtttgtaccagagtgacgacagggtcaatgcccattgtcctgtgaggctgtgaagaaccatacacttgggatatagtagatcacgaccatggtggtacacagtatataatagttgcaatacagatactagactactgatatccttggaacttcagtctgtttgaaatacggcgagaatactgatagctatgtcatgtgtatcggatatttttcgtttttttgtgtgctggaagtgtctactccgtagttgtttttgaggattcgcctcttccccctttcaaagtactgatgaattgtcgtttttctttttaataacagaactttaagttgacttc

SEQ ID NO: 57213 - DNA, 3192 bp, Zea Mays
atgtccaacgtgaccgtgtgcgtgcggttccgaccgctgagccacaaggagaggaaggccaacggcgacaacgtctgcttcaagaggctggactcggagtcttttgttctcaaggatgagagggaagaggatgtcgtattcagtttcgacaaggtgttctatgaagatgcccaacagtctgacgtctacaacttccttgcagtccccattgtttcagatgccatcaatggaataaatgggactataattacttacggtcagaccggggcaggaaagacgtacagcatggagggcccaagcatattgcattgcaatgaacagaaaactggactagtacagcgagttgtggatgagctttttatatgtttaggatcatcagcaagcacgtggactgtgaagttgtcaatggtggagatatatttggaaaaggtgagggaccttcttgacttgtccaaagacaacctgcagatcaaggaaagtaaaacccaaggaatttacatttctggagcaacagagatatctatcctcaacagttcagatgccttggagaacctttctcaaggaattgccaacagagctgttggggaaacacaaatgaacctggctagcagtagaagtcactgcttatacattttctcagtacaatatggatgcacttcagatgagagggtaacaacagggaagattatacttgttgacttggctggttctgagaaagttgagaaaactggtgctgaaggacgggttcttgatgaggcaaagacaatcaacaaatccctctcagctctaggaaatgtcatcaatgccttaacgactggtaaacagaatcatgtgcctttccgtgactcaaaacttacgcgcattcttcaagattcgttgggtggcaactcaagagcggcattgctgtgttgctgttctccgagcccatcgaatgcagcagagagtctgtccacgcttcgctttggaaccaggcatgccagtcaaccagtttcacacctgtaccgcattgttctcataaaggctcctccgaaattgattcctgagtcagtggataacaccaagaagcccgccgtcgagactcatgatcaagatgatctgcgggacaggatactgagcaagctaaggttgagcctgaaggaggaggatgtggatttgttagaagaactgttcgtgcaggaaggcatcatcttcgatgccagttccgtcgtggacatcgactcggtgttccgggacactgcaagcgaggagatctcgttgctgatgcaagccgtcgaggagctcaaagaaactgtggaagagctcacggacgagaacgaaaagctaagacgtagcctccaagtcgcacaggagatgaccactcaggcccagctcgccgccgccgccgccgtcgctggagctgcccggagccgtactctgcttgatttcgtgccggcagtcctcttccggccatttggaaaactaaaaatattcgtcggttcatctactgggcaggatgcacacgtggctccgcatccaaccgttcctgggtcgcacagcccatcccgccgcgccgtctccctctcgccccaaacccctctcctcctctctttctctatccacctttccaccgtcaccatggccaccgccactacgtccgcctatcattgcaacgccgtcctccaccttcccagacctccgcagttccgccggctcctgccccctctcccctccctcgtcacccgcagagccgcgagcgtcgggctgggggtcgcccgtctcggttcgagggcgagggcaagggcaagttccgtaccgccaccgccaccattttttgaaaccgtggaggaggaggaggaggaggaggaggagcgtgggtggtcggatgcggaggcgggattcagtgacgaggcagaggatgagcaggagtggtcgggcggcaacggcgcggcgcgcggggaggacctgggcgcggacgccggcgaggaccttagcgggtgggcgcggcagtggccgcgcccgcgggagctgttcgtgtgcaacctcccgcgccgctgcgacgtccaggacctgctcgagctcttcacgccccacggcaccgtcctctccgtcgagatctcacgcgatgccgagtccggaattagccgaggaacggcttctgtgacgatgcgatctctagcagaagctcgggcagccatcgacgctctggatggattcgacatggatgggcgtgaggttttcgtgaagctagcgtccgacgtcatttccaacaggaaaaacgtgaacctggcccacataacgcccacgaaggaccacatcttcgagaccccgcacaaggtctacgtcggcaacctcgcgtggtctgttcagccgcaagacctgagagagctctttacccagtgcggaaccgttgttagcacgaggctgctgacggaccgcaaagggggcaggaaccgagtctatgggttcctctcgttttcttccgcccaagagcttgaggaagcgttaaagctcgacagaacggtcttcttcggacgggatatcgtagtgaaggaagcccatgtagagcgccagacgcgctgagccgctgagtgttacccttgagaactgcactttttttgtctgcctcgttgactgactaagctcatgctccaggcacaagctacacagctgacgaagaagcaattgagcggttcatcgcgaaagagttaaaaaaaaaaacggtagtgtaaattagtaccattgctgcaactttgtcagcgccgccgtggatgctggtgtgagaaattctaggacgaactgagaactggtattgtagtggtaatacatgttgttttagcttcttataataccctccatacagtaatagtgctccttcaccacacgtttctaatgtctcgaatttttgtttgtgaaagggattctaattgagttggtcagattgtagaagacccggctctggttgtggtttgctgcacttctaaggctatctctagcaatctattcatctccatctctcatttcaaactttactattttaaacttgcaatatatagtgtaaaacaatgttttgcatgattatatgtacaatttagttatagtctaataccctaatatcttcaagtacacaaaggtcctgtgagttgttagatggcttgagtagaagtccggtattggtggtagtcgttctctgtagtttcctgtacatagacgtgg

SEQ ID NO: 57214 - DNA, 3042 bp, Zea Mays
atgtccaacgtgaccgtgtgcgtgcggttccgaccgctgagccacaaggagaggaaggccaacggcgacaacgtctgcttcaagaggctggactcggagtcttttgttctcaaggatgagagggaagaggatgtcgtattcagtttcgacaaggtgttctatgaagatgcccaacagtctgacgtctacaacttccttgcagtccccattgtttcagatgccatcaatggaataaatgggactataattacttacggtcagaccggggcaggaaagacgtacagcatggaggtggagatatatttggaaaaggtgagggaccttcttgacttgtccaaagacaacctgcagatcaaggaaagtaaaacccaaggaatttacatttctggagcaacagagatatctatcctcaacagttcagatgccttggagaacctttctcaaggaattgccaacagagctgttggggaaacacaaatgaacctggctagcagtagaagtcactgcttatacattttctcagtacaatatggatgcacttcagatgagagggtaacaacagggaagattatacttgttgacttggctggttctgagaaagttgagaaaactggtgctgaaggacgggttcttgatgaggcaaagacaatcaacaaatccctctcagctctaggaaatgtcatcaatgccttaacgactggtaaacagaatcatgtgcctttccgtgactcaaaacttacgcgcattcttcaagattcgttgggtggcaactcaagagcggcattgctgtgttgctgttctccgagcccatcgaatgcagcagagagtctgtccacgcttcgctttggaaccaggacaaagctcataaaggctcctccgaaattgattcctgagtcagtggataacaccaagaagcccgccgtcgagactcatgatcaagatgatctgcgggacaggatactgagcaagctaaggttgagcctgaaggaggaggatgtggatttgttagaagaactgttcgtgcaggaaggcatcatcttcgatgccagttccgtcgtggacatcgactcggtgttccgggacactgcaagcgaggagatctcgttgctgatgcaagccgtcgaggagctcaaagaaactgtggaagagctcacggacgagaacgaaaagctaagacgtagcctccaagtcgcacaggagatgaccactcaggcccagctcgccgccgccgccgccgtcgctggagctgcccggagccgtactctgcttgatttcgtgccggcagtcctcttccggccatttggaaaactaaaaatattcgtcggttcatctactgggcaggatgcacacgtggctccgcatccaaccgttcctgggtcgcacagcccatcccgccgcgccgtctccctctcgccccaaacccctctcctcctctctttctctatccacctttccaccgtcaccatggccaccgccactacgtccgcctatcattgcaacgccgtcctccaccttcccagacctccgcagttccgccggctcctgccccctctcccctccctcgtcacccgcagagccgcgagcgtcgggctgggggtcgcccgtctcggttcgagggcgagggcaagggcaagttccgtaccgccaccgccaccattttttgaaaccgtggaggaggaggaggaggaggaggaggagcgtgggtggtcggatgcggaggcgggattcagtgacgaggcagaggatgagcaggagtggtcgggcggcaacggcgcggcgcgcggggaggacctgggcgcggacgccggcgaggaccttagcgggtgggcgcggcagtggccgcgcccgcgggagctgttcgtgtgcaacctcccgcgccgctgcgacgtccaggacctgctcgagctcttcacgccccacggcaccgtcctctccgtcgagatctcacgcgatgccgagtccggaattagccgaggaacggcttctgtgacgatgcgatctctagcagaagctcgggcagccatcgacgctctggatggattcgacatggatgggcgtgaggttttcgtgaagctagcgtccgacgtcatttccaacaggaaaaacgtgaacctggcccacataacgcccacgaaggaccacatcttcgagaccccgcacaaggtctacgtcggcaacctcgcgtggtctgttcagccgcaagacctgagagagctctttacccagtgcggaaccgttgttagcacgaggctgctgacggaccgcaaagggggcaggaaccgagtctatgggttcctctcgttttcttccgcccaagagcttgaggaagcgttaaagctcgacagaacggtcttcttcggacgggatatcgtagtgaaggaagcccatgtagagcgccagacgcgctgagccgctgagtgttacccttgagaactgcactttttttgtctgcctcgttgactgactaagctcatgctccaggcacaagctacacagctgacgaagaagcaattgagcggttcatcgcgaaagagttaaaaaaaaaaacggtagtgtaaattagtaccattgctgcaactttgtcagcgccgccgtggatgctggtgtgagaaattctaggacgaactgagaactggtattgtagtggtaatacatgttgttttagcttcttataataccctccatacagtaatagtgctccttcaccacacgtttctaatgtctcgaatttttgtttgtgaaagggattctaattgagttggtcagattgtagaagacccggctctggttgtggtttgctgcacttctaaggctatctctagcaatctattcatctccatctctcatttcaaactttactattttaaacttgcaatatatagtgtaaaacaatgttttgcatgattatatgtacaatttagttatagtctaataccctaatatcttcaagtacacaaaggtcctgtgagttgttagatggcttgagtagaagtccggtattggtggtagtcgttctctgtagtttcctgtacatagacgtgg

SEQ ID NO: 57215 - DNA, 3154 bp, Zea Mays
atgtccaacgtgaccgtgtgcgtgcggttccgaccgctgagccacaaggagaggaaggccaacggcgacaacgtctgcttcaagaggctggactcggagtcttttgttctcaaggatgagagggaagaggatgtcgtattcagtttcgacaaggtgttctatgaagatgcccaacagtctgacgtctacaacttccttgcagtccccattgtttcagatgccatcaatggaataaatgggactataattacttacggtcagaccggggcaggaaagacgtacagcatggagggcccaagcatattgcattgcaatgaacagaaaactggactagtacagcgagttgtggatgagctttttatatgtttaggatcatcagcaagcacgtggactgtgaagttgtcaatggtggagatatatttggaaaagggaccttcttgacttgtccaaagacaacctgcagatcaaggaaagtaaaacccaaggaatttacatttctggagcaacagagatatctatcctcaacagttcagatgccttggagaacctttctcaaggaattgccaacagagctgttggggaaacacaaatgaacctggctagcagtagaagtcactgcttatacattttctcagtacaatatggatgcacttcagatgagagggtaacaacagggaagattatacttgttgacttggctggttctgagaaagttgagaaaactggtgctgaaggacgggttcttgatgaggcaaagacaatcaacaaatccctctcagctctaggaaatgtcatcaatgccttaacgactggtaaacagaatcatgtgcctttccgtgactcaaaacttacgcgcattcttcaagattcgttgggtggcaactcaagagcggcattgctgtgttgctgttctccgagcccatcgaatgcagcagagagtctgtccacgcttcgctttggaaccaggacaaagctcataaaggctcctccgaaattgattcctgagtcagtggataacaccaagaagcccgccgtcgagactcatgatcaagatgatctgcgggacaggatactgagcaagctaaggttgagcctgaaggaggaggatgtggatttgttagaagaactgttcgtgcaggaaggcatcatcttcgatgccagttccgtcgtggacatcgactcggtgttccgggacactgcaagcgaggagatctcgttgctgatgcaagccgtcgaggagctcaaagaaactgtggaagagctcacggacgagaacgaaaagctaagacgtagcctccaagtcgcacaggagatgaccactcaggcccagctcgccgccgccgccgccgtcgctggagctgcccggagccgtactctgcttgatttcgtgccggcagtcctcttccggccatttggaaaactaaaaatattcgtcggttcatctactgggcaggatgcacacgtggctccgcatccaaccgttcctgggtcgcacagcccatcccgccgcgccgtctccctctcgccccaaacccctctcctcctctctttctctatccacctttccaccgtcaccatggccaccgccactacgtccgcctatcattgcaacgccgtcctccaccttcccagacctccgcagttccgccggctcctgccccctctcccctccctcgtcacccgcagagccgcgagcgtcgggctgggggtcgcccgtctcggttcgagggcgagggcaagggcaagttccgtaccgccaccgccaccattttttgaaaccgtggaggaggaggaggaggaggaggaggagcgtgggtggtcggatgcggaggcgggattcagtgacgaggcagaggatgagcaggagtggtcgggcggcaacggcgcggcgcgcggggaggacctgggcgcggacgccggcgaggaccttagcgggtgggcgcggcagtggccgcgcccgcgggagctgttcgtgtgcaacctcccgcgccgctgcgacgtccaggacctgctcgagctcttcacgccccacggcaccgtcctctccgtcgagatctcacgcgatgccgagtccggaattagccgaggaacggcttctgtgacgatgcgatctctagcagaagctcgggcagccatcgacgctctggatggattcgacatggatgggcgtgaggttttcgtgaagctagcgtccgacgtcatttccaacaggaaaaacgtgaacctggcccacataacgcccacgaaggaccacatcttcgagaccccgcacaaggtctacgtcggcaacctcgcgtggtctgttcagccgcaagacctgagagagctctttacccagtgcggaaccgttgttagcacgaggctgctgacggaccgcaaagggggcaggaaccgagtctatgggttcctctcgttttcttccgcccaagagcttgaggaagcgttaaagctcgacagaacggtcttcttcggacgggatatcgtagtgaaggaagcccatgtagagcgccagacgcgctgagccgctgagtgttacccttgagaactgcactttttttgtctgcctcgttgactgactaagctcatgctccaggcacaagctacacagctgacgaagaagcaattgagcggttcatcgcgaaagagttaaaaaaaaaaacggtagtgtaaattagtaccattgctgcaactttgtcagcgccgccgtggatgctggtgtgagaaattctaggacgaactgagaactggtattgtagtggtaatacatgttgttttagcttcttataataccctccatacagtaatagtgctccttcaccacacgtttctaatgtctcgaatttttgtttgtgaaagggattctaattgagttggtcagattgtagaagacccggctctggttgtggtttgctgcacttctaaggctatctctagcaatctattcatctccatctctcatttcaaactttactattttaaacttgcaatatatagtgtaaaacaatgttttgcatgattatatgtacaatttagttatagtctaataccctaatatcttcaagtacacaaaggtcctgtgagttgttagatggcttgagtagaagtccggtattggtggtagtcgttctctgtagtttcctgtacatagacgtgg

SEQ ID NO: 57216 - DNA, 3159 bp, Zea Mays
atgtccaacgtgaccgtgtgcgtgcggttccgaccgctgagccacaaggagaggaaggccaacggcgacaacgtctgcttcaagaggctggactcggagtcttttgttctcaaggatgagagggaagaggatgtcgtattcagtttcgacaaggtgttctatgaagatgcccaacagtctgacgtctacaacttccttgcagtccccattgtttcagatgccatcaatggaataaatgggactataattacttacggtcagaccggggcaggaaagacgtacagcatggagggcccaagcatattgcattgcaatgaacagaaaactggactagtacagcgagttgtggatgagctttttatatgtttaggatcatcagcaagcacgtggactgtgaagttgtcaatggtggagatatatttggaaaaggtgagggaccttcttgacttgtccaaagacaacctgcagatcaaggaaagtaaaacccaaggaatttacatttctggagcaacagagatatctatcctcaacagttcagatgccttggagaacctttctcaaggaattgccaacagagctgttggggaaacacaaatgaacctggctagcagtagaagtcactgcttatacattttctcagtacaatatggatgcacttcagatgagagggtaacaacagggaagattatacttgttgacttggctggttctgagaaagttgagaaaactggtgctgaaggacgggttcttgatgaggcaaagacaatcaacaaatccctctcagctctaggaaatgtcatcaatgccttaacgactggtaaacagaatcatgtgcctttccgtgactcaaaacttacgcgcattcttcaagattcgttgggtggcaactcaagagcggcattgctgtgttgctgttctccgagcccatcgaatgcagcagagagtctgtccacgcttcgctttggaaccaggacaaagctcataaaggctcctccgaaattgattcctgagtcagtggataacaccaagaagcccgccgtcgagactcatgatcaagatgatctgcgggacaggatactgagcaagctaaggttgagcctgaaggaggaggatgtggatttgttagaagaactgttcgtgcaggaaggcatcatcttcgatgccagttccgtcgtggacatcgactcggtgttccgggacactgcaagcgaggagatctcgttgctgatgcaagccgtcgaggagctcaaagaaactgtggaagagctcacggacgagaacgaaaagctaagacgtagcctccaagtcgcacaggagatgaccactcaggcccagctcgccgccgccgccgccgtcgctggagctgcccggagccgtactctgcttgatttcgtgccggcagtcctcttccggccatttggaaaactaaaaatattcgtcggttcatctactgggcaggatgcacacgtggctccgcatccaaccgttcctgggtcgcacagcccatcccgccgcgccgtctccctctcgccccaaacccctctcctcctctctttctctatccacctttccaccgtcaccatggccaccgccactacgtccgcctatcattgcaacgccgtcctccaccttcccagacctccgcagttccgccggctcctgccccctctcccctccctcgtcacccgcagagccgcgagcgtcgggctgggggtcgcccgtctcggttcgagggcgagggcaagggcaagttccgtaccgccaccgccaccattttttgaaaccgtggaggaggaggaggaggaggaggaggagcgtgggtggtcggatgcggaggcgggattcagtgacgaggcagaggatgagcaggagtggtcgggcggcaacggcgcggcgcgcggggaggacctgggcgcggacgccggcgaggaccttagcgggtgggcgcggcagtggccgcgcccgcgggagctgttcgtgtgcaacctcccgcgccgctgcgacgtccaggacctgctcgagctcttcacgccccacggcaccgtcctctccgtcgagatctcacgcgatgccgagtccggaattagccgaggaacggcttctgtgacgatgcgatctctagcagaagctcgggcagccatcgacgctctggatggattcgacatggatgggcgtgaggttttcgtgaagctagcgtccgacgtcatttccaacaggaaaaacgtgaacctggcccacataacgcccacgaaggaccacatcttcgagaccccgcacaaggtctacgtcggcaacctcgcgtggtctgttcagccgcaagacctgagagagctctttacccagtgcggaaccgttgttagcacgaggctgctgacggaccgcaaagggggcaggaaccgagtctatgggttcctctcgttttcttccgcccaagagcttgaggaagcgttaaagctcgacagaacggtcttcttcggacgggatatcgtagtgaaggaagcccatgtagagcgccagacgcgctgagccgctgagtgttacccttgagaactgcactttttttgtctgcctcgttgactgactaagctcatgctccaggcacaagctacacagctgacgaagaagcaattgagcggttcatcgcgaaagagttaaaaaaaaaaacggtagtgtaaattagtaccattgctgcaactttgtcagcgccgccgtggatgctggtgtgagaaattctaggacgaactgagaactggtattgtagtggtaatacatgttgttttagcttcttataataccctccatacagtaatagtgctccttcaccacacgtttctaatgtctcgaatttttgtttgtgaaagggattctaattgagttggtcagattgtagaagacccggctctggttgtggtttgctgcacttctaaggctatctctagcaatctattcatctccatctctcatttcaaactttactattttaaacttgcaatatatagtgtaaaacaatgttttgcatgattatatgtacaatttagttatagtctaataccctaatatcttcaagtacacaaaggtcctgtgagttgttagatggcttgagtagaagtccggtattggtggtagtcgttctctgtagtttcctgtacatagacgtgg

SEQ ID NO: 57217 - DNA, 2986 bp, Zea Mays
atgtccaacgtgaccgtgtgcgtgcggttccgaccgctgagccacaaggagaggaaggccaacggcgacaacgtctgcttcaagaggctggactcggagtcttttgttctcaaggatgagagggaagaggatgtcgtattcagtttcgacaaggtgttctatgaagatgcccaacagtctgacgtctacaacttccttgcagtccccattgtttcagatgccatcaatggaataaatgggactataattacttacggtcagaccggggcaggaaagacgtacagcatggaggtggagatatatttggaaaaggtgagggaccttcttgacttgtccaaagacaacctgcagatcaaggaaagtaaaacccaaggaatttacatttctggagcaacagagatatctatcctcaacagttcagatgccttggagaacctttctcaaggaattgccaacagagctgttggggaaacacaaatgaacctggctagcagtagaagtcactgcttatacattttctcagtacaatatggatgcacttcagatgagagggtaacaacagggaagattatacttgttgacttggctggttctgagaaagttgagaaaactggtgctgaaggacgggttcttgatgaggcaaagacaatcaacaaatccctctcagctctaggaaatgtcatcaatgccttaacgactggtaaacagaatcatgtgcctttccgtgactcaaaacttacgcgcattcttcaagattcgttgggtggcaactcaagagcggcattgctgtgttgctgttctccgagcccatcgaatgcagcagagagtctgtccacgcttcgctttggaaccaggcatgccagtcaaccagtttcacacctgtaccgcattgttctcataaaggctcctccgaaattgattcctgagtcagtggataacaccaagaagcccgccgtcgagactcatgatcaagatgatctgcgggacaggatactgagcaagctaaggttgagcctgaaggaggaggatgtggatttgttagaagaactgttcgtgcaggaaggcatcatcttcgatgccagttccgtcgtggacatcgactcggtgttccgggacactgcaagcgaggagatctcgttgctgatgcaagccgtcgaggagctcaaagaaactgtggaagaggcgttgcagctcacggacgagaacgaaaagctaagacgtagcctccaagtcgcacaggagatgaccactcaggcccagctcgccgccgccgccgccgtcgctggagctgcccggagccgtactctgcttgatttcgtgccggcagtcctcttccggccatttggaaaactaaaaatattcgtcggttcatctactgggcaggatgcacacgtggctccgcatccaaccgttcctgggtcgcacagcccatcccgccgcgccgtctccctctcgccccaaacccctctcctcctctctttctctatccacctttccaccgtcaccatggccaccgccactacgtccgcctatcattgcaacgccgtcctccaccttcccagacctccgcagttccgccggctcctgccccctctcccctccctcgtcacccgcagagccgcgagcgtcgggctgggggtcgcccgtctcggttcgagggcgagggcaagggcaagttccgtaccgccaccgccaccattttttgaaaccgtggaggaggaggaggaggaggaggaggagcgtgggtggtcggatgcggaggcgggattcagtgacgaggcagaggatgagcaggagtggtcgggcggcaacggcgcggcgcgcggggaggacctgggcgcggacgccggcgaggaccttagcgggtgggcgcggcagtggccgcgcccgcgggagctgttcgtgtgcaacctcccgcgccgctgcgacgtccaggacctgctcgagctcttcacgccccacggcaccgtcctctccgtcgagatctcacgcgatgccgagtccggaattagccgaggaacggcttctgtgacgatgcgatctctagcagaagctcgggcagccatcgacgctctggatggattcgacatggatgggcgtgaggttttcgtgaagctagcgtccgacgtcatttccaacaggaaaaacgtgaacctggcccacataacgcccacgaaggaccacatcttcgagaccccgcacaaggtctacgtcggcaacctcgcgtggtctgttcagccgcaagacctgagagagctctttacccagtgcggaaccgttgttagcacgaggctgctgacggaccgcaaagggggcaggaaccgagtctatgggttcctctcgttttcttccgcccaagagcttgaggaagcgttaaagctcgacagaacggtcttcttcggacgggatatcgtagtgaaggaagcccatgtagagcgccagacgcgctgagccgctgagtgttacccttgagaactgcactttttttgtctgcctcgttgactgactaagctcatgctccaggcacaagctacacagctgacgaagaagcaattgagcggttcatcgcgaaagagttaaaaaaaaaaacggtagtgtaaattagtaccattgctgcaactttgtcagcgccgccgtggatgctggtgtgagaaattctaggacgaactgagaactggtattgtagtgggattctaattgagttggtcagattgtagaagacccggctctggttgtggtttgctgcacttctaaggctatctctagcaatctattcatctccatctctcatttcaaactttactattttaaacttgcaatatatagtgtaaaacaatgttttgcatgattatatgtacaatttagttatagtctaataccctaatatcttcaagtacacaaaggtcctgtgagttgttagatggcttgagtagaagtccggtattggtggtagtcgttctctgtagtttcctgtacatagacgtgg

SEQ ID NO: 57218 - DNA, 3774 bp, Zea Mays
cagaagcaaccagagcagtaaaaaggctgagacacactgcaattgtggcccacgcctatctggttcgctactcttttcttcctctcctccggcgggccccggccccaaactagccaacggcggcgagatccagatccaccgcaccggacccggacccgcccaacgactccggccactttttacttactagccagcggcggcgaaatccagatctccatagcaccggacccggacccgcccgccccgctggaacaggatgttcggacttcaggcgagcggcgcggcggcctcgtgggtggtggggcggatgggcaccgacgcgcatctctacgacgaccccgacgacgcctccatccccgagctcctcgactcccgcttcgacgccgacaaggtcgacgccctcaagcgcctcctcgccctcatcgcgcagggcgtcgacgtcgcgcacctcttcccgcaggttgtcaagaatgtggcgtcgcagtcgctcgaggtcaagaagctcgtctacctctacctcctccactacgccgacaagcgccaaaacgaagcccttctttctattaacatcttccagaaggatttatcggatataaacccactggtgagggcttgggccttgcgcactatggctggcattagactacacgttgttgctccgcttgtgttggttgctatcaagaaatgtgccagggatccgtctgcgtatgtaaggaaatgtgctgcctacgcactttgtaagctgtgcgacttgattccagacgaaaatgcggctttggaggagatcgtggacaccttgttcagcgacaattcccctggagtagtaggagctgccgctgttgcatttaagtcggtctgtccaagttgtttaccgttagtatcaaaacatttccggaggctatgtgagaccctccctgatatcgaggaatggactcagatcgtcctcatcgagatcctcttgcgttatgtaatagccagacatgggttggtcaaggattctttactctttgcttcagatttaccgacagagattcatggcgttacagattcagatgctgttgctagcgtgcccacccaatctgattctatcgtcaatggggtttctgatactatatcaagcatcatgctgttccggcactacatcgaacaatgctcaggttcctctgatagagaaggcaataatttagaattatcgtctgtcaccgcaaacaacaacgatgatgtcacaattcttttgaaatgtacatcacctcttctatggagtcgaaatagtggagttgtacttgcagcagcaagtgtgcattggatcatggctcctattggggacatgaagaaaattgttggcccaattttgtttactctacggtcatctcctgatgcagcatatgtgatgcttggcaacatagtagtttttgtcaagacaatgccatcattgtttgccccgttttatgaggacttctttgtaaacacttcagatccgtaccagacgagggctttgaagcttgaaatactgaccactattgccacagagtcatctattccggccatttttgaagaatttcagaatcttttattagtaactcagttcacttagatggagaagatgctgttttggttcaagcaatcttgtcaatcaaagcaatagtgaaaatggatccagtatcccacgaaaaggtaattgtccgcttggttcgtggtttggacaaactcaaggaacctgcagcacgatccttgatcatttggatgtttggagagtatagcttcatgggggatctcactacaaagattgttcctcctgttctcaagtatcttgcgtggtccttcgttgctgaagtggtggaaacaaagcttcaaatcctaaattcttctgccaaggttataatgcgttgtacagaagaagacatggaagaattcaaaagcatagttgcatatgtcattgagttggctacgtgtgacttgaattatgatgttcgtgatcgtgctcgtttactatcaagactcttgccgtgctacatgactcaccaagggtcctcacatcaacctcagaatggtgatatctataaagagctagccaatcatatatttaatgggaagttgcagccaacatctcatccagcaagcaactatcgcatatatcttccaggttcactttcgcaggttgttcttcatgcagcccctggttatgcaccacttccaaagcctcaaagtatggaattaaaccataatgtcacggcagcaattagaggcaaggccaaactttctggaagtgactccgatgctgaatctggatcttcaacatatgagagcagctctgtttatgattcggagagtgaaggtgctggcctatcggacagggatactgttgaatcccatcaggctcaagaagataaccaggatgctccactggtacagatatatgatgctagtatacagcaaggccaggcaggtcaaaatactgaggaaaatttggcagatcttatcagtaccgatttgactgagttgatgtctaagtcagccttggaatcatggcttgatgaggctcctgctgagccagttgttcagaatttgacacagacatcgtctgccagagtttcttttacaaaccgcaactttgagcgaaaacctaaactgcacacattgttagacccatctggcagtaatggattaagcgttctatatgccttctcgcctgaggtttcacccagatcacgtttgctagtatgtgtagacctatattttgagaatgtcactacacagcagctaacagatataaccattgaatctgaagaggcttctagcagtgtggattttatagaccaaacatcagaaggatattcgggtgtccctactatcgttcctgtggaagggatacattcgttggccccacaacaaatggcaaagttggttcttcaggtccattttcatcaccatatcttgcctctaaagctgtctgtgttttgcaatgggaaaagacatccagcaaaacttcatcctgacattgcttatttcgttcgtccactacccatggacctaaatactttcctatgcaaggaaaaccaattgaggggaatgtttgagtatgcgaggaggtgcgctttcaaagatcatcttcagaagctaggtcacgaggacagtgcagagcacatcgataagaaccttcaggtggcccagagtgttgcttcaaaaatactgagcaatgctaatattcaccttgtctcaatggatatgccagtaaccttcagtgtcgatgacgcctctggcttgtgttggagattcagcggtgaaatcctgagcacttcaaaaccttgcctgattaccatcctggcggaagggcgtgcctctggtccgctggaccttgctgtgaaggtgaattctgaagatacggtgttcgccctgaatctcctgaacagagttgtggcgatcatagattgaggtgagcatgaaattgtacattatcaacaaatagaagaggtatttggcaagcgcgtgactatttgtaagaaagtcttgttgaataatagcatctccaatagctctaaaaaaagaattgtgaaatgattgagttttacagcttgatgtgaaaaaagtgagtataatggttgtgtactaagaataccagagaaaatcgaagagatgggtgtagtctttggatcggtggatcgtcgacattggtggcatacataaggaagtttgggttgaatggatttaataacatacgtcttgtatgtggttgatattttgatgcaaaaaagatcagggattacatgtccagat

SEQ ID NO: 57219 - DNA, 3883 bp, Zea Mays
taaaaaggctgagacacactgcaattgtggcccacgcctatctggttcgctactcttttcttcctctcctccggcgggccccggccccaaactagccaacggcggcgagatccagatccaccgcaccggacccggacccgcccaacgactccggccactttttacttactagccagcggcggcgaaatccagatctccatagcaccggacccggacccgcccgccccgctggaacaggatgttcggacttcaggcgagcggcgcggcggcctcgtgggtggtggggcggatgggcaccgacgcgcatctctacgacgaccccgacgacgcctccatccccgagctcctcgactcccgcttcgacgccgacaaggtcgacgccctcaagcgcctcctcgccctcatcgcgcagggcgtcgacgtcgcgcacctcttcccgcaggttgtcaagaatgtggcgtcgcagtcgctcgaggtcaagaagctcgtctacctctacctcctccactacgccgacaagcgccaaaacgaagcccttctttctattaacatcttccagaaggatttatcggatataaacccactggtgagggcttgggccttgcgcactatggctggcattagactacacgttgttgctccgcttgtgttggttgctatcaagaaatgtgccagggatccgtctgcgtatgtaaggaaatgtgctgcctacgcactttgtaagctgtgcgacttgattccagacgaaaatgcggctttggaggagatcgtggacaccttgttcagcgacaattcccctggagtagtaggagctgccgctgttgcatttaagtcggtctgtccaagttgtttaccgttagtatcaaaacatttccggaggctatgtgagaccctccctgatatcgaggaatggactcagatcgtcctcatcgagatcctcttgcgttatgtaatagccagacatgggttggtcaaggattctttactctttgcttcagatttaccgacagagattcatggcgttacagattcagatgctgttgctagcgtgcccacccaatctgattctatcgtcaatggggtttctgatactatatcaagcatcatgctgttccggcactacatcgaacaatgctcaggttcctctgatagagaaggcaataatttagaattatcgtctgtcaccgcaaacaacaacgatgatgtcacaattcttttgaaatgtacatcacctcttctatggagtcgaaatagtggagttgtacttgcagcagcaagtgtgcattggatcatggctcctattggggacatgaagaaaattgttggcccaattttgtttactctacggtcatctcctgatgcagcatatgtgatgcttggcaacatagtagtttttgtcaagacaatgccatcattgtttgccccgttttatgaggacttctttgtaaacacttcagatccgtaccagacgagggctttgaagcttgaaatactgaccactattgccacagagtcatctattccggccatttttgaagaatttcaggattacattaaagatccagataggaaatttgtagcagataccgttgcggctattgcattgtgtgcccagaaacttccctctattgccacttcttgcctcgagggacttttggcacttgtattttatgaatcttttattagtaactcagttcacttagatggagaagatgctgttttggttcaagcaatcttgtcaatcaaagcaatagtgaaaatggatccagtatcccacgaaaaggtaattgtccgcttggttcgtggtttggacaaactcaaggaacctgcagcacgatccttgatcatttggatgtttggagagtatagcttcatgggggatctcactacaaagattgttcctcctgttctcaagtatcttgcgtggtccttcgttgctgaagtggtggaaacaaagcttcaaatcctaaattcttctgccaaggttataatgcgttgtacagaagaagacatggaagaattcaaaagcatagttgcatatgtcattgagttggctacgtgtgacttgaattatgatgttcgtgatcgtgctcgtttactatcaagactcttgccgtgctacatgactcaccaagggtcctcacatcaacctcagaatggtgatatctataaagagctagccaatcatatatttaatgggaagttgcagccaacatctcatccagcaagcaactatcgcatatatcttccaggttcactttcgcaggttgttcttcatgcagcccctggttatgcaccacttccaaagcctcaaagtatggaattaaaccataatgtcacggcagcaattagaggcaaggccaaactttctggaagtgactccgatgctgaatctggatcttcaacatatgagagcagctctgtttatgattcggagagtgaaggtgctggcctatcggacagggatactgttgaatcccatcaggctcaagaagataaccaggatgctccactggtacagatatatgatgctagtatacagcaaggccaggcaggtcaaaatactgaggaaaatttggcagatcttatcagtaccgatttgactgagttgatgtctaagtcagccttggaatcatggcttgatgaggctcctgctgagccagttgttcagaatttgacacagacatcgtctgccagagtttcttttacaaaccgcaactttgagcgaaaacctaaactgcacacattgttagacccatctggcagtaatggattaagcgttctatatgccttctcgcctgaggtttcacccagatcacgtttgctagtatgtgtagacctatattttgagaatgtcactacacagcagctaacagatataaccattgaatctgaagaggcttctagcagtgtggattttatagaccaaacatcagaaggatattcgggtgtccctactatcgttcctgtggaagggatacattcgttggccccacaacaaatggcaaagttggttcttcaggtccattttcatcaccatatcttgcctctaaagctgtctgtgttttgcaatgggaaaagacatccagcaaaacttcatcctgacattgcttatttcgttcgtccactacccatggacctaaatactttcctatgcaaggaaaaccaattgaggggaatgtttgagtatgcgaggaggtgcgctttcaaagatcatcttcagaagctaggtcacgaggacagtgcagagcacatcgataagaaccttcaggtggcccagagtgttgcttcaaaaatactgagcaatgctaatattcaccttgtctcaatggatatgccagtaaccttcagtgtcgatgacgcctctggcttgtgttggagattcagcggtgaaatcctgagcacttcaaaaccttgcctgattaccatcctggcggaagggcgtgcctctggtccgctggaccttgctgtgaaggtgaattctgaagatacggtgttcgccctgaatctcctgaacagagttgtggcgatcatagattgaggtgagcatgaaattgtacattatcaacaaatagaagaggtatttggcaagcgcgtgactatttgtaagaaagtcttgttgaataatagcatctccaatagctctaaaaaaagaattgtgaaatgattgagttttacagcttgatgtgaaaaaagtgagtataatggttgtgtactaagaataccagagaaaatcgaagagatgggtgtagtctttggatcggtggatcgtcgacattggtggcatacataaggaagtttgggttgaatggatttaataacatacgtcttgtatgtggttgatattttgatgcaaaaaagatcagggattacatgtccagat

SEQ ID NO: 57220 - DNA, 3044 bp, Zea Mays
actcttttcttcctctcctccggcgggccccggccccaaactagccaacggcggcgagatccagatccaccgcaccggacccggacccgcccaacgactccggccactttttacttactagccagcggcggcgaaatccagatctccatagcaccggacccggacccgcccgccccgctggaacaggatgttcggacttcaggcgagcggcgcggcggcctcgtgggtggtggggcggatgggcaccgacgcgcatctctacgacgaccccgacgacgcctccatccccgagctcctcgactcccgcttcgacgccgacaaggtcgacgccctcaagcgcctcctcgccctcatcgcgcagggcgtcgacgtcgcgcacctcttcccgcaggttgtcaagaatgtggcgtcgcagtcgctcgaggtcaagaagctcgtctacctctacctcctccactacgccgacaaatgcttggcaacatagtagtttttgtcaagacaatgccatcattgtttgccccgttttatgaggacttctttgtaaacacttcagatccgtaccagacgagggctttgaagcttgaaatactgaccactattgccacagagtcatctattccggccatttttgaagaatttcaggattacattaaagatccagataggaaatttgtagcagataccgttgcggctattgcattgtgtgcccagaaacttccctctattgccacttcttgcctcgagggacttttggcacttgtattttatgaatcttttattagtaactcagttcacttagatggagaagatgctgttttggttcaagcaatcttgtcaatcaaagcaatagtgaaaatggatccagtatcccacgaaaaggtaattgtccgcttggttcgtggtttggacaaactcaaggaacctgcagcacgatccttgatcatttggatgtttggagagtatagcttcatgggggatctcactacaaagattgttcctcctgttctcaagtatcttgcgtggtccttcgttgctgaagtggtggaaacaaagcttcaaatcctaaattcttctgccaaggtatatcctaaattagcgttccaatatcttatctggagattggtaatagctttattttttgtcaggttataatgcgttgtacagaagaagacatggaagaattcaaaagcatagttgcatatgtcattgagttggctacgtgtgacttgaattatgatgttcgtgatcgtgctcgtttactatcaagactcttgccgtgctacatgactcaccaagggtcctcacatcaacctcagaatggtgatatctataaagagctagccaatcatatatttaatgggaagttgcagccaacatctcatccagcaagcaactatcgcatatatcttccaggttcactttcgcaggttgttcttcatgcagcccctggttatgcaccacttccaaagcctcaaagtatggaattaaaccataatgtcacggcagcaattagaggcaaggccaaactttctggaagtgactccgatgctgaatctggatcttcaacatatgagagcagctctgtttatgattcggagagtgaaggtgctggcctatcggacagggatactgttgaatcccatcaggctcaagaagataaccaggatgctccactggtacagatatatgatgctagtatacagcaaggccaggcaggtcaaaatactgaggaaaatttggcagatcttatcagtaccgatttgactgagttgatgtctaagtcagccttggaatcatggcttgatgaggctcctgctgagccagttgttcagaatttgacacagacatcgtctgccagagtttcttttacaaaccgcaactttgagcgaaaacctaaactgcacacattgttagacccatctggcagtaatggattaagcgttctatatgccttctcgcctgaggtttcacccagatcacgtttgctagtatgtgtagacctatattttgagaatgtcactacacagcagctaacagatataaccattgaatctgaagaggcttctagcagtgtggattttatagaccaaacatcagaaggatattcgggtgtccctactatcgttcctgtggaagggatacattcgttggccccacaacaaatggcaaagttggttcttcaggtccattttcatcaccatatcttgcctctaaagctgtctgtgttttgcaatgggaaaagacatccagcaaaacttcatcctgacattgcttatttcgttcgtccactacccatggacctaaatactttcctatgcaaggaaaaccaattgaggggaatgtttgagtatgcgaggaggtgcgctttcaaagatcatcttcagaagctaggtcacgaggacagtgcagagcacatcgataagaaccttcaggtggcccagagtgttgcttcaaaaatactgagcaatgctaatattcaccttgtctcaatggatatgccagtaaccttcagtgtcgatgacgcctctggcttgtgttggagattcagcggtgaaatcctgagcacttcaaaaccttgcctgattaccatcctggcggaagggcgtgcctctggtccgctggaccttgctgtgaaggtgaattctgaagatacggtgttcgccctgaatctcctgaacagagttgtggcgatcatagattgaggtgagcatgaaattgtacattatcaacaaatagaagaggtatttggcaagcgcgtgactatttgtaagaaagtcttgttgaataatagcatctccaatagctctaaaaaaagaattgtgaaatgattgagttttacagcttgatgtgaaaaaagtgagtataatggttgtgtactaagaataccagagaaaatcgaagagatgggtgtagtctttggatcggtggatcgtcgacattggtggcatacataaggaagtttgggttgaatggatttaataacatacgtcttgtatgtggttgatattttgatgcaaaaaagatcagggattacatgtccagat

SEQ ID NO: 57221 - DNA, 3812 bp, Zea Mays
ctcttttcttcctctcctccggcgggccccggccccaaactagccaacggcggcgagatccagatccaccgcaccggacccggacccgcccaacgactccggccactttttacttactagccagcggcggcgaaatccagatctccatagcaccggacccggacccgcccgccccgctggaacaggatgttcggacttcaggcgagcggcgcggcggcctcgtgggtggtggggcggatgggcaccgacgcgcatctctacgacgaccccgacgacgcctccatccccgagctcctcgactcccgcttcgacgccgacaaggtcgacgccctcaagcgcctcctcgccctcatcgcgcagggcgtcgacgtcgcgcacctcttcccgcaggttgtcaagaatgtggcgtcgcagtcgctcgaggtcaagaagctcgtctacctctacctcctccactacgccgacaagcgccaaaacgaagcccttctttctattaacatcttccagaaggatttatcggatataaacccactggtgagggcttgggccttgcgcactatggctggcattagactacacgttgttgctccgcttgtgttggttgctatcaagaaatgtgccagggatccgtctgcgtatgtaaggaaatgtgctgcctacgcactttgtaagctgtgcgacttgattccagacgaaaatgcggctttggaggagatcgtggacaccttgttcagcgacaattcccctggagtagtaggagctgccgctgttgcatttaagtcggtctgtccaagttgtttaccgttagtatcaaaacatttccggaggctatgtgagaccctccctgatatcgaggaatggactcagatcgtcctcatcgagatcctcttgcgttatgtaatagccagacatgggttggtcaaggattctttactctttgcttcagatttaccgacagagattcatggcgttacagattcagatgctgttgctagcgtgcccacccaatctgattctatcgtcaatggggtttctgatactatatcaagcatcatgctgttccggcactacatcgaacaatgctcaggttcctctgatagagaaggcaataatttagaattatcgtctgtcaccgcaaacaacaacgatgatgtcacaattcttttgaaatgtacatcacctcttctatggagtcgaaatagtggagttgtacttgcagcagcaagtgtgcattggatcatggctcctattggggacatgaagaaaattgttggcccaattttgtttactctacggtcatctcctgatgcagcatatgtgatgcttggcaacatagtagtttttgtcaagacaatgccatcattgtttgccccgttttatgaggacttctttgtaaacacttcagatccgtaccagacgagggctttgaagcttgaaatactgaccactattgccacagagtcatctattccggccatttttgaagaatttcaggattacattaaagatccagataggaaatttgtagcagataccgttgcggctattgcattgtgtgcccagaaacttccctctattgccacttcttgcctcgagggacttttggcacttgtattttatgaatcttttattagtaactcagttcacttagatggagaagatgctgttttggttcaagcaatcttgtcaatcaaagcaatagtgaaaatggatccagtatcccacgaaaaggtaattgtccgcttggttcgtggtttggacaaactcaaggaacctgcagcacgatccttgatcatttggatgtttggagagtatagcttcatgggggatctcactacaaagattgttcctcctgttctcaagtatcttgcgtggtccttcgttgctgaagtggtggaaacaaagcttcaaatcctaaattcttctgccaagaagaagacatggaagaattcaaaagcatagttgcatatgtcattgagttggctacgtgtgacttgaattatgatgttcgtgatcgtgctcgtttactatcaagactcttgccgtgctacatgactcaccaagggtcctcacatcaacctcagaatggtgatatctataaagagctagccaatcatatatttaatgggaagttgcagccaacatctcatccagcaagcaactatcgcatatatcttccaggttcactttcgcaggttgttcttcatgcagcccctggttatgcaccacttccaaagcctcaaagtatggaattaaaccataatgtcacggcagcaattagaggcaaggccaaactttctggaagtgactccgatgctgaatctggatcttcaacatatgagagcagctctgtttatgattcggagagtgaaggtgctggcctatcggacagggatactgttgaatcccatcaggctcaagaagataaccaggatgctccactggtacagatatatgatgctagtatacagcaaggccaggcaggtcaaaatactgaggaaaatttggcagatcttatcagtaccgatttgactgagttgatgtctaagtcagccttggaatcatggcttgatgaggctcctgctgagccagttgttcagaatttgacacagacatcgtctgccagagtttcttttacaaaccgcaactttgagcgaaaacctaaactgcacacattgttagacccatctggcagtaatggattaagcgttctatatgccttctcgcctgaggtttcacccagatcacgtttgctagtatgtgtagacctatattttgagaatgtcactacacagcagctaacagatataaccattgaatctgaagaggcttctagcagtgtggattttatagaccaaacatcagaaggatattcgggtgtccctactatcgttcctgtggaagggatacattcgttggccccacaacaaatggcaaagttggttcttcaggtccattttcatcaccatatcttgcctctaaagctgtctgtgttttgcaatgggaaaagacatccagcaaaacttcatcctgacattgcttatttcgttcgtccactacccatggacctaaatactttcctatgcaaggaaaaccaattgaggggaatgtttgagtatgcgaggaggtgcgctttcaaagatcatcttcagaagctaggtcacgaggacagtgcagagcacatcgataagaaccttcaggtggcccagagtgttgcttcaaaaatactgagcaatgctaatattcaccttgtctcaatggatatgccagtaaccttcagtgtcgatgacgcctctggcttgtgttggagattcagcggtgaaatcctgagcacttcaaaaccttgcctgattaccatcctggcggaagggcgtgcctctggtccgctggaccttgctgtgaaggtgaattctgaagatacggtgttcgccctgaatctcctgaacagagttgtggcgatcatagattgaggtgagcatgaaattgtacattatcaacaaatagaagaggtatttggcaagcgcgtgactatttgtaagaaagtcttgttgaataatagcatctccaatagctctaaaaaaagaattgtgaaatgattgagttttacagcttgatgtgaaaaaagtgagtataatggttgtgtactaagaataccagagaaaatcgaagagatgggtgtagtctttggatcggtggatcgtcgacattggtggcatacataaggaagtttgggttgaatggatttaataacatacgtcttgtatgtggttgatattttgatgcaaaaaagatcagggattacatgtccagat

SEQ ID NO: 57222 - DNA, 2851 bp, Zea Mays
ctcttttcttcctctcctccggcgggccccggccccaaactagccaacggcggcgagatccagatccaccgcaccggacccggacccgcccaacgactccggccactttttacttactagccagcggcggcgaaatccagatctccatagcaccggacccggacccgcccgccccgctggaacaggatgttcggacttcaggcgagcggcgcggcggcctcgtgggtggtggggcggatgggcaccgacgcgcatctctacgacgaccccgacgacgcctccatccccgagctcctcgactcccgcttcgacgccgacaaggtcgacgccctcaagcgcctcctcgccctcatcgcgcagggcgtcgacgtcgcgcacctcttcccgcaggttgtcaagaatgtggcgtcgcagtcgctcgaggtcaagaagctcgtctacctctacctcctccactacgccgacaaatgcttggcaacatagtagtttttgtcaagacaatgccatcattgtttgccccgttttatgaggacttctttgtaaacacttcagatccgtaccagacgagggctttgaagcttgaaatactgaccactattgccacagagtcatctattccggccatttttgaagaatttcagaatcttttattagtaactcagttcacttagatggagaagatgctgttttggttcaagcaatcttgtcaatcaaagcaatagtgaaaatggatccagtatcccacgaaaaggtaattgtccgcttggttcgtggtttggacaaactcaaggaacctgcagcacgatccttgatcatttggatgtttggagagtatagcttcatgggggatctcactacaaagattgttcctcctgttctcaagtatcttgcgtggtccttcgttgctgaagtggtggaaacaaagcttcaaatcctaaattcttctgccaaggttataatgcgttgtacagaagaagacatggaagaattcaaaagcatagttgcatatgtcattgagttggctacgtgtgacttgaattatgatgttcgtgatcgtgctcgtttactatcaagactcttgccgtgctacatgactcaccaagggtcctcacatcaacctcagaatggtgatatctataaagagctagccaatcatatatttaatgggaagttgcagccaacatctcatccagcaagcaactatcgcatatatcttccaggttcactttcgcaggttgttcttcatgcagcccctggttatgcaccacttccaaagcctcaaagtatggaattaaaccataatgtcacggcagcaattagaggcaaggccaaactttctggaagtgactccgatgctgaatctggatcttcaacatatgagagcagctctgtttatgattcggagagtgaaggtgctggcctatcggacagggatactgttgaatcccatcaggctcaagaagataaccaggatgctccactggtacagatatatgatgctagtatacagcaaggccaggcaggtcaaaatactgaggaaaatttggcagatcttatcagtaccgatttgactgagttgatgtctaagtcagccttggaatcatggcttgatgaggctcctgctgagccagttgttcagaatttgacacagacatcgtctgccagagtttcttttacaaaccgcaactttgagcgaaaacctaaactgcacacattgttagacccatctggcagtaatggattaagcgttctatatgccttctcgcctgaggtttcacccagatcacgtttgctagtatgtgtagacctatattttgagaatgtcactacacagcagctaacagatataaccattgaatctgaagaggcttctagcagtgtggattttatagaccaaacatcagaaggatattcgggtgtccctactatcgttcctgtggaagggatacattcgttggccccacaacaaatggcaaagttggttcttcaggtccattttcatcaccatatcttgcctctaaagctgtctgtgttttgcaatgggaaaagacatccagcaaaacttcatcctgacattgcttatttcgttcgtccactacccatggacctaaatactttcctatgcaaggaaaaccaattgaggggaatgtttgagtatgcgaggaggtgcgctttcaaagatcatcttcagaagctaggtcacgaggacagtgcagagcacatcgataagaaccttcaggtggcccagagtgttgcttcaaaaatactgagcaatgctaatattcaccttgtctcaatggatatgccagtaaccttcagtgtcgatgacgcctctggcttgtgttggagattcagcggtgaaatcctgagcacttcaaaaccttgcctgattaccatcctggcggaagggcgtgcctctggtccgctggaccttgctgtgaaggtgaattctgaagatacggtgttcgccctgaatctcctgaacagagttgtggcgatcatagattgaggtgagcatgaaattgtacattatcaacaaatagaagaggtatttggcaagcgcgtgactatttgtaagaaagtcttgttgaataatagcatctccaatagctctaaaaaaagaattgtgaaatgattgagttttacagcttgatgtgaaaaaagtgagtataatggttgtgtactaagaataccagagaaaatcgaagagatgggtgtagtctttggatcggtggatcgtcgacattggtggcatacataaggaagtttgggttgaatggatttaataacatacgtcttgtatgtggttgatattttgatgcaaaaaagatcagggattacatgtccagat

SEQ ID NO: 57223 - DNA, 3644 bp, Zea Mays
atgttcggacttcaggcgagcggcgcggcggcctcgtgggtggtggggcggatgggcaccgacgcgcatctctacgacgaccccgacgacgcctccatccccgagctcctcgactcccgcttcgacgccgacaaggtcgacgccctcaagcgcctcctcgccctcatcgcgcagggcgtcgacgtcgcgcacctcttcccgcaggttgtcaagaatgtggcgtcgcagtcgctcgaggtcaagaagctcgtctacctctacctcctccactacgccgacaagcgccaaaacgaagcccttctttctattaacatcttccagaaggatttatcggatataaacccactggtgagggcttgggccttgcgcactatggctggcattagactacacgttgttgctccgcttgtgttggttgctatcaagaaatgtgccagggatccgtctgcgtatgtaaggaaatgtgctgcctacgcactttgtaagctgtgcgacttgattccagacgaaaatgcggctttggaggaggttttgtctagtataacccacaccttcttctctatgcagcaactctgcattccatatacgtatctcaagcctgccctgttgatgttgttgcagatcgtggacaccttgttcagcgacaattcccctggagtagtaggagctgccgctgttgcatttaagtcggtctgtccaagttgtttaccgttagtatcaaaacatttccggaggctatgtgagaccctccctgatatcgaggaatggactcagatcgtcctcatcgagatcctcttgcgttatgtaatagccagacatgggttggtcaaggattctttactctttgcttcagatttaccgacagagattcatggcgttacagattcagatgctgttgctagcgtgcccacccaatctgattctatcgtcaatggggtttctgatactatatcaagcatcatgctgttccggcactacatcgaacaatgctcaggttcctctgatagagaaggcaataatttagaattatcgtctgtcaccgcaaacaacaacgatgatgtcacaattcttttgaaatgtacatcacctcttctatggagtcgaaatagtggagttgtacttgcagcagcaagtgtgcattggatcatggctcctattggggacatgaagaaaattgttggcccaattttgtttactctacggtcatctcctgatgcagcatatgtgatgcttggcaacatagtagtttttgtcaagacaatgccatcattgtttgccccgttttatgaggacttctttgtaaacacttcagatccgtaccagacgagggctttgaagcttgaaatactgaccactattgccacagagtcatctattccggccatttttgaagaattacagaatcttttattagtaactcagttcacttagatggagaagatgctgttttggttcaagcaatcttgtcaatcaaagcaatagtgaaaatggatccagtatcccacgaaaaggtatgttgtaatgttcaatcatgcattagagctgtaattgtccgcttggttcgtggtttggacaaactcaaggaacctgcagcacgatccttgatcatttggatgtttggagagtatagcttcatgggggatctcactacaaagattgttcctcctgttctcaagtatcttgcgtggtccttcgttgctgaagtggtggaaacaaagcttcaaatcctaaattcttctgccaaggttataatgcgttgtacagaagaagacatggaagaattcaaaagcatagttgcatatgtcattgagttggctacgtgtgacttgaattatgatgttcgtgatcgtgctcgtttactatcaagactcttgccgtgctacatgactcaccaagggtcctcacatcaacctcagaatggtgatatctataaagagctagccaatcatatatttaatgggaagttgcagccaacatctcatccagcaagcaactatcgcatatatcttccaggttcactttcgcaggttgttcttcatgcagcccctggttatgcaccacttccaaagcctcaaagtatggaattaaaccataatgtcacggcagcaattagaggcaaggccaaactttctggaagtgactccgatgctgaatctggatcttcaacatatgagagcagctctgtttatgattcggagagtgaaggtgctggcctatcggacagggatactgttgaatcccatcaggctcaagaagataaccaggatgctccactggtacagatatatgatgctagtatacagcaaggccaggcaggtcaaaatactgaggaaaatttggcagatcttatcagtaccgatttgactgagttgatgtctaagtcagccttggaatcatggcttgatgaggctcctgctgagccagttgttcagaatttgacacagacatcgtctgccagagtttcttttacaaaccgcaactttgagcgaaaacctaaactgcacacattgttagacccatctggcagtaatggattaagcgttctatatgccttctcgcctgaggtttcacccagatcacgtttgctagtatgtgtagacctatattttgagaatgtcactacacagcagctaacagatataaccattgaatctgaagaggcttctagcagtgtggattttatagaccaaacatcagaaggatattcgggtgtccctactatcgttcctgtggaagggatacattcgttggccccacaacaaatggcaaagttggttcttcaggtccattttcatcaccatatcttgcctctaaagctgtctgtgttttgcaatgggaaaagacatccagcaaaacttcatcctgacattgcttatttcgttcgtccactacccatggacctaaatactttcctatgcaaggaaaaccaattgaggggaatgtttgagtatgcgaggaggtgcgctttcaaagatcatcttcagaagctaggtcacgaggacagtgcagagcacatcgataagaaccttcaggtggcccagagtgttgcttcaaaaatactgagcaatgctaatattcaccttgtctcaatggatatgccagtaaccttcagtgtcgatgacgcctctggcttgtgttggagattcagcggtgaaatcctgagcacttcaaaaccttgcctgattaccatcctggcggaagggcgtgcctctggtccgctggaccttgctgtgaaggtgaattctgaagatacggtgttcgccctgaatctcctgaacagagttgtggcgatcatagattgaggtgagcatgaaattgtacattatcaacaaatagaagaggtatttggcaagcgcgtgactatttgtaagaaagtcttgttgaataatagcatctccaatagctctaaaaaaagaattgtgaaatgattgagttttacagcttgatgtgaaaaaagtgagtataatggttgtgtactaagaataccagagaaaatcgaagagatgggtgtagtctttggatcggtggatcgtcgacattggtggcatacataaggaagtttgggttgaatggatttaataacatacgtcttgtatgtggttgatattttgatgcaaaaaagatcagggattacatgtccagat

SEQ ID NO: 57224 - DNA, 485 bp, Zea Mays
ggccaatgacatttccagattccataaaagaaccataagcagtgaagaggaagcagatccacactttacattgcagtagtaatagtagtacattacaggtagctaagcaaaagcaacatcactagccagatccattaattaatcgatccattgtttgggcgataatcacacacactcacacaccaaccattatgtgtttatccagaccctaggttgcagtcccggaacgaagaggccaaactgaattcaaatgagctagcgggtaaacaaaatgaaatcacggcggacgggagacgaagtcattacagacgaagagcgcgggggtggtggatcggcgaatcggagactcgagggagaagggacgggatcatttggcgacgatgcggaggatgaagtcgtcgtacttctcgccgatggaggtgaggacgtggcggaggtcggcgacggcgacggtgccggagccgtccttgtcgaggacgcggaag

SEQ ID NO: 57225 - DNA, 1566 bp, Zea Mays
tagtagcccttctagaactctcccatccggttcctaccgagttttccttccccacctccccgccccacccatcgccgaatcggagtcccgctcgcgtccacccttgccagagctcgagagctaccttctggtccggttggacagatcccttcgggcgcagcgtccccccgagattattcaggcaaggtgctgtaacataagatgcaagggggaagaggtgggaggcagggtttgttcggttttggggacccttttgttggtttcggcagctttggacagccagggaacataatgtccggtttctttggtggcgcaaatccctttgatgaccctttcttcacaaacccctttggtggcatgatgcaacctagtttctcaacccctttcagcggcatgatgcaacctagcttcatgaacccctttggtagcatgatgcaacctagcttgcttggatcaagtatgtttgcatcccatggcaatctcaatggaggcacttttggaagccagacacatctcaatcaaggcatgagcaatgccagtggtttcattcagcaagcctctgaatcgagcaggcctaaagggccaattatcaaggagttgtcttcagatgacgaggataaaccagaggatgataaagaagatggcaagaagaatggcaactttaggaagcatccaagggaaagcagagaaccgtgtgtggaggacccagatgaagaagaagaagaagataataaaagacctaaacatagacaatttgggagggagctcagcagatctggtacatcacgtctacagcctcagacatttatgtttcagagttcaactgttacatatggtggtccaaatggagcctgttatacatcttcaacgactaggaagactggtgcaaacggaatgagcttggtgggtttgaagaatcatggcaaagaaatgccaggcagaatatgcctggctgggatactagaatgaacatgcttggcaacggaaatcttcacacgggcttccgagatgcgaatcaaaggccagcacttcctgccccaggacgatcccgtaaagcgaattcctcatggaacttccagaatggctcttccacgggtcgtgcaccccgcacatgagttcttctgtgccatacgcaggatcacagtgctcagtaccggtcgcatccactattttgcagaaaaatgttgcaacccgagcgctcattcgaaagactactgtatagcttatgacagttttttaatattgaagagcttcactggagacaactgaaaatcagaagctttccttagtttgagcagttctatcctagtgctccaatcactgtagtttagtgctgcctaatatgttttgatgggaaggacaatttcttcatgaatgactcgccctagaatcatgtagcctcttgccaacagcttatacatccacatatttaaactctactctgcgaacacttgaaaagtcttatatggtggtatatggtggcatgagtatgtatgtttgtaatttttctttcagatgcattctagctgccaataagaccgtctgcagcagtctatctagagttta

SEQ ID NO: 57226 - DNA, 1896 bp, Zea Mays
tagtagcccttctagaactctcccatccggttcctaccgagttttccttccccacctccccgccccacccatcgccgaatcggagtcccgctcgcgtccacccttgccagagctcgagagctaccttctggtccggttggacagatcccttcgggcgcagcgtccccccgagattattcaggcaaggtgctgtaacataagatgcaagggggaagaggtgggaggcagggtttgttcggttttggggacccttttgttggtttcggcagctttggacagccagggaacataatgtccggtttctttggtggcgcaaatccctttgatgaccctttcttcacaaacccctttggtggcatgatgcaacctagtttctcaacccctttcagcggcatgatgcaacctagcttcatgaacccctttggtagcatgatgcaacctagcttgcttggatcaagtatgtttgcatcccatggcaatctcaatggaggcacttttggaagccagacacatctcaatcaaggcatgagcaatgccagtggtttcattcagcaagcctctgaatcgagcaggcctaaagggccaattatcaaggagttgtcttcagatgacgaggataaaccagaggatgataaagaagatggcaagaagaatggcaactttaggaagcatccaagggaaagcagagaaccgtgtgtggaggacccagatgaagaagaagaagaagataataaaagacctaaacatagacaatttgggagggagctcagcagatctggtacatcacgtctacagcctcagacatttatgtttcagagttcaactgttacatatggtggtccaaatggagcctgttatacatcttcaacgactaggaagactggtgcaaacggagtaagtatatatcatcatctcatgaatgtttttcttcatctgccgcagtttatcccttccccagaccccacacgtggaagctttggcactgggtctcccccttttttttgcatatttgtagggtgaagggcaggcctggtgaagtggtgagagttgtctcattgagtactcatattacactggaagaaagcaaggaggcagacacaactactggtaaagccacccacaggatctcacgtggcattggcattaagggtcactcgttaacaagaaaccttaactccgatggacgtgtgaacacccttcaaactttacacaacttgaatgaagatgagcttggtgggtttgaagaatcatggcaaagaaatgccaggcagaatatgcctggctgggatactagaatgaacatgcttggcaacggaaatcttcacacgggcttccgagatgcgaatcaaaggccagcacttcctgccccaggacgatcccgtaaagcgaattcctcatggaacttccagaatggctcttccacgggtcgtgcaccccgcacatgagttcttctgtgccatacgcaggatcacagtgctcagtaccggtcgcatccactattttgcagaaaaatgttgcaacccgagcgctcattcgaaagactactgtatagcttatgacagttttttaatattgaagagcttcactggagacaactgaaaatcagaagctttccttagtttgagcagttctatcctagtgctccaatcactgtagtttagtgctgcctaatatgttttgatgggaaggacaatttcttcatgaatgactcgccctagaatcatgtagcctcttgccaacagcttatacatccacatatttaaactctactctgcgaacacttgaaaagtcttatatggtggtatatggtggcatgagtatgtatgtttgtaatttttctttcagatgcattctagctgccaataagaccgtctgcagcagtctatctagagttta

SEQ ID NO: 57227 - DNA, 1916 bp, Zea Mays
tagtagcccttctagaactctcccatccggttcctaccgagttttccttccccacctccccgccccacccatcgccgaatcggagtcccgctcgcgtccacccttgccagagctcgagagctaccttctggtccggttggacagatcccttcgggcgcagcgtccccccgagattattcaggcaaggtgctgtaacataagatgcaagggggaagaggtgggaggcagggtttgttcggttttggggacccttttgttggtttcggcagctttggacagccagggaacataatgtccggtttctttggtggcgcaaatccctttgatgaccctttcttcacaaacccctttggtggcatgatgcaacctagtttctcaacccctttcagcggcatgatgcaacctagcttcatgaacccctttggtagcatgatgcaacctagcttgcttggatcaagtatgtttgcatcccatggcaatctcaatggaggcacttttggaagccagacacatctcaatcaaggcatgagcaatgccagtggtttcattcagcaagcctctgaatcgagcaggcctaaagggccaattatcaaggagttgtcttcagatgacgaggataaaccagaggatgataaagaagatggcaagaagaatggcaactttaggaagcatccaagggaaagcagagaaccgtgtgtggaggacccagatgaagaagaagaagaagataataaaagacctaaacatagacaatttgggagggagctcagcagatctggtacatcacgtctacagcctcagacatttatgtttcagagttcaactgttacatatggtggtccaaatggagcctgttatacatcttcaacgactaggaagactggtgcaaacggagtaagtatatatcatcatctcatgaatgtttttcttcatctgccgcagtttatcccttccccagaccccacacgtggaagctttggcactgggtctcccccttttttttgcatatttgtagggtgaagggcaggcctggtgaagtggtgagagttgtctcattgagtactcatgtgggagcctcccgcactggattacactggaagaaagcaaggaggcagacacaactactggtaaagccacccacaggatctcacgtggcattggcattaagggtcactcgttaacaagaaaccttaactccgatggacgtgtgaacacccttcaaactttacacaacttgaatgaagatgagcttggtgggtttgaagaatcatggcaaagaaatgccaggcagaatatgcctggctgggatactagaatgaacatgcttggcaacggaaatcttcacacgggcttccgagatgcgaatcaaaggccagcacttcctgccccaggacgatcccgtaaagcgaattcctcatggaacttccagaatggctcttccacgggtcgtgcaccccgcacatgagttcttctgtgccatacgcaggatcacagtgctcagtaccggtcgcatccactattttgcagaaaaatgttgcaacccgagcgctcattcgaaagactactgtatagcttatgacagttttttaatattgaagagcttcactggagacaactgaaaatcagaagctttccttagtttgagcagttctatcctagtgctccaatcactgtagtttagtgctgcctaatatgttttgatgggaaggacaatttcttcatgaatgactcgccctagaatcatgtagcctcttgccaacagcttatacatccacatatttaaactctactctgcgaacacttgaaaagtcttatatggtggtatatggtggcatgagtatgtatgtttgtaatttttctttcagatgcattctagctgccaataagaccgtctgcagcagtctatctagagttta

SEQ ID NO: 57228 - DNA, 850 bp, Zea Mays
aagggcaggcctggtgaagtgattacactggaagaaagcaaggaggcagacacaactactggtaaagccacccacaggatctcacgtggcattggcattaagggtcactcgttaacaagaaaccttaactccgatggacgtgtgaacacccttcaaactttacacaacttgaatgaagatgagcttggtgggtttgaagaatcatggcaaagaaatgccaggcagaatatgcctggctgggatactagaatgaacatgcttggcaacggaaatcttcacacgggcttccgagatgcgaatcaaaggccagcacttcctgccccaggacgatcccgtaaagcgaattcctcatggaacttccagaatggctcttccacgggtcgtgcaccccgcacatgagttcttctgtgccatacgcaggatcacagtgctcagtaccggtcgcatccactattttgcagaaaaatgttgcaacccgagcgctcattcgaaagactactgtatagcttatgacagttttttaatattgaagagcttcactggagacaactgaaaatcagaagctttccttagtttgagcagttctatcctagtgctccaatcactgtagtttagtgctgcctaatatgttttgatgggaaggacaatttcttcatgaatgactcgccctagaatcatgtagcctcttgccaacagcttatacatccacatatttaaactctactctgcgaacacttgaaaagtcttatatggtggtatatggtggcatgagtatgtatgtttgtaatttttctttcagatgcattctagctgccaataagaccgtctgcagcagtctatctagagttta

SEQ ID NO: 57229 - DNA, 1841 bp, Zea Mays
agataccattccggaagggacccagacgcagcctacacctgcacggctgcaccgcagggaggcgccatctgacccggccccggcggcgctggctgccccgtcgcccccagacccacccagaggaatcacgcagatattgccttcccccgtggcatgcacccaccgacccacatgcgcgcgcgcgcacccatcgggaattccggacccgattcgctttcctatttcattccactccacccgcttttgggtgtgtggacgatgcatggggagagagagagggagcgggagagtctcctcctcctccccgaccggagcgccggtgccatggaagggggcggcgagcaccaccacccgcttagcgtattcctccgggacgcgaggctcgcattcagatgggacgagctcggtcaggagatcatgaggatcgcggtgcccggcgcgctcgcgctcatggctgacccagtcgcctccctcgtcgacaccgccttcattggccacataggtccagttgaacttggagctgtaggtgtatcaattgccgtgtttaatcaggtctcaagaattgcagtgttcccacttgttagcgtcacaacatcatttgttgctgaggaggatgctatgtccaatggcagagacaatgacaaaatacatcaacaaaacgaacgcaatgtttcggtcagtgaaatggatgaactgattcctcctgaaggggctagtgccagtaccagcatatcgtcttttgaaactgattcatgtgaggtcagtgttgagcagaagaggaaaaatattccatcagtctctacagcactactacttggtggggtgcttggcctacttgaaaccctactgcttgttctctctgcaaaacctatcttaggctacatgggtgtaaaaccggactctgcgatgatgaagcccgcattgcagtacttagttctcagatctcttggtgctcctgctgttctgttatctctggcaatacaaggagtctttcgcggatttaaggatacaaagacgcctctatacgcaactgtggctggagatgcgatcaatatagttttggatccaatatttatgtttgtgttccaatatggtgttagtggtgccgccatcgctcatgttatatcacaatatttcattgcatccatactcttatggagattaaggttgcatgttgatttgttgccacctagcttcaaacatctgcagtttggccgatttcttaaaaatggttttctgctacttgcacgagttattgccgcaacttgttgtgtgacactatccgcttcaatggccgcacggctaggttcaactccaatggctgcattccagatctgcttgcaaacctggttggcttgctcacttcttgccgatggattggcttttgctggacaagccatacttgcaagtgcatttgctcgtaaggactatccgaaggccaccgccacagcttctcgtatcttgcagctggccttggtcttgggacttctcctaagcatacttcttggtgttggtctgcgcatagggtccagattatttacatccgatcagggtgtactgcatcatatctacataggaataccgtttgtctgccttactcaaccaatcaacgctctggcttttgtttttgatggtatcaattacggagcatcagatttcggatatgctgcctactcaatggtccttgttgccgttgtcagtatcatttgcatcctcactcttgaaagttatggcgggtttattggaatctggatagctctggtgatctacatgagcctccggatgtttgctggattttggagctgcagtgtggctgcttcgcgtatgttaacaatggtttt

SEQ ID NO: 57230 - DNA, 2530 bp, Zea Mays
agataccattccggaagggacccagacgcagcctacacctgcacggctgcaccgcagggaggcgccatctgacccggccccggcggcgctggctgccccgtcgcccccagacccacccagaggaatcacgcagatattgccttcccccgtggcatgcacccaccgacccacatgcgcgcgcgcgcacccatcgggaattccggacccgattcgctttcctatttcattccactccacccgcttttgggtgtgtggacgatgcatggggagagagagagggagcgggagagtctcctcctcctccccgaccggagcgccggtgccatggaagggggcggcgagcaccaccacccgcttagcgtattcctccgggacgcgaggctcgcattcagatgggacgagctcggtcaggagatcatgaggatcgcggtgcccggcgcgctcgcgctcatggctgacccagtcgcctccctcgtcgacaccgccttcattggccacataggtccagttgaacttggagctgtaggtgtatcaattgccgtgtttaatcaggtctcaagaattgcagtgttcccacttgttagcgtcacaacatcatttgttgctgaggaggatgctatgtccaatggcagagacaatgacaaaatacatcaacaaaacgaacgcaatgtttcggtcagtgaaatggatgaactgattcctcctgaaggggctagtgccagtaccagcatatcgtcttttgaaactgattcatgtgaggtcagtgttgagcagaagaggaaaaatattccatcagtctctacagcactactacttggtggggtgcttggcctacttgaaaccctactgcttgttctctctgcaaaacctatcttaggctacatgggtgtaaaaccggactctgcgatgatgaagcccgcattgcagtacttagttctcagatctcttggtgctcctgctgttctgttatctctggcaatacaaggagtctttcgcggatttaaggatacaaagacgcctctatacgcaactgtggctggagatgcgatcaatatagttttggatccaatatttatgtttgtgttccaatatggtgttagtggtgccgccatcgctcatgttatatcacaatatttcattgcatccatactcttatggagattaaggttgcatgttgatttgttgccacctagcttcaaacatctgcagtttggccgatttcttaaaaatggttttctgctacttgcacgagttattgccgcaacttgttgtgtgacactatccgcttcaatggccgcacggctaggttcaactccaatggctgcattccagatctgcttgcaaacctggttggcttgctcacttcttgccgatggattggcttttgctggacaaatgcatctcttatcttttggtttatttcttataaatcgggatcacacttcaacaggccatacttgcaagtgcatttgctcgtaaggactatccgaaggccaccgccacagcttctcgtatcttgcagctggccttggtcttgggacttctcctaagcatacttcttggtgttggtctgcgcatagggtccagattatttacatccgatcagggtgtactgcatcatatctacataggaataccgtttgtctgccttactcaaccaatcaacgctctggcttttgtttttgatggtatcaattacggagcatcagatttcggatatgctgcctactcaatggtccttgttgccgttgtcagtatcatttgcatcctcactcttgaaagttatggcgggtttattggaatctggatagctctggtgatctacatgagcctccggatgtttgctggattttggaggatagggacggcacaagggccctgggcttatcttcgcggctgaacatagaggcagagctagtaacctgactcaccagcacgacgagcacatggtttattattgttcacggaagtggcagtccttgatgtggtctcgtaaatatgccatacggactcagggtctttttggtttgctacctaacttgtcatactttgcctaacttttctgcttaaggttagttcttcaattcggacaactaaccttaggcaaagtgtgacgcagttagccacgagccaaacagtccctcagttcgtcaaacttaggtctgtgagtttggcggatgtgtaggcactcacatcgttaaacaaatctgttgtactggcctagattgtgacagatgcaaaattatgtcatggttggctactatgcgtagcagggctgcaatacatgtttccatcaggaaggctgtcacaagtttaacacacttgttgtaccaaggcgtgtgaactatagctattttttctgtcctaggacaaactgtgccacgacgtgttgtagctatttttctgtcccgtattcatatgagcagatacatggtcctgcaagtaacacatatatgtaactaaaaatggtgaggaccgttccatgtatgtactctgtgcttcctaacttttagggcccgttcggttgtac

SEQ ID NO: 57231 - DNA, 2701 bp, Zea Mays
agataccattccggaagggacccagacgcagcctacacctgcacggctgcaccgcagggaggcgccatctgacccggccccggcggcgctggctgccccgtcgcccccagacccacccagaggaatcacgcagatattgccttcccccgtggcatgcacccaccgacccacatgcgcgcgcgcgcacccatcgggaattccggacccgattcgctttcctatttcattccactccacccgcttttgggtgtgtggacgatgcatggggagagagagagggagcgggagagtctcctcctcctccccgaccggagcgccggtgccatggaagggggcggcgagcaccaccacccgcttagcgtattcctccgggacgcgaggctcgcattcagatgggacgagctcggtcaggagatcatgaggatcgcggtgcccggcgcgctcgcgctcatggctgacccagtcgcctccctcgtcgacaccgccttcattggccacataggtccagttgaacttggagctgtaggtgtatcaattgccgtgtttaatcaggtctcaagaattgcagtgttcccacttgttagcgtcacaacatcatttgttgctgaggaggatgctatgtccaatggcagagacaatgacaaaatacatcaacaaaacgaacgcaatgtttcggtcagtgaaatggatgaactgattcctcctgaaggggctagtgccagtaccagcatatcgtcttttgaaactgattcatgtgaggtcagtgttgagcagaagaggaaaaatattccatcagtctctacagcactactacttggtggggtgcttggcctacttgaaaccctactgcttgttctctctgcaaaacctatcttaggctacatgggtgtaaaaccggactctgcgatgatgaagcccgcattgcagtacttagttctcagatctcttggtgctcctgctgttctgttatctctggcaatacaaggagtctttcgcggatttaaggatacaaagacgcctctatacgcaactggtataataatatttcatttcttagatagtaaatgatatatacttggcaaattgaattctaaaagaaatcttcgacttcactctcatcatgactcagctttgatttgccattatttagttatataatgctaatagtttgtggcaatgtttcttggaaggatttctgtttttttctttatgtgtctaatggttttatgacaaccagtggctggagatgcgatcaatatagttttggatccaatatttatgtttgtgttccaatatggtgttagtggtgccgccatcgctcatgttatatcacatgtatggtggaacattctgcagatatttcattgcatccatactcttatggagattaaggttgcatgttgatttgttgccacctagcttcaaacatctgcagtttggccgatttcttaaaaatggttttctgctacttgcacgagttattgccgcaacttgttgtgtgacactatccgcttcaatggccgcacggctaggttcaactccaatggctgcattccagatctgcttgcaaacctggttggcttgctcacttcttgccgatggattggcttttgctggacaagccatacttgcaagtgcatttgctcgtaaggactatccgaaggccaccgccacagcttctcgtatcttgcagctggccttggtcttgggacttctcctaagcatacttcttggtgttggtctgcgcatagggtccagattatttacatccgatcagggtgtactgcatcatatctacataggaataccgtttgtctgccttactcaaccaatcaacgctctggcttttgtttttgatggtatcaattacggagcatcagatttcggatatgctgcctactcaatggtccttgttgccgttgtcagtatcatttgcatcctcactcttgaaagttatggcgggtttattggaatctggatagctctggtgatctacatgagcctccggatgtttgctggattttggaggatagggacggcacaagggccctgggcttatcttcgcggctgaacatagaggcagagctagtaacctgactcaccagcacgacgagcacatggtttattattgttcacggaagtggcagtccttgatgtggtctcgtaaatatgccatacggactcagggtctttttggtttgctacctaacttgtcatactttgcctaacttttctgcttaaggttagttcttcaattcggacaactaaccttaggcaaagtgtgacgcagttagccacgagccaaacagtccctcagttcgtcaaacttaggtctgtgagtttggcggatgtgtaggcactcacatcgttaaacaaatctgttgtactggcctagattgtgacagatgcaaaattatgtcatggttggctactatgcgtagcagggctgcaatacatgtttccatcaggaaggctgtcacaagtttaacacacttgttgtaccaaggcgtgtgaactatagctattttttctgtcctaggacaaactgtgccacgacgtgttgtagctatttttctgtcccgtattcatatgagcagatacatggtcctgcaagtaacacatatatgtaactaaaaatggtgaggaccgttccatgtatgtactctgtgcttcctaacttttagggcccgttcggttgtac

SEQ ID NO: 57232 - DNA, 2374 bp, Zea Mays
agataccattccggaagggacccagacgcagcctacacctgcacggctgcaccgcagggaggcgccatctgacccggccccggcggcgctggctgccccgtcgcccccagacccacccagaggaatcacgcagatattgccttcccccgtggcatgcacccaccgacccacatgcgcgcgcgcgcacccatcgggaattccggacccgattcgctttcctatttcattccactccacccgcttttgggtgtgtggacgatgcatggggagagagagagggagcgggagagtctcctcctcctccccgaccggagcgccggtgccatggaagggggcggcgagcaccaccacccgcttagcgtattcctccgggacgcgaggctcgcattcagatgggacgagctcggtcaggagatcatgaggatcgcggtgcccggcgcgctcgcgctcatggctgacccagtcgcctccctcgtcgacaccgccttcattggccacataggtccagttgaacttggagctgtaggtgtatcaattgccgtgtttaatcaggtctcaagaattgcagtgttcccacttgttagcgtcacaacatcatttgttgctgaggaggatgctatgtccaatggcagagacaatgacaaaatacatcaacaaaacgaacgcaatgtttcggtcagtgaaatggatgaactgattcctcctgaaggggctagtgccagtaccagcatatcgtcttttgaaactgattcatgtgaggtcagtgttgagcagaagaggaaaaatattccatcagtctctacagcactactacttggtggggtgcttggcctacttgaaaccctactgcttgttctctctgcaaaacctatcttaggctacatgggtgtaaaaccggactctgcgatgatgaagcccgcattgcagtacttagttctcagatctcttggtgctcctgctgttctgttatctctggcaatacaaggagtctttcgcggatttaaggatacaaagacgcctctatacgcaactgtggctggagatgcgatcaatatagttttggatccaatatttatgtttgtgttccaatatggtgttagtggtgccgccatcgctcatgttatatcacagttttctgctacttgcacgagttattgccgcaacttgttgtgtgacactatccgcttcaatggccgcacggctaggttcaactccaatggctgcattccagatctgcttgcaaacctggttggcttgctcacttcttgccgatggattggcttttgctggacaagccatacttgcaagtgcatttgctcgtaaggactatccgaaggccaccgccacagcttctcgtatcttgcagctggccttggtcttgggacttctcctaagcatacttcttggtgttggtctgcgcatagggtccagattatttacatccgatcagggtgtactgcatcatatctacataggaataccgtttgtctgccttactcaaccaatcaacgctctggcttttgtttttgatggtatcaattacggagcatcagatttcggatatgctgcctactcaatggtccttgttgccgttgtcagtatcatttgcatcctcactcttgaaagttatggcgggtttattggaatctggatagctctggtgatctacatgagcctccggatgtttgctggattttggaggatagggacggcacaagggccctgggcttatcttcgcggctgaacatagaggcagagctagtaacctgactcaccagcacgacgagcacatggtttattattgttcacggaagtggcagtccttgatgtggtctcgtaaatatgccatacggactcagggtctttttggtttgctacctaacttgtcatactttgcctaacttttctgcttaaggttagttcttcaattcggacaactaaccttaggcaaagtgtgacgcagttagccacgagccaaacagtccctcagttcgtcaaacttaggtctgtgagtttggcggatgtgtaggcactcacatcgttaaacaaatctgttgtactggcctagattgtgacagatgcaaaattatgtcatggttggctactatgcgtagcagggctgcaatacatgtttccatcaggaaggctgtcacaagtttaacacacttgttgtaccaaggcgtgtgaactatagctattttttctgtcctaggacaaactgtgccacgacgtgttgtagctatttttctgtcccgtattcatatgagcagatacatggtcctgcaagtaacacatatatgtaactaaaaatggtgaggaccgttccatgtatgtactctgtgcttcctaacttttagggcccgttcggttgtac

SEQ ID NO: 57233 - DNA, 2417 bp, Zea Mays
agataccattccggaagggacccagacgcagcctacacctgcacggctgcaccgcagggaggcgccatctgacccggccccggcggcgctggctgccccgtcgcccccagacccacccagaggaatcacgcagatattgccttcccccgtggcatgcacccaccgacccacatgcgcgcgcgcgcacccatcgggaattccggacccgattcgctttcctatttcattccactccacccgcttttgggtgtgtggacgatgcatggggagagagagagggagcgggagagtctcctcctcctccccgaccggagcgccggtgccatggaagggggcggcgagcaccaccacccgcttagcgtattcctccgggacgcgaggctcgcattcagatgggacgagctcggtcaggagatcatgaggatcgcggtgcccggcgcgctcgcgctcatggctgacccagtcgcctccctcgtcgacaccgccttcattggccacataggtccagttgaacttggagctgtaggtgtatcaattgccgtgtttaatcagagacaatgacaaaatacatcaacaaaacgaacgcaatgtttcggtcagtgaaatggatgaactgattcctcctgaaggggctagtgccagtaccagcatatcgtcttttgaaactgattcatgtgaggtcagtgttgagcagaagaggaaaaatattccatcagtctctacagcactactacttggtggggtgcttggcctacttgaaaccctactgcttgttctctctgcaaaacctatcttaggctacatgggtgtaaaaccggactctgcgatgatgaagcccgcattgcagtacttagttctcagatctcttggtgctcctgctgttctgttatctctggcaatacaaggagtctttcgcggatttaaggatacaaagacgcctctatacgcaactgtggctggagatgcgatcaatatagttttggatccaatatttatgtttgtgttccaatatggtgttagtggtgccgccatcgctcatgttatatcacatgtatggtggaacattctgcagatatttcattgcatccatactcttatggagattaaggttgcatgttgatttgttgccacctagcttcaaacatctgcagtttggccgatttcttaaaaatggttttctgctacttgcacgagttattgccgcaacttgttgtgtgacactatccgcttcaatggccgcacggctaggttcaactccaatggctgcattccagatctgcttgcaaacctggttggcttgctcacttcttgccgatggattggcttttgctggacaagccatacttgcaagtgcatttgctcgtaaggactatccgaaggccaccgccacagcttctcgtatcttgcagctggccttggtcttgggacttctcctaagcatacttcttggtgttggtctgcgcatagggtccagattatttacatccgatcagggtgtactgcatcatatctacataggaataccgtttgtctgccttactcaaccaatcaacgctctggcttttgtttttgatggtatcaattacggagcatcagatttcggatatgctgcctactcaatggtccttgttgccgttgtcagtatcatttgcatcctcactcttgaaagttatggcgggtttattggaatctggatagctctggtgatctacatgagcctccggatgtttgctggattttggaggatagggacggcacaagggccctgggcttatcttcgcggctgaacatagaggcagagctagtaacctgactcaccagcacgacgagcacatggtttattattgttcacggaagtggcagtccttgatgtggtctcgtaaatatgccatacggactcagggtctttttggtttgctacctaacttgtcatactttgcctaacttttctgcttaaggttagttcttcaattcggacaactaaccttaggcaaagtgtgacgcagttagccacgagccaaacagtccctcagttcgtcaaacttaggtctgtgagtttggcggatgtgtaggcactcacatcgttaaacaaatctgttgtactggcctagattgtgacagatgcaaaattatgtcatggttggctactatgcgtagcagggctgcaatacatgtttccatcaggaaggctgtcacaagtttaacacacttgttgtaccaaggcgtgtgaactatagctattttttctgtcctaggacaaactgtgccacgacgtgttgtagctatttttctgtcccgtattcatatgagcagatacatggtcctgcaagtaacacatatatgtaactaaaaatggtgaggaccgttccatgtatgtactctgtgcttcctaacttttagggcccgttcggttgtac

SEQ ID NO: 57234 - DNA, 2395 bp, Zea Mays
agataccattccggaagggacccagacgcagcctacacctgcacggctgcaccgcagggaggcgccatctgacccggccccggcggcgctggctgccccgtcgcccccagacccacccagaggaatcacgcagatattgccttcccccgtggcatgcacccaccgacccacatgcgcgcgcgcgcacccatcgggaattccggacccgattcgctttcctatttcattccactccacccgcttttgggtgtgtggacgatgcatggggagagagagagggagcgggagagtctcctcctcctccccgaccggagcgccggtgccatggaagggggcggcgagcaccaccacccgcttagcgtattcctccgggacgcgaggctcgcattcagatgggacgagctcggtcaggagatcatgaggatcgcggtgcccggcgcgctcgcgctcatggctgacccagtcgcctccctcgtcgacaccgccttcattggccacataggtccagttgaacttggagctgtaggtgtatcaattgccgtgtttaatcagagacaatgacaaaatacatcaacaaaacgaacgcaatgtttcggtcagtgaaatggatgaactgattcctcctgaaggggctagtgccagtaccagcatatcgtcttttgaaactgattcatgtgaggtcagtgttgagcagaagaggaaaaatattccatcagtctctacagcactactacttggtggggtgcttggcctacttgaaaccctactgcttgttctctctgcaaaacctatcttaggctacatgggtgtaaaaccggactctgcgatgatgaagcccgcattgcagtacttagttctcagatctcttggtgctcctgctgttctgttatctctggcaatacaaggagtctttcgcggatttaaggatacaaagacgcctctatacgcaactgtggctggagatgcgatcaatatagttttggatccaatatttatgtttgtgttccaatatggtgttagtggtgccgccatcgctcatgttatatcacaatatttcattgcatccatactcttatggagattaaggttgcatgttgatttgttgccacctagcttcaaacatctgcagtttggccgatttcttaaaaatggttttctgctacttgcacgagttattgccgcaacttgttgtgtgacactatccgcttcaatggccgcacggctaggttcaactccaatggctgcattccagatctgcttgcaaacctggttggcttgctcacttcttgccgatggattggcttttgctggacaagccatacttgcaagtgcatttgctcgtaaggactatccgaaggccaccgccacagcttctcgtatcttgcagctggccttggtcttgggacttctcctaagcatacttcttggtgttggtctgcgcatagggtccagattatttacatccgatcagggtgtactgcatcatatctacataggaataccgtttgtctgccttactcaaccaatcaacgctctggcttttgtttttgatggtatcaattacggagcatcagatttcggatatgctgcctactcaatggtccttgttgccgttgtcagtatcatttgcatcctcactcttgaaagttatggcgggtttattggaatctggatagctctggtgatctacatgagcctccggatgtttgctggattttggaggatagggacggcacaagggccctgggcttatcttcgcggctgaacatagaggcagagctagtaacctgactcaccagcacgacgagcacatggtttattattgttcacggaagtggcagtccttgatgtggtctcgtaaatatgccatacggactcagggtctttttggtttgctacctaacttgtcatactttgcctaacttttctgcttaaggttagttcttcaattcggacaactaaccttaggcaaagtgtgacgcagttagccacgagccaaacagtccctcagttcgtcaaacttaggtctgtgagtttggcggatgtgtaggcactcacatcgttaaacaaatctgttgtactggcctagattgtgacagatgcaaaattatgtcatggttggctactatgcgtagcagggctgcaatacatgtttccatcaggaaggctgtcacaagtttaacacacttgttgtaccaaggcgtgtgaactatagctattttttctgtcctaggacaaactgtgccacgacgtgttgtagctatttttctgtcccgtattcatatgagcagatacatggtcctgcaagtaacacatatatgtaactaaaaatggtgaggaccgttccatgtatgtactctgtgcttcctaacttttagggcccgttcggttgtac

SEQ ID NO: 57235 - DNA, 2679 bp, Zea Mays
agataccattccggaagggacccagacgcagcctacacctgcacggctgcaccgcagggaggcgccatctgacccggccccggcggcgctggctgccccgtcgcccccagacccacccagaggaatcacgcagatattgccttcccccgtggcatgcacccaccgacccacatgcgcgcgcgcgcacccatcgggaattccggacccgattcgctttcctatttcattccactccacccgcttttgggtgtgtggacgatgcatggggagagagagagggagcgggagagtctcctcctcctccccgaccggagcgccggtgccatggaagggggcggcgagcaccaccacccgcttagcgtattcctccgggacgcgaggctcgcattcagatgggacgagctcggtcaggagatcatgaggatcgcggtgcccggcgcgctcgcgctcatggctgacccagtcgcctccctcgtcgacaccgccttcattggccacataggtccagttgaacttggagctgtaggtgtatcaattgccgtgtttaatcaggtctcaagaattgcagtgttcccacttgttagcgtcacaacatcatttgttgctgaggaggatgctatgtccaatggcagagacaatgacaaaatacatcaacaaaacgaacgcaatgtttcggtcagtgaaatggatgaactgattcctcctgaaggggctagtgccagtaccagcatatcgtcttttgaaactgattcatgtgaggtcagtgttgagcagaagaggaaaaatattccatcagtctctacagcactactacttggtggggtgcttggcctacttgaaaccctactgcttgttctctctgcaaaacctatcttaggctacatgggtgtaaaaccggactctgcgatgatgaagcccgcattgcagtacttagttctcagatctcttggtgctcctgctgttctgttatctctggcaatacaaggagtctttcgcggatttaaggatacaaagacgcctctatacgcaactggtataataatatttcatttcttagatagtaaatgatatatacttggcaaattgaattctaaaagaaatcttcgacttcactctcatcatgactcagctttgatttgccattatttagttatataatgctaatagtttgtggcaatgtttcttggaaggatttctgtttttttctttatgtgtctaatggttttatgacaaccagtggctggagatgcgatcaatatagttttggatccaatatttatgtttgtgttccaatatggtgttagtggtgccgccatcgctcatgttatatcacaatatttcattgcatccatactcttatggagattaaggttgcatgttgatttgttgccacctagcttcaaacatctgcagtttggccgatttcttaaaaatggttttctgctacttgcacgagttattgccgcaacttgttgtgtgacactatccgcttcaatggccgcacggctaggttcaactccaatggctgcattccagatctgcttgcaaacctggttggcttgctcacttcttgccgatggattggcttttgctggacaagccatacttgcaagtgcatttgctcgtaaggactatccgaaggccaccgccacagcttctcgtatcttgcagctggccttggtcttgggacttctcctaagcatacttcttggtgttggtctgcgcatagggtccagattatttacatccgatcagggtgtactgcatcatatctacataggaataccgtttgtctgccttactcaaccaatcaacgctctggcttttgtttttgatggtatcaattacggagcatcagatttcggatatgctgcctactcaatggtccttgttgccgttgtcagtatcatttgcatcctcactcttgaaagttatggcgggtttattggaatctggatagctctggtgatctacatgagcctccggatgtttgctggattttggaggatagggacggcacaagggccctgggcttatcttcgcggctgaacatagaggcagagctagtaacctgactcaccagcacgacgagcacatggtttattattgttcacggaagtggcagtccttgatgtggtctcgtaaatatgccatacggactcagggtctttttggtttgctacctaacttgtcatactttgcctaacttttctgcttaaggttagttcttcaattcggacaactaaccttaggcaaagtgtgacgcagttagccacgagccaaacagtccctcagttcgtcaaacttaggtctgtgagtttggcggatgtgtaggcactcacatcgttaaacaaatctgttgtactggcctagattgtgacagatgcaaaattatgtcatggttggctactatgcgtagcagggctgcaatacatgtttccatcaggaaggctgtcacaagtttaacacacttgttgtaccaaggcgtgtgaactatagctattttttctgtcctaggacaaactgtgccacgacgtgttgtagctatttttctgtcccgtattcatatgagcagatacatggtcctgcaagtaacacatatatgtaactaaaaatggtgaggaccgttccatgtatgtactctgtgcttcctaacttttagggcccgttcggttgtac

SEQ ID NO: 57236 - DNA, 2910 bp, Zea Mays
atggaggccgctgcttctcacctggtggtgtcggtaggggacatggaggtggtattgctggatggtggcagggctggatcacggcacaataacatcgttggaggcgcggacgggggcgtagcgcaccggaagacaggttcccgtcgggtacgggtatgtggacgggcgggtaacggatatccgttggataatggatacccggcgggtacgggtactgatagatccgtacccacgagcgtaaatgggtatgggtttgattttatctcgtgggtatggatacgcgaaccatatatccgcgttctacccgcccgattgccatccctactggcgggggagttcgactgctggagaacacgtcggcgccggagggcagggcggcggaggactctgacggggggcgtggtcgggggcacaacgcgccggaggtccgaccagttgttgggattcacgggaaggcgggagcagtgggccccaaaacattttgggcttggggatgggcctttccctgctgcccagcgcaatcggcgggcaccacgcgcgcgcaataaagcaactcctcctgccgcgacgcccttctcctccaccgctccctgccccgtggctccgcttcgttcgtcgccgcatcgccgagggagagggcaagcccagaagacgcctccgtcgccgctctacctgaggtcggacaatcaggccccgctaccgctcctaggtcgcgacccctctccggttctccgccccgaccgcgcccttggcttccaccgccatcaccgcctccacggccatcaccactgcctcgcccaccggcgtcacggccccgcccttggcccccaccgacacgtacacggcctacttcgtggccgccgtcctccgccgttgcgcacgctgagccggaggttggagatctgcctcgtcgagctggagacggaggtcagcctccgcctacgaatcatcatcatcagccaacagcatttcgttggcacttaaagttcaagatagcctgctgtaggccatcggccgtacagatgattgatgatgaggccaactttggtaatatccttgatgcctcagaagaagttcaggttactgcaaagttccgtcccaaggaacgacccaaaccccgaaaaacagctctatcatccagatctgcagcgcctaatcctactgaagaaactggagataggaaagtaggaaccttcaatcaagtcaattcttctaaagagctcacttgccaagaaaggacatccttgatgtgccctagtactgagtcagttgatattatcgctggttctcaaggtattctcgatacaccattggaagatgcattggcagttccccagggttctctgcctggtgcttctgctgcaggtaggacttctcaatatggtgaacacaatgatgatccttctaagttagctacacaccaagaaaacttggtggtttcagatatcaacgtcccacctaacagttcatgtggcaaggctattgatgatatagttgaatttgaggacatgtgtgatgtccaaattgaagaggaaagagttacaaagttccaaccaaaggcgcaaacgaagctccttaaggaaatagccaaatctcggaagactaaccaaaaggtggaaacttccactgtagatgtggttacacaaaatggaaagggcaataatattcagacaaggctccatggcaatcaggtacaggatcctaaaagtcatgaaagtgtgcagatcccagattctgaagaattattagcaactgataatagtaaaggttgcaatttagctaaactcaacaatgtccttgaggagtcagtccaagaggaaacaatagctaagtttcgttctgatttgcaaccaaagcccaggaaggcttcatcccatgttgctgcgattaaaattaatgttgctgctgttgctccaatagttggagtttgtgacagcaacaatgacatgtacagagaacctaaagatcaagaaaccatcaccggtccagtggtttggtcaccacaggctgtgcatgctgatgttgatttagacaatcacaatgaaccaattaatcctcctatcgatggtactcaatcaatgattggcgaagtcccaagtacagcttttacaggaagagaaaagggaaaatcaaaatctgtatcttttgctctatcggatgcttctggggtagctacccctatagataccaattctgagatgggtaacatcggcgattcctgtagtgacaaattgactgatgaaaatttaagtaactcatctcggcatatcgctgaaaagcattctattaccaaggaccaatattcaaatggtcaggaccatgagcgggagccactagatcatgctgttcaacagcaaccaaaatcggatgttggagaaagagcatcatcaatgaaacgacgctgcaggaaaaaggtgcaaaaagttgggacacctaatcacactgttgatgattattttggtgaagactgtgttgaaccttcattagctgaagaagataacaatactggtgatgattacactactggtaataaccataaggctaggaaaaagtcaaggggtggtgtagaagagtcacagcagcagaaagttcaaaaaaataaaagcaaggtgtcttcacggggccgcaaaagaaccttgaaggatgaaacggcagagaagcctgagaagaagctaacccacaggatacgtcagaggataacaaaagataaaacccatgaagctaagcgcatcacatctcaggttgttacaagaagctagagagcgtgttaatccaaaagggattccatccgggccatcttctaatacaaggtatacttctttttttcttctatttctctatgcatgttattatctaaccaaattagacttgggacttttggttgggcataaatgaacatattggaccagt

SEQ ID NO: 57237 - DNA, 2871 bp, Zea Mays
atggaggccgctgcttctcacctggtggtgtcggtaggggacatggaggtggtattgctggatggtggcagggctggatcacggcacaataacatcgttggaggcgcggacgggggcgtagcgcaccggaagacaggttcccgtcgggtacgggtatgtggacgggcgggtaacggatatccgttggataatggatacccggcgggtacgggtactgatagatccgtacccacgagcgtaaatgggtatgggtttgattttatctcgtgggtatggatacgcgaaccatatatccgcgttctacccgcccgattgccatccctactggcgggggagttcgactgctggagaacacgtcggcgccggagggcagggcggcggaggactctgacggggggcgtggtcgggggcacaacgcgccggaggtccgaccagttgttgggattcacgggaaggcgggagcagtgggccccaaaacattttgggcttggggatgggcctttccctgctgcccagcgcaatcggcgggcaccacgcgcgcgcaataaagcaactcctcctgccgcgacgcccttctcctccaccgctccctgccccgtggctccgcttcgttcgtcgccgcatcgccgagggagagggcaagcccagaagacgcctccgtcgccgctctacctgaggtcggacaatcaggccccgctaccgctcctaggtcgcgacccctctccggttctccgccccgaccgcgcccttggcttccaccgccatcaccgcctccacggccatcaccactgcctcgcccaccggcgtcacggccccgcccttggcccccaccgacacgtacacggcctacttcgtggccgccgtcctccgccgttgcgcacgctgagccggaggttggagatctgcctcgtcgagctggagacggagcatttcgttggcacttaaagttcaagatagcctgctgtaggccatcggccgtacagatgattgatgatgaggccaactttggtaatatccttgatgcctcagaagaagttcaggttactgcaaagttccgtcccaaggaacgacccaaaccccgaaaaacagctctatcatccagatctgcagcgcctaatcctactgaagaaactggagataggaaagtaggaaccttcaatcaagtcaattcttctaaagagctcacttgccaagaaaggacatccttgatgtgccctagtactgagtcagttgatattatcgctggttctcaaggtattctcgatacaccattggaagatgcattggcagttccccagggttctctgcctggtgcttctgctgcaggtaggacttctcaatatggtgaacacaatgatgatccttctaagttagctacacaccaagaaaacttggtggtttcagatatcaacgtcccacctaacagttcatgtggcaaggctattgatgatatagttgaatttgaggacatgtgtgatgtccaaattgaagaggaaagagttacaaagttccaaccaaaggcgcaaacgaagctccttaaggaaatagccaaatctcggaagactaaccaaaaggtggaaacttccactgtagatgtggttacacaaaatggaaagggcaataatattcagacaaggctccatggcaatcaggtacaggatcctaaaagtcatgaaagtgtgcagatcccagattctgaagaattattagcaactgataatagtaaaggttgcaatttagctaaactcaacaatgtccttgaggagtcagtccaagaggaaacaatagctaagtttcgttctgatttgcaaccaaagcccaggaaggcttcatcccatgttgctgcgattaaaattaatgttgctgctgttgctccaatagttggagtttgtgacagcaacaatgacatgtacagagaacctaaagatcaagaaaccatcaccggtccagtggtttggtcaccacaggctgtgcatgctgatgttgatttagacaatcacaatgaaccaattaatcctcctatcgatggtactcaatcaatgattggcgaagtcccaagtacagcttttacaggaagagaaaagggaaaatcaaaatctgtatcttttgctctatcggatgcttctggggtagctacccctatagataccaattctgagatgggtaacatcggcgattcctgtagtgacaaattgactgatgaaaatttaagtaactcatctcggcatatcgctgaaaagcattctattaccaaggaccaatattcaaatggtcaggaccatgagcgggagccactagatcatgctgttcaacagcaaccaaaatcggatgttggagaaagagcatcatcaatgaaacgacgctgcaggaaaaaggtgcaaaaagttgggacacctaatcacactgttgatgattattttggtgaagactgtgttgaaccttcattagctgaagaagataacaatactggtgatgattacactactggtaataaccataaggctaggaaaaagtcaaggggtggtgtagaagagtcacagcagcagaaagttcaaaaaaataaaagcaaggtgtcttcacggggccgcaaaagaaccttgaaggatgaaacggcagagaagcctgagaagaagctaacccacaggatacgtcagaggataacaaaagataaaacccatgaagctaagcgcatcacatctcaggttgttacaagaagctagagagcgtgttaatccaaaagggattccatccgggccatcttctaatacaaggtatacttctttttttcttctatttctctatgcatgttattatctaaccaaattagacttgggacttttggttgggcataaatgaacatattggaccagt

SEQ ID NO: 57238 - DNA, 2980 bp, Zea Mays
atggaggccgctgcttctcacctggtggtgtcggtaggggacatggaggtggtattgctggatggtggcagggctggatcacggcacaataacatcgttggaggcgcggacgggggcgtagcgcaccggaagacaggttcccgtcgggtacgggtatgtggacgggcgggtaacggatatccgttggataatggatacccggcgggtacgggtactgatagatccgtacccacgagcgtaaatgggtatgggtttgattttatctcgtgggtatggatacgcgaaccatatatccgcgttctacccgcccgattgccatccctactggcgggggagttcgactgctggagaacacgtcggcgccggagggcagggcggcggaggactctgacggggggcgtggtcgggggcacaacgcgccggaggtccgaccagttgttgggattcacgggaaggcgggagcagtgggccccaaaacattttgggcttggggatgggcctttccctgctgcccagcgcaatcggcgggcaccacgcgcgcgcaataaagcaactcctcctgccgcgacgcccttctcctccaccgctccctgccccgtggctccgcttcgttcgtcgccgcatcgccgagggagagggcaagcccagaagacgcctccgtcgccgctctacctgaggtcggacaatcaggccccgctaccgctcctaggtcgcgacccctctccggttctccgccccgaccgcgcccttggcttccaccgccatcaccgcctccacggccatcaccactgcctcgcccaccggcgtcacggccccgcccttggcccccaccgacacgtacacggcctacttcgtggccgccgtcctccgccgttgcgcacgctgagccggaggttggagatctgcctcgtcgagctggagacggaggtcagcctccgcctacgaatcatcatcatcagccaacagtggttgattcgactccttgtgccactgagaagacctaagtaaacccaactagtctcgcttccttctgattcatttcgttggcacttaaagttcaagatagcctgctgtaggccatcggccgtacagatgattgatgatgaggccaactttggtaatatccttgatgcctcagaagaagttcaggttactgcaaagttccgtcccaaggaacgacccaaaccccgaaaaacagctctatcatccagatctgcagcgcctaatcctactgaagaaactggagataggaaagtaggaaccttcaatcaagtcaattcttctaaagagctcacttgccaagaaaggacatccttgatgtgccctagtactgagtcagttgatattatcgctggttctcaaggtattctcgatacaccattggaagatgcattggcagttccccagggttctctgcctggtgcttctgctgcaggtaggacttctcaatatggtgaacacaatgatgatccttctaagttagctacacaccaagaaaacttggtggtttcagatatcaacgtcccacctaacagttcatgtggcaaggctattgatgatatagttgaatttgaggacatgtgtgatgtccaaattgaagaggaaagagttacaaagttccaaccaaaggcgcaaacgaagctccttaaggaaatagccaaatctcggaagactaaccaaaaggtggaaacttccactgtagatgtggttacacaaaatggaaagggcaataatattcagacaaggctccatggcaatcaggtacaggatcctaaaagtcatgaaagtgtgcagatcccagattctgaagaattattagcaactgataatagtaaaggttgcaatttagctaaactcaacaatgtccttgaggagtcagtccaagaggaaacaatagctaagtttcgttctgatttgcaaccaaagcccaggaaggcttcatcccatgttgctgcgattaaaattaatgttgctgctgttgctccaatagttggagtttgtgacagcaacaatgacatgtacagagaacctaaagatcaagaaaccatcaccggtccagtggtttggtcaccacaggctgtgcatgctgatgttgatttagacaatcacaatgaaccaattaatcctcctatcgatggtactcaatcaatgattggcgaagtcccaagtacagcttttacaggaagagaaaagggaaaatcaaaatctgtatcttttgctctatcggatgcttctggggtagctacccctatagataccaattctgagatgggtaacatcggcgattcctgtagtgacaaattgactgatgaaaatttaagtaactcatctcggcatatcgctgaaaagcattctattaccaaggaccaatattcaaatggtcaggaccatgagcgggagccactagatcatgctgttcaacagcaaccaaaatcggatgttggagaaagagcatcatcaatgaaacgacgctgcaggaaaaaggtgcaaaaagttgggacacctaatcacactgttgatgattattttggtgaagactgtgttgaaccttcattagctgaagaagataacaatactggtgatgattacactactggtaataaccataaggctaggaaaaagtcaaggggtggtgtagaagagtcacagcagcagaaagttcaaaaaaataaaagcaaggtgtcttcacggggccgcaaaagaaccttgaaggatgaaacggcagagaagcctgagaagaagctaacccacaggatacgtcagaggataacaaaagataaaacccatgaagctaagcgcatcacatctcaggttgttacaagaagctagagagcgtgttaatccaaaagggattccatccgggccatcttctaatacaaggtatacttctttttttcttctatttctctatgcatgttattatctaaccaaattagacttgggacttttggttgggcataaatgaacatattggaccagt

SEQ ID NO: 57239 - DNA, 3015 bp, Zea Mays
atggaggccgctgcttctcacctggtggtgtcggtaggggacatggaggtggtattgctggatggtggcagggctggatcacggcacaataacatcgttggaggcgcggacgggggcgtagcgcaccggaagacaggttcccgtcgggtacgggtatgtggacgggcgggtaacggatatccgttggataatggatacccggcgggtacgggtactgatagatccgtacccacgagcgtaaatgggtatgggtttgattttatctcgtgggtatggatacgcgaaccatatatccgcgttctacccgcccgattgccatccctactggcgggggagttcgactgctggagaacacgtcggcgccggagggcagggcggcggaggactctgacggggggcgtggtcgggggcacaacgcgccggaggtccgaccagttgttgggattcacgggaaggcgggagcagtgggccccaaaacattttgggcttggggatgggcctttccctgctgcccagcgcaatcggcgggcaccacgcgcgcgcaataaagcaactcctcctgccgcgacgcccttctcctccaccgctccctgccccgtggctccgcttcgttcgtcgccgcatcgccgagggagagggcaagcccagaagacgcctccgtcgccgctctacctgaggtcggacaatcaggccccgctaccgctcctaggtcgcgacccctctccggttctccgccccgaccgcgcccttggcttccaccgccatcaccgcctccacggccatcaccactgcctcgcccaccggcgtcacggccccgcccttggcccccaccgacacgtacacggcctacttcgtggccgccgtcctccgccgttgcgcacgctgagccggaggttggagatctgcctcgtcgagctggagacggaggtcagcctccgcctacgaatcatcatcatcagccaacagtggttgattcgactccttgtgccactgagaagacctaagtaaacccaactagtctcgcttccttctgattcatttcgttggcacttaaagttcaagatagcctgctgtaggccatcggccgtacagatgattgatgatgaggccaactttggtaatatccttgatgcctcagaagaagttcaggttactgcaaagttccgtcccaaggaacgacccaaaccccgaaaaacagctctatcatccagatctgcagcgcctaatcctactgaagaaactggagataggaaagtaggaaccttcaatcaagtcaattcttctaaagagctcacttgccaagaaaggacatccttgatgtgccctagtactgagtcagttgatattatcgctggttctcaaggtattctcgatacaccattggaagatgcattggcagttccccagggttctctgcctggtgcttctgctgcaggtaggacttctcaatatggtgaacacaatgatgatccttctaagttagctacacaccaagaaaacttggtggtttcagatatcaacgtcccacctaacagttcatgtggcaaggctattgatgatatagttgaatttgaggacatgtgtgatgtccaaattgaagaggaaagagttacaaagttccaaccaaaggcgcaaacgaagctccttaaggaaatagccaaatctcggaagactaaccaaaaggtggaaacttccactgtagatgtggttacacaaaatggaaagggcaataatattcagacaaggctccatggcaatcaggtacaggatcctaaaagtcatgaaagtgtgcagatcccagattctgaagaattattagcaactgataatagtaaaggttgcaatttagctaaactcaacaatgtccttgaggagtcagtccaagaggaaacaatagctaagtttcgttctgatttgcaaccaaagcccaggaaggcttcatcccatgttgctgcgattaaaattaatgttgctgctgttgctccaatagttggagtttgtgacagcaacaatgacatgtacagagaacctaaagatcaagaaaccatcaccggtccagtggtttggtcaccacaggctgtgcatgctgatgttgatttagacaatcacaatgaaccaattaatcctcctatcgatggtactcaatcaatgattggcgaagtcccaagtacagcttttacaggaagagaaaagggaaaatcaaaatctgtatcttttgctctatcggatgcttctggggtagctacccctatagataccaattctgagatgggtaacatcggcgattcctgtagtgacaaattgactgatgaaaatttaagtaactcatctcggcatatcgctgaaaagcattctattaccaaggaccaatattcaaatggtcaggaccatgagcgggagccactagatcatgctgttcaacagcaaccaaaatcggatgttggagaaagagcatcatcaatgaaacgacgctgcaggaaaaaggtgcaaaaagttgggacacctaatcacactgttgatgattattttggtgaagactgtgttgaaccttcattagctgaagaagataacaatactggtgatgattacactactggtaataaccataaggctaggaaaaagtcaaggggtggtgtagaagagtcacagcagcagaaagttcaaaaaaataaaagcaaggtgtcttcacggggccgcaaaagaaccttgaaggatgaaacggcagagaagcctgagaagaagctaacccacaggatacgtcagaggataacaaaagaggttaaggctttactggaaacacctcgtgagcagataaaacccatgaagctaagcgcatcacatctcaggttgttacaagaagctagagagcgtgttaatccaaaagggattccatccgggccatcttctaatacaaggtatacttctttttttcttctatttctctatgcatgttattatctaaccaaattagacttgggacttttggttgggcataaatgaacatattggaccagt

SEQ ID NO: 57240 - DNA, 2983 bp, Zea Mays
atggaggccgctgcttctcacctggtggtgtcggtaggggacatggaggtggtattgctggatggtggcagggctggatcacggcacaataacatcgttggaggcgcggacgggggcgtagcgcaccggaagacaggttcccgtcgggtacgggtatgtggacgggcgggtaacggatatccgttggataatggatacccggcgggtacgggtactgatagatccgtacccacgagcgtaaatgggtatgggtttgattttatctcgtgggtatggatacgcgaaccatatatccgcgttctacccgcccgattgccatccctactggcgggggagttcgactgctggagaacacgtcggcgccggagggcagggcggcggaggactctgacggggggcgtggtcgggggcacaacgcgccggaggtccgaccagttgttgggattcacgggaaggcgggagcagtgggccccaaaacattttgggcttggggatgggcctttccctgctgcccagcgcaatcggcgggcaccacgcgcgcgcaataaagcaactcctcctgccgcgacgcccttctcctccaccgctccctgccccgtggctccgcttcgttcgtcgccgcatcgccgagggagagggcaagcccagaagacgcctccgtcgccgctctacctgaggtcggacaatcaggccccgctaccgctcctaggtcgcgacccctctccggttctccgccccgaccgcgcccttggcttccaccgccatcaccgcctccacggccatcaccactgcctcgcccaccggcgtcacggccccgcccttggcccccaccgacacgtacacggcctacttcgtggccgccgtcctccgccgttgcgcacgctgagccggaggttggagatctgcctcgtcgagctggagacggaggtcagcctccgcctacgaatcatcatcatcagccaacagacctaagtaaacccaactagtctcgcttccttctgattcatttcgttggcacttaaagttcaagatagcctgctgtaggccatcggccgtacagatgattgatgatgaggccaactttggtaatatccttgatgcctcagaagaagttcaggttactgcaaagttccgtcccaaggaacgacccaaaccccgaaaaacagctctatcatccagatctgcagcgcctaatcctactgaagaaactggagataggaaagtaggaaccttcaatcaagtcaattcttctaaagagctcacttgccaagaaaggacatccttgatgtgccctagtactgagtcagttgatattatcgctggttctcaaggtattctcgatacaccattggaagatgcattggcagttccccagggttctctgcctggtgcttctgctgcaggtaggacttctcaatatggtgaacacaatgatgatccttctaagttagctacacaccaagaaaacttggtggtttcagatatcaacgtcccacctaacagttcatgtggcaaggctattgatgatatagttgaatttgaggacatgtgtgatgtccaaattgaagaggaaagagttacaaagttccaaccaaaggcgcaaacgaagctccttaaggaaatagccaaatctcggaagactaaccaaaaggtggaaacttccactgtagatgtggttacacaaaatggaaagggcaataatattcagacaaggctccatggcaatcaggtacaggatcctaaaagtcatgaaagtgtgcagatcccagattctgaagaattattagcaactgataatagtaaaggttgcaatttagctaaactcaacaatgtccttgaggagtcagtccaagaggaaacaatagctaagtttcgttctgatttgcaaccaaagcccaggaaggcttcatcccatgttgctgcgattaaaattaatgttgctgctgttgctccaatagttggagtttgtgacagcaacaatgacatgtacagagaacctaaagatcaagaaaccatcaccggtccagtggtttggtcaccacaggctgtgcatgctgatgttgatttagacaatcacaatgaaccaattaatcctcctatcgatggtactcaatcaatgattggcgaagtcccaagtacagcttttacaggaagagaaaagggaaaatcaaaatctgtatcttttgctctatcggatgcttctggggtagctacccctatagataccaattctgagatgggtaacatcggcgattcctgtagtgacaaattgactgatgaaaatttaagtaactcatctcggcatatcgctgaaaagcattctattaccaaggaccaatattcaaatggtcaggaccatgagcgggagccactagatcatgctgttcaacagcaaccaaaatcggatgttggagaaagagcatcatcaatgaaacgacgctgcaggaaaaaggtgcaaaaagttgggacacctaatcacactgttgatgattattttggtgaagactgtgttgaaccttcattagctgaagaagataacaatactggtgatgattacactactggtaataaccataaggctaggaaaaagtcaaggggtggtgtagaagagtcacagcagcagaaagttcaaaaaaataaaagcaaggtgtcttcacggggccgcaaaagaaccttgaaggatgaaacggcagagaagcctgagaagaagctaacccacaggatacgtcagaggataacaaaagaggttaaggctttactggaaacacctcgtgagcagataaaacccatgaagctaagcgcatcacatctcaggttgttacaagaagctagagagcgtgttaatccaaaagggattccatccgggccatcttctaatacaaggtatacttctttttttcttctatttctctatgcatgttattatctaaccaaattagacttgggacttttggttgggcataaatgaacatattggaccagt

SEQ ID NO: 57241 - DNA, 856 bp, Zea Mays
gttttttgaggtctaaactaacggaagagaaaagggaaaatcaaaatctgtatcttttgctctatcggatgcttctggggtagctacccctatagataccaattctgagatgggtaacatcggcgattcctgtagtgacaaattgactgatgaaaatttaagtaactcatctcggcatatcgctgaaaagcattctattaccaaggaccaatattcaaatggtcaggaccatgagcgggagccactagatcatgctgttcaacagcaaccaaaatcggatgttggagaaagagcatcatcaatgaaacgacgctgcaggaaaaaggtgcaaaaagttgggacacctaatcacactgttgatgattattttggtgaagactgtgttgaaccttcattagctgaagaagataacaatactggtgatgattacactactggtaataaccataaggctaggaaaaagtcaaggggtggtgtagaagagtcacagcagcagaaagttcaaaaaaataaaagcaaggtgtcttcacggggccgcaaaagaaccttgaaggatgaaacggcagagaagcctgagaagaagctaacccacaggatacgtcagaggataacaaaagaggttaaggctttactggaaacacctcgtgagcagataaaacccatgaagctaagcgcatcacatctcaggttgttacaagaagctagagagcgtgttaatccaaaagggattccatccgggccatcttctaatacaaggtatacttctttttttcttctatttctctatgcatgttattatctaaccaaattagacttgggacttttggttgggcataaatgaacatattggaccagt

SEQ ID NO: 57242 - DNA, 1042 bp, Zea Mays
  misc_feature (1)..(2): n is a, c, g, or t
nngaacaaaccagcccggggaagatggtcaaaatcagataccgacttgttttacgagggtcttcgacaaattggtagtgattttgcaatgatacaacaattattccctgataagactcgccatcaggtgcggcagaaatttaaatctgaggagagaaaaaatccattgctagtccatgatgctataactcatcgctcaggagataatttgtatttcaaaaaggtaattaagcagctcaacattgaagatgttgtgctgccagatattaaaagtacacaaaaacaagatggtgcatcaagtgaaagaggccctggaaatgagaatgtactggatgatttatacggggaggaaaatagttcaaattggttgaacgaagagcatgacgtacagatggctgatgtggaagaagagcatggcgaacagatggatgatgtggaagaagagcatgatcttggaaatgatggtggtgatgatgatcttggggatgtttttgcttggtactagtttgatcatggctgggattaggactcacgatattatgattatgattctgctaatgttttgaggtacctgacttgctgactgttgagttgattgctaactagaggaagtgacagtcgacgatgcccaattgtatcagcatattcttggtgattagcatcagtaccagtggttgtgacagatatgtcctgctggatgccgagttttgcaagccgatggaaggtgtctgtaacgagttatagaatttgtatttttttattaccttgcacacgaatatagtgttgatggatggtagatacgtcacgtttacctttatttatagctactttatcttagttgttgttgctctcatgctctgtgactttaaaagcagtatcggtttccgtagagcctcagttggcatcttttttttttcctggtagccttcctggagaaagaatgcaagattgaatggtgtctatgctcttttttttagctcccgtgaggaggttgtgtattcctatttgtatagttgcatgccgagtgtggtgctagtgctccc

SEQ ID NO: 57243 - DNA, 921 bp, Zea Mays
gaacaaaccagcccggggaagatggtcaaaatcagataccgacttgttttacgagggtcttcgacaaattggtagtgattttgcaatgatacaacaattattccctgataagactcgccatcaggtgcggcagaaatttaaatctgaggagagaaaaaatccattgctagtccatgatgctataactcatcgctcaggagataatttgtatttcaaaaaggtaattaagcagctcaacattgaagatgttgtgctgccagatattaaaagtacacaaaaacaagatggtgcatcaagtgaaagaggccctggaaatgagaatgtactggatgatttatacggggaggaaaatagttcaaattggttgaacgaagagcatgacgtacagatggctgatgtggaagaagagcatggcgaacagatggatgatgtggaagaagagcatgatcttggaaatgatggtggtgatgatgatcttggggatgtttttgcttggtactagtttgatcatggctgggattaggactcacgatattatgattatgattctgctaatgttttgaggtatggagttggtttgtcaacgttttgttaatcatagtaatacaaatatatactgatttcattttaacagcacattgcaaggctcctgaacaaactatacaaactacattttttagcttgaacatttatggattttagtttcttgaattctatgtttgcgctctggttcccttatgttgctaggactccctccttccaaattgtaagttgttatggcttttctaagtatattgcttttgctacatacctagatttgtctcggtacataacctgtgtacatagaaaagcctgaactaacttacaatttggaactgagggagtatattgtatacagctcatctttcctagaaaaaaaaa

SEQ ID NO: 57244 - DNA, 653 bp, Zea Mays
ggaagatggtcaaaatcagataccgacttgttttacgagggtcttcgacaaattggtagtgattttgcaatgatacaacaattattccctgataagactcgccatcaggtgcggcagaaatttaaatctgaggagagaaaaaatccattgctagtccatgatgctataactcatcgctcaggagataatttgtatttcaaaaaggtaattaagcagctcaacattgaagatgttgtgctgccagatattaaaagtacacaaaaacaagatggtgcatcaagtgaaagaggccctggaaatgagaatgtactggatgatttatacggggaggaaaatagttcaaattggttgaacgaagagcatgacgtacagatggctgatgtggaagaagagcatggcgaacagatggatgatgtggatctcggaaatgatggtggtgatgatgatcttggggatgtttttgattggtactagtttgatcatggctggatgatgtggaagaagagcatgatcttggaaatgatggtggtgatgatgatcttggggatgtttttgcttggtactagtttgatcatggctgggattaggactcacgatattatgattatgattctgctaatgttttgaggtacattgatggctgggccctgttg

SEQ ID NO: 57245 - DNA, 174 bp, Zea Mays
ctgcatttcatcgaacaccacttgagcatcaatcgaatatgatgtaggcttgcttgcagtagtcaccatgtctaccgaattgggcttgacaagctttggaatgaggccagagagatagttgggtctttcctcggctgctgttgctctgtgatgcctctgtgtgtgttgtgtctg

SEQ ID NO: 57246 - DNA, 239 bp, Zea Mays
cttaatatcgatgtactatatgtcacaaccttttcatgcattgaccaataacttagcatttggaatgggtttctcctttctgtatcattatgtatttatgtgtacttccagggagtacaattttcttcatgttggcgatgaaatgctacaatctaagtcgcttgatcgagattcatatgtctttggagatcaagaataaaatggttctactgaaacccctacaagatgccttccactct

SEQ ID NO: 57247 - DNA, 1331 bp, Zea Mays
gtgtacgtgtgcgtacgcgtctattctagctagcgttttttaagccgcaacgcgaggccgtgtgcacacaccggaacacaggcgtccgcccgctgctcgttttaatttactcttgatttgccatgctgtggctgtacacacgtagtgttctttaccatcaccggcggcggcggcagcagcagcagcagcaggaagagctgaggaggagttcattcgatcgtctggtcaactctgagagatcgcaagcaagctaggcatcgtcgcatcagccagacctctcattaaattaggttaggtgtgtactatggtgtttcgtcgtcgatgagttgacgatctgggccaaccggagatcatgatcgatcatgacagggcccgcgcgggcgcatggcgtgccgttgaccagagtgtggcacgcagataagagaggcggatgctgctgagaataataatgcaaggagattcgggtggctgttgctgttaaaagtccagcagatcgacaccgacacctgtcagcattcggtgacaggggaatttttctcggtgacacgatccaacgcgtgatcccttcagaagacttcaattgtcaagtctacggtggtacccgacgatcacgggcaggactggactggggaggacagcggacagggcaaggagattctacggggcgcactagtgtagtgtactcctccagctccagtcctcctcctgcccgcctgccggcatctttgccactgtgtctgtacctgtccttgttgttgtccatctggtcagtgcgtggtcatgtccctgatccaacaagacgccctgcctgccacgccacgcgctccctccctctcgccgctcgtttcgtcgaacctgtgtgcgtacagtacagtacaggagctgctgcaggcagctgtcgtcgtcgtcgtcgtcatcggccctcccggtctgctcactgctcactgctggtcgtcgcgttgactcgttgactcccggaatgcacggcgggacgatctcggcgtattattaaattatttgccatgcatgcatgtgagccggccagtcccggtgtcgactctcgaccatctccttcctggaaactcttgctgcatccatcctttggttgggttgacaacgaccatgagtccatgacggagagcgtgattccgctccacatcgtcgacgaggagaggatacgttaggggtgtgtttggtgtccagcagttcacgaaaacgctgttcgctatagactaaactgcgctgtccgcagctggagatagcctataagacaccgtgacttgtctaaacttaggtcacgatttgaatgcactatatagctaatggttaac

SEQ ID NO: 57248 - DNA, 1472 bp, Zea Mays
ctccccctcttgcggccgtcgactcagccgctttcttctttctccgatccattgctcacgactgccggacgactgccagtgccatggcgactcaagcacgcgagaaccaccgccattcttttacgactaaggacgagaggagtggtgaaggtgcggaggatcaggcgatcgacgactggctcccaatcacctcatccaggaatgccaagtggtggtactccgcgttccacaacgtcaccgccatggtcggcgccggcgtgctcagccttccttacgccatgtccaagctcggctggggacctggcatcgcggtgctgatgctgtcgtgggtcgtcaccctgtacaccatgtggcagatggtggagatgcacgagatggtccccgggaagcggttcgaccggtaccacgagctcgggcagcacgcgttcggcgagcggctgggcctctggatcgtcgtgccgcagcagctcatcgtcgaggtgggcggggacatcgtgttcatggtcaccggaggcaggtcgctgaagaagctccacgacgtggtcgtctgcgacgctgccggcagctccccaacttcaactccatctccggcgtctccggtctccatcgccgccgctgtcatgtcactcagttactcgaccatagcttggggagcgtcggtgcacaagggcaagctgcccgacgtggactacgaggttctggcggcggcggcgacggcgtcggagaaggcgttgagctacatggcggcgctgggggacgtggcgttcgcgtacgcggggcacaacgtggttctggagatccaggccaccatcccgtccacgccggagaccccgtccaagaagcccatgtggaggggcgtcgtggtcgcctacgccatggtcgccgcctgctacttccccgtctcgctactcgggtactgggccttcggcaaccaggtcgacgacaacgtcctcgtcacgctcagcaagccccggtggctcatcgccctcgccaacgccatggtcgtcgtccatgtcattggcagctaccagattttcgcgatgccggtgttcgacatgatggagacggtcctggtgaagaaactgcatttcccgcccggccttgccctccgtctcattgcccggagcacctatgtcgcgttcacgacgttcatagccattaccatccccttcttcggcgggctgcttggtttcttcggcgggttcgcctttgcgccgacaacctatttcgcctgcattgttcttggagtggtcctgatggtcctggcgccaatcggagcactccggcagatcatcctgtctgccaagacgtaccgattctactcgtaaacaaactagctaccgcgtgctcagccacagcgggctgcgtgtcttctgtcgtcgtacgtaccaaccaaatagaagaggatagcctcctgtaaccagagcttgatccgtccgaatgagatgatagtcgtcagaggcatgttgtga

SEQ ID NO: 57249 - DNA, 1478 bp, Zea Mays
ccccctcttgcggccgtcgactcagccgctttcttctttctccgatccattgctcacgactgccggacgactgccagtgccatggcgactcaagcacgcgagaaccaccgccattcttttacgactaaggacgagaggagtggtgaaggtgcggaggatcaggcgatcgacgactggctcccaatcacctcatccaggaatgccaagtggtggtactccgcgttccacaacgtcaccgccatggtcggcgccggcgtgctcagccttccttacgccatgtccaagctcggctgatggtggagatgcacgagatggtccccgggaagcggttcgaccggtaccacgagctcgggcagcacgcgttcggcgagcggctgggcctctggatcgtcgtgccgcagcagctcatcgtcgaggtgggcggggacatcgtgttcatggtcaccggaggcaggtcgctgaagaagctccacgacgtggtcgtctgcgacgctgccggcagctccccaacttcaactccatctccggcgtctccggtctccatcgccgccgctgtcatgtcactcagttactcgaccatagcttggggagcgtcggtgcacaagggcaagctgcccgacgtggactacgaggttctggcggcggcggcgacggcgtcggagaaggcgttgagctacatggcggcgctgggggacgtggcgttcgcgtacgcggggcacaacgtggttctggagatccaggccaccatcccgtccacgccggagaccccgtccaagaagcccatgtggaggggcgtcgtggtcgcctacgccatggtcgccgcctgctacttccccgtctcgctactcgggtactgggccttcggcaaccaggtcgacgacaacgtcctcgtcacgctcagcaagccccggtggctcatcgccctcgccaacgccatggtcgtcgtccatgtcattggcagctaccagattttcgcgatgccggtgttcgacatgatggagacggtcctggtgaagaaactgcatttcccgcccggccttgccctccgtctcattgcccggagcacctatgtcgcgttcacgacgttcatagccattaccatccccttcttcggcgggctgcttggtttcttcggcgggttcgcctttgcgccgacaacctatttccttccctgcgtcatgtggcttgcaatctgcaagcccaaaaggttcagtctctcatggttcgccaactgggcctgcattgttcttggagtggtcctgatggtcctggcgccaatcggagcactccggcagatcatcctgtctgccaagacgtaccgattctactcgtaaacaaactagctaccgcgtgctcagccacagcgggctgcgtgtcttctgtcgtcgtacgtaccaaccaaatagaagaggatagcctcctgtaaccagagcttgatccgtccgaatgagatgatagtcgtcagaggcatgttgtga

SEQ ID NO: 57250 - DNA, 2280 bp, Zea Mays
gagggtttgacgagtcgatgagctagcgacgacgacgacactcacagcggcgaggaagcgaatttcttctcctgctttcagatggatgatggatcaggtggcatggatcgatgacctgctgctggatcgagccagcatgcgtataaagaaggcgagctccgcttaaatccctctactatgacccctgctgcctttccaccttcctcgatctccctagctcgctctccaatctcccatttctctctctctctctctctctctctctctctcgtcttcgccatccaccatccatcccgttcgtcgtgatagatggcggcagtccagccgtccgtggagatgacgacgcagcaagggccgccagccgccagctattctccggccagggatggcggcggcggcaggagcgccgaggatgaggagaaggagaaggcggcggcgatcgacaactggcttcccatcagcgcgacgcggaatgccaagtggtggtactccgccttccacaacgtcacggccatggtcggcgccggcgtgctcggcctcccctacgccatgtcccagctcggctggggtgccggcatcacgatcatgctcctgtcgtgggtgatcacgctgtacacgctgtggcagatggtggagatgcacgagatggtgccggggaagcggttcgaccggtaccacgagctggggcagcacgcgttcggggaccggctgggcctgtggatcgtggtgccgcagcagctggtggtggaggtgggggtgaacatcgtgtacatggtgaccggcggcacgtcgctgcagaagttccacgacgtgctggtgtgcggcgacgcggcgtgcgagggcgggcgcaagatcaggctcacctacttcatcatgatcttcgcgtcctgccacttcgtgctggcgcagctgcccaacttcgactccatctccggcgtgtccctggccgccgccgtcatgtcgctcagctactcgaccatcgcgtggggcgcgtccgtcagcaaagggcgggtgcccgacgtggactacggactcagggccaccacgccgccgggcaaggtgttcgggttcctgggcgcgctcgggaccgtggcgttcgcctacgcgggccacaacgtggtgctggagatccaggccaccatcccgtccactcccgagaagccgtccaagaagcccatgtggaagggcgtcgtcgtcgcctacctcgtcgtcgcgctctgctacttccccgtctcgttcgtcggctactgggctttcggcgatagcgtcgacggcgacatcctcgtcacccttaacagacccaggtggctcatcgccctcgccaacatgatggtcgtcatccatgtcattggcagctaccagatctatgcgatgcccgtgttcgacatgatagagacggtgctggtgaagaagctgcgcttccctccaggcctcacgctccgtctcattgcccgtactgtctacgttgcgttcacaatgttcatagccatcacgtttcccttcttcgacgggctgctcagcttcttcggcggattcgcgttcgcgcccacaacctatttcatctgcatcatccttggagtgcttctgatggtgctggcgccgattggagggctccggcagatcattatcagcgccaagacatacaagttctaccagtaaacattgcacaattatcgtgcaaaaaacaacgcaaaccccttgcttcaccagtaactgacagacaagtcttgttaggccatatataccatgttaccatcagctgaacaggttctggattttgttccatgagggcttccaactccttgtttaatttggcacgacaaaaaactcgcaccgggtgctctaatcggcggtcgattacagcgtccagtgcgagttctttgccgtgccaaaattgaaaggaggtcggctcggatgccggggcatgcatacaggacctagaacccgtttcggttgatgagaatgttcctggcatgtaatgcttcccttgttggttgtggtctaacctaggagtttgctttgagtggatctttgtacaattgtacgtgtatatgatgtttttttacattattcaggggaattggatcttagcttctgtgtgtgtatgcgtaaaaagggaaagagttgtgcttcatatatgtatatttttagatggcctaaaatgtgtcgtatttgttgcatttttttttctcctaccacttttcattcaattaatcacgaaaaaaatacattgatgatcatgcgttgttgtacttgatggatcttgataaacagtgggtg

SEQ ID NO: 57251 - DNA, 1910 bp, Zea Mays
gaagggaccatcgatcgtcctccatcagctgagctggagtcgcctgccgtcaccttgctttcacttgggcttttaattactatacaaataaacaagctagacgacttcaagtcttatttgctcccagtcccaccactgctctctgaatttctgctccctagctagctagctctccagtctccactgctgaaaggcgtccgtcgtcgtcgagatgaggcccgcccgcccgccgacgatggagatgcaaccaccaccgacggccatgcaaggccggagaagcccgcgaccgctggaggagtcgatcgagagctggcttcccatcagctccagcaggaacgccaagtggtggtactccgctttccacaatgtcacggccatggtcggcgccggcgtgctcagcctcccctacgccatgtcccagctcggctgggaggtcggcgtcacggtgctggttctgttgtgggccatcacgctctacacgctgtggcagatggtggagatgcacgagtgcgtcccggggaagcggttcgaccggtaccacgagctcgggcagcacgcgttcggcgagcgcctgggcctctggatcgtcgtgccgcagcagctggtggtggaggtgggcgtcaacatcgtctacatggtcaccggcggcacgtcgctgaagaagttccacgacacggtctgcggcgacagctgcacggacatcaagctcacctatttcatcatgatcttcgcctcctgccacttcgtcctctcccagctccccagcttccactccatctccggcgtctccctcgccgccgccgtcatgtcgctttgctactcgacgatcgcgtgggtcgcctcggcgcacaaggggaggtcgccggacgtgcactacggcctgcgcgcgacgacggcgccggggaaggtgttcggcttcttcggcgcgctgggggacgtggcgttcgcgtacgcggggcacaacgtggtgctggagatccaggccaccatcccgtccacgccggagaggccgtccaagaagcccatgtggaagggcgccatcgtcgcctacgccatcgtcgccgcgtgctacttccctgcctcgctcgtcggctactgggccttcggcaaccaggtcaacgacaacgtcctcgtcagcctcagcaaacccaagtggctcatcgccctcgccaacatgatggtcgttgttcatgtcattggaagctaccagatatttgcgatgccagtgtttgacatgatagaggcagtactggtgatgaagtttcggttccgtccaagcctgatgctccgcctcatttcccggagtgcatatggtttacaatgttcatagccatcaccttccctttctttggtgcattgctcagcttctttggtggatttgcctttgcaccaacgacatattttcttccttgcatcatgtggctcagaatatacaagcccaaaacttttagtgtttcatggtttaccaattggatctgtattgttctaggagtgatgttgatggtactatcaccgattggtggacttcgacagatcatctttaatgctaagacatacaacttctaccagtaaatataattcattcaacacaaaaccaaggtttatgccatagttaaaatgtgctcgacatgtctcaagttttgaatggggcttattgtttttcttcgacatggcagaaaattcatatcgtgtgatgtatttagtatataatgttacagttatccaagttttcatcgtgcaataagatggcatgtgtcatattcaaagcttgttgctactcaagacaatctgtgatgtgtcatggtcccgttaataatggcttaacctagaagtttgcttttgatttatcatgtgcatatatattgtttgtctatattatatataggttgcttatttgcatgttattagga

SEQ ID NO: 57252 - DNA, 1949 bp, Zea Mays
ggcgagctagtccctgcctccgcctccgctacctctgacctctccaatccgttactgctcaaggctctgcgctagccgcccgcgcgtccggctccagcctctgccatgggatcagccggtgaggcactcccgccgccggccagtgagacgcgaccatgggacaactattctcaggccaagtcgctcttgcgcccaaagggaggcgtgcggcgtcagacgcgccggcgggaggggaaggcggctggagcgggcaggacgagaagccggcggccgacgacgactggcttccgatcaacgcgaggaggaacgccaagtggtggtacgccgccttccacaatgtcaccgccatggtgggcgccggcgtgcttacccttccctatgccatgtccgagctcggctggggcgtgggcgtcacggtgctggtcctgtcgtgggtcatcacggtgtacacgctgtggcagatggtggagatgcacgagtgcgtgccggggaagcggttcgaccggtaccacgagctggggcagcacgcgttcggcgagaagctgggcctctggatcgtggtgccgcagcagctggtggtggaggtgggcctcaacatcgtgtacatgatcaccggcggccagtccctgcagaagttccacgacatggtgtgccatggccggtgccggcgcatcaagctcccatacttcatcatggtcttcgcctccgtgcacttcgtgctctcccagctccccgacttccactccatctccagcgtctcgctcgccgccgccgtcatgtcggtcggctactcggcgatcgcgtggaccgcgtcggcggcgcaggggaaggcggcggaggcggaggccgactacagcctgcgcgccacgaccacgccagggaaggtgttcggcttcctgggcgcgctgggcgatgtggcgttcacgtacgccgggcacaacgtggtgctggagatccaggccaccatcccgtccacgccggggaagccgtccaagaagcccatgtggaagggcgtcatcgtcgcctacgtcgtcatcgtcgcgtgctacctccccgtcgtgctcgtcggctactgggccttcggcaacggcgtcgacgagaacatcctcatcaccctgaaccggccgcggtggctcatcgccgccgccaacatgatggtcgtcgtccacgtcgtcggcagctaccaggtgtacgccatgccggtgttcgacatgatcgagacggtgctggtcaggaagtactggttcacgccgggattcaggctccgtctcattgcccggactgtctacgttgcactcacaatgttcgtggccatcacattccccttcttcagcgagctgctcagtttcttcggtggattcgcctacgcacccacgagctacttccttccctgcatcatgtggctcatcatctacaagcccagaaggttcagtctctcatggttcaccaactggatatgcattgtcattggggtgctgctgatggtgctatcaccgattggcggacttcggcagatgattctgaaaatcaagacatacaaattctaccaagactactctggcctaagccataattaacacgcgcccatcatcggctgaaactggtttctaaatctcatcgatgccatggaattccaaaaaaaataaaacattctcagagaaagatacatacatgtacagtctcatgactaatgatgatcagtggtcttgttaatttgtcttgaaccatgaattggttatggattaccatatgcatatatgtatcagtattgtaggggaaatgtttgtgtgtgttcactttggactttgatagagtagcttgtagtgggacattgagaaagatgcatgggccttacatggtctatgttaaatcccatccccccctgatatcattgtatattcttttcttcttcaaatgattcttcgtaatatattattctatctgaaatc

SEQ ID NO: 57253 - DNA, 1872 bp, Zea Mays
ctagtccctgcctccgcctccgctacctctgacctctccaatccgttactgctcaaggctctgcgctagccgcccgcgcgtccggctccagcctctgccatgggatcagccggtgaggcactcccgccgccggccagtgagacgcgaccatgggacaactattctcaggccaagctttccacagtcgctcttgcgcccaaagggaggcgtgcggcgtcagacgcgccggcgggaggggaaggcggctggagcgggcaggacgagaagccggcggccgacgacgactggcttccgatcaacgcgaggaggaacgccaagtggtggggcgtgggcgtcacggtgctggtcctgtcgtgggtcatcacggtgtacacgctgtggcagatggtggagatgcacgagtgcgtgccggggaagcggttcgaccggtaccacgagctggggcagcacgcgttcggcgagaagctgggcctctggatcgtggtgccgcagcagctggtggtggaggtgggcctcaacatcgtgtacatgatcaccggcggccagtccctgcagaagttccacgacatggtgtgccatggccggtgccggcgcatcaagctcccatacttcatcatggtcttcgcctccgtgcacttcgtgctctcccagctccccgacttccactccatctccagcgtctcgctcgccgccgccgtcatgtcggtcggctactcggcgatcgcgtggaccgcgtcggcggcgcaggggaaggcggcggaggcggaggccgactacagcctgcgcgccacgaccacgccagggaaggtgttcggcttcctgggcgcgctgggcgatgtggcgttcacgtacgccgggcacaacgtggtgctggagatccaggccaccatcccgtccacgccggggaagccgtccaagaagcccatgtggaagggcgtcatcgtcgcctacgtcgtcatcgtcgcgtgctacctccccgtcgtgctcgtcggctactgggccttcggcaacggcgtcgacgagaacatcctcatcaccctgaaccggccgcggtggctcatcgccgccgccaacatgatggtcgtcgtccacgtcgtcggcagctaccaggtgtacgccatgccggtgttcgacatgatcgagacggtgctggtcaggaagtactggttcacgccgggattcaggctccgtctcattgcccggactgtctacgttgcactcacaatgttcgtggccatcacattccccttcttcagcgagctgctcagtttcttcggtggattcgcctacgcacccacgagctacttccttccctgcatcatgtggctcatcatctacaagcccagaaggttcagtctctcatggttcaccaactggatatgcattgtcattggggtgctgctgatggtgctatcaccgattggcggacttcggcagatgattctgaaaatcaagacatacaaattctaccaagactactctggcctaagccataattaacacgcgcccatcatcggctgaaactggtttctaaatctcatcgatgccatggaattccaaaaaaaataaaacattctcagagaaagatacatacatgtacagtctcatgactaatgatgatcagtggtcttgttaatttgtcttgaaccatgaattggttatggattaccatatgcatatatgtatcagtattgtaggggaaatgtttgtgtgtgttcactttggactttgatagagtagcttgtagtgggacattgagaaagatgcatgggccttacatggtctatgttaaatcccatccccccctgatatcattgtatattcttttcttcttcaaatgattcttcgtaatatattattctatctgaaatc

SEQ ID NO: 57254 - DNA, 592 bp, Zea Mays
ccgagctggtggcccttggagaacctattcgtcttccccatcattgctggctgcggctgcggagacacactgcgtagcctcctcctcccgggtagcaatgcgccgccttggccgtggaatttcgcccgcaattccggataagaacctaaccctaagcccccccgaggcgagacacgagagggggggctagcttattccgcggtcgccgggggagcaggaggcgaccccctaaccagaaccctcgattcgagggggcggggaagctcgagcgaaagctcccgcggcgaggggatcgagcggactcaccgagaaccagcaccgcccagcgcccgccagccgctgcaccccgatacaccagccggcggcgctgccacgagatctcgtggcctggcgcaggcgcaagcgccgccgtccgcggcgcgaaccttctagggcttcctctctcctcctcctcctcgccccgcgccgaggcggaggctgaggcggcgatggggggaggcgaggcggctggagactaggggtttctctctcctccgcccctctcgccctctctctctctctctctcttcgcgggcggcttctctcctcgctg

SEQ ID NO: 57255 - DNA, 2140 bp, Zea Mays
cggagtcggactctcaaagaagacctcgcatgtacgagatttttgccattataaaatacggatgccgcctcgtttcgttatttcgccgcctcgtttcgttatttgtttcgttatttcgccgcctcgttttgttatttcgccgccgttcgccgtcgtacagccgagccgccgccgagtcgagccggcaaagcgaagggaaggagagcggggtgaagaggagaggactccatggcgacagcctcagtgactttcaagtcacgggaggatcaccggaagcagctcgagctcgaggaggcgcgcaaggccgggctcgcgcctgcggaggttgacgaggatggaaacgagatcaatccccatattccccagtacatgtcctcggccccatggtatcttaatgctgagaagccgagtttgaagcatcaacggaagtggaagtcggatccgaactacaccaagtcgtggtatgatagaggcgcaaagcttttccaggccaacaagtacaggaaaggtgcttgcgaaaactgtggagccatgacacatgacaagaagtcttgcatggagcggcctcgaaatgtgggggctaaatggacaaatgtcaacatagctcctgatgagaaggttgaatcttttgagcttgactatgatggaaagcgcgatcgttggaatggttatgacccatcaacctacactcgagttatcgctgattatgaagctagagaagaagctaggaaaaagtatctgaaagaacagcagctcaagaaacttgaggagaaggatactgagaaggatgatgagaatgctggtagtgaagatgatgaagaagatggcctgaggatagatgaggccaaagttgatgagagtgcccagatggacttcgctaaggtagagaagcgtgtgcgcacaaccggtggtggaagcactggtactgttaggaacttgcgtatcagagaagacacggcaaaatatcttttgaatcttgatgttaactctgcatattatgatccaaaaactcgctccatgagggaagaccccttgccagatgcggatccaaatgataagttctatgtgggtgacaaccaaaatcgtcttagtggtcaagctctggagttcaagcaactcaacatccatgcatgggaagcttttgaaaaggggcaggatatccatatgcaagcagccccatctcaagcagaactgttgtataagagtttcaaggtcaagaaagaaatgttgaagtctgaacataaggataaaattatggagaagtatgggaatgctgcgtccgaagatgcaattcctcgggagctgctgcttgggcaaagtgagagagagattgagtatgaccgtactggtcgaataatcaaaggacaggatgtatctcttcccaagagcaaatatgaagaggatgtgttcattaataatcatacgagtgtgtggggttcatggtggaaagatcatcaatggggctacaagtgctgcaagcaaactatcaagaatagttactgtactggcttggctggaatagaagctgccgaggcatcagcagatctaatgaaggccaatatggctcgcaaggaggctgcagaagatgagcctgtacagcatgaagagaagcgattagccacttggggaaccgatgtgcctcaggatcttgttcttaacgagaagaagctccaggaatctctaaagaaggaaactgcgaggaggaaagaggagaaggatgaaaggaagaggaagtataacgtgaagtttaacgatgaggttactgcagaagacatggaggcctaccgtatgaagaggattcaccatgacgatcctatgaaagattttctcaactaaaagtgtggtaaatgtccgcactgccgtataacattggtggcaccctgccttgcagtgaagctgtgtaattgtaagatagactatgtacctgtccgaaccagggtggtgctgtaaactactctagtctagaatggctatgctttttacaagctgcgtgttgaaatgacatgatttctgatatcagaatccttgcttccatagttcccgtatccaagacacgggagccttcttcaggtgtatctaaccagaaacatgtggacatttttaccttaaatttgaccgacccgtcttattttaaaaaaat

SEQ ID NO: 57256 - DNA, 1913 bp, Zea Mays
atttcgccgcctcgtttcgttatttgtttcgttatttcgccgcctcgttttgttatttcgccgccgttcgccgtcgtacagccgagccgccgccgagtcgagccggcaaagcgaagggaaggagagcggggtgaagaggagaggactccatggcgacagcctcagtgactttcaagtcacgggaggatcaccggaagcagctcgagctcgaggaggcgcgcaaggccgggctcgcgcctgcggaggttgacgaggatggaaacgagatcaatccccatattccccagtacatgtcctcggccccatggtatcttaatgctgagaagccgagtttgaagcatcaacggaagtggaagtcggatccgaactacaccaagtcgtggtatgatagaggcgcaaagcttttccaggccaacaagtacaggaaaggtgcttgcgaaaactgtggagccatgacacatgacaagaagtcttgcatggagcggcctcgaaatgtgggggctaaatggacaaatgtcaacatagctcctgatgagaaggttgaatcttttgagcttgactatgatggaaagcgcgatcgttggaatggttatgacccatcaacctacactcgagttatcgctgattatgaagctagagaagaagctaggaaaaagtatctgaaagaacagcagctcaagaaacttgaggagaaggatactgagaaggatgatgagaatgctggtagtgaagatgatgaagaagatggcctgaggatagatgaggccaaagttgatgagagtgcccagatggacttcgctaaggtagagaagcgtgtgcgcacaaccggtggtggaagcactggtactgttaggtatgtactgcactgctactcagaaaacagatcatgttcctcctagtgctagggttcatgtgctaggatttatcagtttctagtgctagggttcatgtgtcaaggatttatcagcttctagtgctagggtcctgtgtaaaggatttattagcaaccaatttacatgctgatggtacttttttgttgccacaggaacttgcgtatcagagaagacacggcaaaatatcttttgaatcttgatgttaactctgcatattatgatccaaaaactcgctccatgagggaagaccccttgccagatgcggatccaaatgataagttctatgtgggtgacaaccaaaatcgtcttagtggtcaagctctggagttcaagcaactcaacatccatgcatgggaagcttttgaaaaggggcaggatatccatatgcaagcagccccatctcaagcagaactgcatcagcagatctaatgaaggccaatatggctcgcaaggaggctgcagaagatgagcctgtacagcatgaagagaagcgattagccacttggggaaccgatgtgcctcaggatcttgttcttaacgagaagaagctccaggaatctctaaagaaggaaactgcgaggaggaaagaggagaaggatgaaaggaagaggaagtataacgtgaagtttaacgatgaggttactgcagaagacatggaggcctaccgtatgaagaggattcaccatgacgatcctatgaaagattttctcaactaaaagtgtggtaaatgtccgcactgccgtataacattggtggcaccctgccttgcagtgaagctgtgtaattgtaagatagactatgtacctgtccgaaccagggtggtgctgtaaactactctagtctagaatggctatgctttttacaagctgcgtgttgaaatgacatgatttctgatatcagaatccttgcttccatagttcccgtatccaagacacgggagccttcttcaggtgtatctaaccagaaacatgtggacatttttaccttaaatttgaccgacccgtcttattttaaaaaaat

SEQ ID NO: 57257 - DNA, 2124 bp, Zea Mays
ccgatccgttgcgctcggcggttatctccctatccgtgactttcaagtcacgggaggatcaccggaagcagctcgagctcgaggaggcgcgcaaggccgggctcgcgcctgcggaggttgacgaggatggaaacgagatcaatccccatattccccagtacatgtcctcggccccatggtatcttaatgctgagaagccgagtttgaagcatcaacggaagtggaagtcggatccgaactacaccaagtcgtggtatgatagaggcgcaaagcttttccaggccaacaagtacaggaaaggtgcttgcgaaaactgtggagccatgacacatgacaagaagtcttgcatggagcggcctcgaaatgtgggggctaaatggacaaatgtcaacatagctcctgatgagaaggttgaatcttttgagcttgactatgatggaaagcgcgatcgttggaatggttatgacccatcaacctacactcgagttatcgctgattatgaagctagagaagaagctaggaaaaagtatctgaaagaacagcagctcaagaaacttgaggagaaggatactgagaaggatgatgagaatgctggtagtgaagatgatgaagaagatggcctgaggatagatgaggccaaagttgatgagagtgcccagatggacttcgctaaggtagagaagcgtgtgcgcacaaccggtggtggaagcactggtactgttaggtatgtactgcactgctactcagaaaacagatcatgttcctcctagtgctagggttcatgtgctaggatttatcagtttctagtgctagggttcatgtgtcaaggatttatcagcttctagtgctagggtcctgtgtaaaggatttattagcaaccaatttacatgctgatggtacttttttgttgccacaggaacttgcgtatcagagaagacacggcaaaatatcttttgaatcttgatgttaactctgcatattatgatccaaaaactcgctccatgagggaagaccccttgccagatgcggatccaaatgataagttctatgtgggtgacaaccaaaatcgtcttagtggtcaagctctggagttcaagcaactcaacatccatgcatgggaagcttttgaaaaggggcaggatatccatatgcaagcagccccatctcaagcagaactgttgtataagagtttcaaggtcaagaaagaaatgttgaagtctgaacataaggataaaattatggagaagtatgggaatgctgcgtccgaagatgcaattcctcgggagctgctgcttgggcaaagtgagagagagattgagtatgaccgtactggtcgaataatcaaaggacaggatgtatctcttcccaagagcaaatatgaagaggatgtgttcattaataatcatacgagtgtgtggggttcatggtggaaagatcatcaatggggctacaagtgctgcaagcaaactatcaagaatagttactgtactggcttggctggaatagaagctgccgaggcatcagcagatctaatgaaggccaatatggctcgcaaggaggctgcagaagatgagcctgtacagcatgaagagaagcgattagccacttggggaaccgatgtgcctcaggatcttgttcttaacgagaagaagctccaggaatctctaaagaaggaaactgcgaggaggaaagaggagaaggatgaaaggaagaggaagtataacgtgaagtttaacgatgaggttactgcagaagacatggaggcctaccgtatgaagaggattcaccatgacgatcctatgaaagattttctcaactaaaagtgtggtaaatgtccgcactgccgtataacattggtggcaccctgccttgcagtgaagctgtgtaattgtaagatagactatgtacctgtccgaaccagggtggtgctgtaaactactctagtctagaatggctatgctttttacaagctgcgtgttgaaatgacatgatttctgatatcagaatccttgcttccatagttcccgtatccaagacacgggagccttcttcaggtgtatctaaccagaaacatgtggacatttttaccttaaatttgaccgacccgtcttattttaaaaaaat

SEQ ID NO: 57258 - DNA, 1259 bp, Zea Mays
atcactgatgtaatttcaatatgtagtttgtctagtttgaatcttcttctaagccagtggctgtggctccatcgtccgattatctatccatggttactagcgacctcgagtttctgattgagttcggtaacagcctcccgcggcgccggcggacacgcaggcggcgcaattgatacagacgctgttcaagccctcggtcgtgtcggcgcccgcggcggcaggtcgattccgtgttggtcgcagacttgtaggcaccttcggctcccctcctgccggatgccaatggcctggtcaggcctgttaaagggcatgtgtggtaggtaatgagaaactatttatgattggtggacatgagggagactttatgactaaaccaggatcacctgtttttaaatgttggtggaactacagaaaagcatgccatcaccaagaagatgattcttgttggtgaagtcttccgttttgatttggaagcattgacctggtcagtcattgggcgcatgcctttccgaatcaagacatccttatctaggtactgactactgagaggggaggggggctctgttttacttctgggcagcgagatcatgggcctgacaatccagctccaaagaaagttgttgggagtctgggactatgtggagaacgaggctgcacttgtgatggcagaagttgtgacagtttgtttcccctgaaaattgtagatttgcatctgatttcctgtccaacagctaggtccctttcagagaagagagttgcttgttttgattcccacatccggaatccgaagttcagatatgtctccaaacaaccagaagatatggacataagcaactaccaaagatcattcttattggagatattcagcgcaaagcccacccaccaaataatcatgatgttcttctttccctagctgttgcagagaggtcggaactgtttgggctttcactagccaattaaaatattaagtagcaagctgagtaccatgtcagtattaaatctgtctctgtaattgcctccgaaattggtgtgcgtgtttctcatcttgttggtttcttagtatatgtaatctgcacttagaggtacaatataggtgcacaggggcaggacctgtacttaaatgttagaatacctgttcagggtttggagtttttcccgtgtaattactatttcacccctctgtaatgggcctggcccagtttactcgcatctattaatatatcacccaacccctgttagggttagggttttcaccggtc

SEQ ID NO: 57259 - DNA, 656 bp, Zea Mays
cttgttggcatctagtccttaggcactcatactgtttatcctttgtagtgggcatgtgtggtaggtaatgagaaactatttatgattggtggacatgagggagactttatgactaaaccaggatcacctgtttttaaatgttggtggaactacagaaaagcatgccatcaccaagaagatgattcttgttggtgaagtcttccgttttgatttggaagcattgacctggtcagtcattgggcgcatgcctttccgaatcaagacatccttatctaggtactgactactgagaggggaggggggctctgttttacttctgggcagcgagatcatgggcctgacaatccagctccaaagaaagttgttgggagtctgggactatgtggagaacgaggctgcacttgtgatggcagaagttgtgacagtttgtttcccctgaaaattgtagatttgcatctgatttcctgtccaacagctaggtccctttcagagaagagagttgcttgttttgattcccacatccggaatccgaagttcagatatgtctccaaacaaccagaagatatggacgtaagcaactaccaaagatcattcttattggagatattcagcgcaaagcccacccaccaaataatcatgatgttcttctttcccta

SEQ ID NO: 57260 - DNA, 944 bp, Zea Mays
ctcggtcagtgtaccgaaatcggtcagcccattcattcacccggtgccgacaggtagggacgttatgtcatccgctcaaccgtgtgcgccctcactggatcataggcccgcgcaatatctccgttccaccacacaagaccgctgacgcgtgggaccacttcgatagctcctccttcctagaatcctagcaccatctcaacagaatccacgccgtacagaaaacaaattcgattgagatcttctcagatcgattgcaaacgattttctgttaggattaatctcgggcaccgcggctcctcgtcctcccaagccaaggcgccgtgggagctcgggatctcatgtcgtgctgtcacctagcagagagaagggccaaccatgagcaattcgccatgtcatcgccaagattcccagagggtagccaagggagttcacgagcgagggtcgagcctaatcccagctgtcttaggggcaggggagcatccgaaccatgggaatttccccgccggagttcgtgggcagaggaagatccgcaccacgcctacatcatcgctctgggtatacgatgtggtcgaggatattcgccattgcatgtggatgttcatcgtagcagcgcctaggcggaatcgctctccgggccatcggaattcgtcgccggagatgggccccgccgcggagccgcgacgaggatgggactctgcatagtgcaatcatcgaagcgaggtgacgtggaacctgaagcttcaattggagaagtatctggagttacataaaaaggcaagatatgtctttgatcactttctttacctaataattattctattaatcaccgtggcatagttaggttaagttgatgggacctaataagttacctaattttgtttactctataccttgcaaacaaatgaaatattgggtagtcttgctattgctttatctagttttgg

SEQ ID NO: 57261 - DNA, 928 bp, Zea Mays
ccgaaatcggtcagcccattcattcacccggtgccgacaggtagggacgttatgtcatccgctcaaccgtgtgcgccctcactggatcataggcccgcgcaatatctccgttccaccacacaagaccgctgacgcgtgggaccacttcgatagctcctccttcctagaatcctagcaccatctcaacagaatccacgccgtacagaaaacaaattcgattgagatcttctcagatcgattgcaaacgattttctgttaggattaatctcgggcaccgcggctcctcgtcctcccaagccaaggcgccgtgggagctcgggatctcatgtcgtgctgtcacctagcagagagaagggccaaccatgagcaattcgccatgtcatcgccaagattcccagagggtagccaagggagttcacgagcgagggtcgagcctaatcccagctgtcttaggggcaggggagcatccgaaccatgggaatttccccgccggagttcgtgggcagaggaagatccgcaccacgcctacatcatcgctctgggtatacgatgtggtcgaggatattcgccattgcatgtggatgttcatcgtagcagcgcctaggcggaatcgctctccgggccatcggaattcgtcgccggagatgggccccgccgcggagccgcgacgaggatgggactctgcatagtgcaatcatcgcgaggtgacgtggaacctgaagcttcaattggagaagtatctggagttacataaaaaggcaagatatgtctttgatcactttctttacctaataattattctattaatcaccgtggcatagttaggttaagttgatgggacctaataagttacctaattttgtttactctataccttgcaaacaaatgaaatattgggtagtcttgctattgctttatctagttttgg

SEQ ID NO: 57262 - DNA, 2658 bp, Zea Mays
gccccctccctgcatcacaaccttttttccgttcagtctgtttccccactctctccccaaagccaaacaccggaccacccctcccccctccattcctccctctccctacacctccgctccctctcgccgctttcccccacccaatccgaccgctgggccgcctcctctccgccggggccggcgattccccggagattccgcgcgattcggctcagattctgggctcctcttgtggtttctcggcgaatcggcgggatcgggactcccggctggagaatcttccgtctctttcgctaactgtttggatcattttacgtggagattgcatgccatcaccttccttgaagtgaaaaatatatgggctgatcttggcatttcatgggaggttttgaagatgatgaaccaccctcaaaacgcgcaagagcatcctcagtagaatctgcaagtttaccagactgtttcttgttttcaaaatctgccaatcctttgggaagtacaatggctagacctttgccttcccaagggaaagaagctatggttggttccaagggtgttattaagaaggaggaatttgttaggataatcagcaaaactctgtatagtcttggatatgagaaaagtggagcagttctggaagaggaatcagggattactttacataaccctatggtgaatcttttcagagagcaggtgattgatgggaattgggataatgcggttgttaccttgaataagattggccttcaagatgtaaacatcatgaaatctgcggcatttttgatattggagcagaaattctttgaacttctaagaaatgacaatgtcatgggcgctatgaagactttacgacgtgagatcacaccccttggtgtgaatagaaaaagagtgcatgaactgtcgacttgtatgatttcttgttctccacagcagttgttccttgggttttcaaaacttggcattgattcttctagttcaaggtttaagcttctagaggaattgcaaaaggtgctccctccaactgttatggtgccagagaggaggttagaaaatttagttgagcaagcacttactgtacaaagagatgcttgctacttccataattctgttgatgggttgtcactttacattgatcatcattgcgggaaagatcagctaccatctcgcacgttacaggtaaaaaaagctctggcacctgctgcggtgtttgcttggagtgctaaggccctacataagcgctagtgctgtgtctgctggttagccacgcatgttttgcatgcacatcatgatgaagtgtggtttgtccaattttcaaacaatgggaagtatttagcctcagcgtcaaatgataaatctgcaattatatgggaggttaatgaagatggagagctattactgaggcatacattgagtggtcatcaaaagtcagtgatgatggttgcatggagttcagatgattgccagctcctcacatgtgggcaggaggaagccatcagacgctgggatgttaaatctggcaaatgtcttcatgtttatgaacatcctggcattggtttgagatcatgtgcttggtttcgagatggaaagcaaatattgtctggtctagctgatcaaaccttttgcatttgggatttagatggtaaggaagtagattgctggaaagggcagagatcggcaacaacatctgattttgctgtagcaaaagatggaaatcttataataagcttgagtagggacaatgcaattcttctatttgatagggagacaaaacatgagagaataattgaagagggtagtacaattacttcattttctctatcagaagatggtgatttcctgcttgtaaatcttgtaagtgaagagattcatttgtggaacataagaaatgatcctgttcgagtcaaccgatacaatggccataagcacagccggtttgtgataaggtcttgttttggcggatctgagcaggcgttcattgctagtgggagtgaagattcacaggtctacatatggcatagagccactggtgatctcattgagactctcgctggtcactcgggcacagtcaactgcgtaagttggaatcctgtgaatccccacatgctcgcatcagcgagcgacgatcacacagttcgtatatggggggcaaaggtcagtcttaagcgcaaggatgttgggagcagcaattgcaacagtaacgggttccaccactcgaatggaaatgcacatggcaatggtttcgctcaccagtgcaacgggaacagcaccaaatgatttgccaaggcaatgtacccccatggatggttgactggcatctgtaaatccccctttacttccctcctagaacaagagtcgccgccgaaatagtaaaagaaaagaaaagcaaaaaagaaagctgcagcacaaagtgtgggcaacctgctgggtttcgtgcgccatctttcccttgttctatcatgacagccatcacatttatttcttaattcaagatgggatggaattatgatattactttgcgtctttgatatcttgatttatcctccctgattgattgtaacttcattttgatggtggtgatggttaactctgattgctgtctaaacaaccggacggaacttatcataaatttaagtaaaatcagtcatctagttcaagggatca

SEQ ID NO: 57263 - DNA, 2432 bp, Zea Mays
gccccctccctgcatcacaaccttttttccgttcagtctgtttccccactctctccccaaagccaaacaccggaccacccctcccccctccattcctccctctccctacacctccgctccctctcgccgctttcccccacccaatccgaccgctgggccgcctcctctccgccggggccggcgattccccggagattccgcgcgattcggctcagattctgggctcctcttgtggtttctcggcgaatcggcgggatcgggactcccggctggagaatcttccgtctctttcgctaactgtttggatcattttacgtggagattgcatgccatcaccttccttgaagtgaaaaatatatgggctgatcttggcatttcatgggaggttttgaagatgatgaaccaccctcaaaacgcgcaagagcatcctcagtagaatctgcaagtttaccagactgtttcttgttttcaaaatctgccaatcctttgggaagtacaatggctagacctttgccttcccaagggaaagaagctatggttggttccaagggtgttattaagaaggaggaatttgttaggataatcagcaaaactctgtatagtcttggatatgagaaaagtggagcagttctggaagaggaatcagggattactttacataaccctatggtgaatcttttcagagagcaggtgattgatgggaattgggataatgcggttgttaccttgaataagattggccttcaagatgtaaacatcatgaaatctgcggcatttttgatattggagcagaaattctttgaacttctaagaaatgacaatgtcatgggcgctatgaagactttacgacgtgagatcacaccccttggtgtgaatagaaaaagagtgcatgaactgtcgacttgtatgatttcttgttctccacagcagttgttccttgggttttcaaaacttggcattgattcttctagttcaaggtttaagcttctagaggaattgcaaaaggtgctccctccaactgttatggtgccagagaggaggttttgcatgcacatcatgatgaagtgtggtttgtccaattttcaaacaatgggaagtatttagcctcagcgtcaaatgataaatctgcaattatatgggaggttaatgaagatggagagctattactgaggcatacattgagtggtcatcaaaagtcagtgatgatggttgcatggagttcagatgattgccagctcctcacatgtgggcaggaggaagccatcagacgctgggatgttaaatctggcaaatgtcttcatgtttatgaacatcctggcattggtttgagatcatgtgcttggtttcgagatggaaagcaaatattgtctggtctagctgatcaaaccttttgcatttgggatttagatggtaaggaagtagattgctggaaagggcagagatcggcaacaacatctgattttgctgtagcaaaagatggaaatcttataataagcttgagtagggacaatgcaattcttctatttgatagggagacaaaacatgagagaataattgaagagggtagtacaattacttcattttctctatcagaagatggtgatttcctgcttgtaaatcttgtaagtgaagagattcatttgtggaacataagaaatgatcctgttcgagtcaaccgatacaatggccataagcacagccggtttgtgataaggtcttgttttggcggatctgagcaggcgttcattgctagtgggagtgaagattcacaggtctacatatggcatagagccactggtgatctcattgagactctcgctggtcactcgggcacagtcaactgcgtaagttggaatcctgtgaatccccacatgctcgcatcagcgagcgacgatcacacagttcgtatatggggggcaaaggtcagtcttaagcgcaaggatgttgggagcagcaattgcaacagtaacgggttccaccactcgaatggaaatgcacatggcaatggtttcgctcaccagtgcaacgggaacagcaccaaatgatttgccaaggcaatgtacccccatggatggttgactggcatctgtaaatccccctttacttccctcctagaacaagagtcgccgccgaaatagtaaaagaaaagaaaagcaaaaaagaaagctgcagcacaaagtgtgggcaacctgctgggtttcgtgcgccatctttcccttgttctatcatgacagccatcacatttatttcttaattcaagatgggatggaattatgatattactttgcgtctttgatatcttgatttatcctccctgattgattgtaacttcattttgatggtggtgatggttaactctgattgctgtctaaacaaccggacggaacttatcataaatttaagtaaaatcagtcatctagttcaagggatca

SEQ ID NO: 57264 - DNA, 2645 bp, Zea Mays
gccccctccctgcatcacaaccttttttccgttcagtctgtttccccactctctccccaaagccaaacaccggaccacccctcccccctccattcctccctctccctacacctccgctccctctcgccgctttcccccacccaatccgaccgctgggccgcctcctctccgccggggccggcgattccccggagattccgcgcgattcggctcagattctgggctcctcttgtggtttctcggcgaatcggcgggatcgggactcccggctggagaatcttccgtctctttcgctaactgtttggatcattttacgtggagattgcatgccatcaccttccttgaagtgaaaaatatatgggctgatcttggcatttcatgggaggttttgaagatgatgaaccaccctcaaaacgcgcaagagcatcctcagtagaatctgcaagtttaccagactgtttcttgttttcaaaatctgccaatcctttgggaagtacaatggctagacctttgccttcccaagggaaagaagctatggttggttccaagggtgttattaagaaggaggaatttgttaggataatcagcaaaactctgtatagtcttggatatgagaaaagtggagcagttctggaagaggaatcagggattactttacataaccctatggtgaatcttttcagagagcaggtgattgatgggaattgggataatgcggttgttaccttgaataagattggccttcaagatgtaaacatcatgaaatctgcggcatttttgatattggagcagaaattctttgaacttctaagaaatgacaatgtcatgggcgctatgaagactttacgacgtgagatcacaccccttggtgtgaatagaaaaagagtgcatgaactgtcgacttgtatgatttcttgttctccacagcagttgttccttgggttttcaaaacttggcattgattcttctagttcaaggtttaagcttctagaggaattgcaaaaggtgctccctccaactgttatggtgccagagaggaggttagaaaatttagttgagcaagcacttactgtacaaagagatgcttgctacttccataattctgttgatgggttgtcactttacattgatcatcattgcgggaaagatcagctaccatctcgcacgttacaggtaaaaaaagctctggcacctgctgcggtgtttgcttggagtgctaaggccctacataagcgctagtgctgtgtctgctggttttgcatgcacatcatgatgaagtgtggtttgtccaattttcaaacaatgggaagtatttagcctcagcgtcaaatgataaatctgcaattatatgggaggttaatgaagatggagagctattactgaggcatacattgagtggtcatcaaaagtcagtgatgatggttgcatggagttcagatgattgccagctcctcacatgtgggcaggaggaagccatcagacgctgggatgttaaatctggcaaatgtcttcatgtttatgaacatcctggcattggtttgagatcatgtgcttggtttcgagatggaaagcaaatattgtctggtctagctgatcaaaccttttgcatttgggatttagatggtaaggaagtagattgctggaaagggcagagatcggcaacaacatctgattttgctgtagcaaaagatggaaatcttataataagcttgagtagggacaatgcaattcttctatttgatagggagacaaaacatgagagaataattgaagagggtagtacaattacttcattttctctatcagaagatggtgatttcctgcttgtaaatcttgtaagtgaagagattcatttgtggaacataagaaatgatcctgttcgagtcaaccgatacaatggccataagcacagccggtttgtgataaggtcttgttttggcggatctgagcaggcgttcattgctagtgggagtgaagattcacaggtctacatatggcatagagccactggtgatctcattgagactctcgctggtcactcgggcacagtcaactgcgtaagttggaatcctgtgaatccccacatgctcgcatcagcgagcgacgatcacacagttcgtatatggggggcaaaggtcagtcttaagcgcaaggatgttgggagcagcaattgcaacagtaacgggttccaccactcgaatggaaatgcacatggcaatggtttcgctcaccagtgcaacgggaacagcaccaaatgatttgccaaggcaatgtacccccatggatggttgactggcatctgtaaatccccctttacttccctcctagaacaagagtcgccgccgaaatagtaaaagaaaagaaaagcaaaaaagaaagctgcagcacaaagtgtgggcaacctgctgggtttcgtgcgccatctttcccttgttctatcatgacagccatcacatttatttcttaattcaagatgggatggaattatgatattactttgcgtctttgatatcttgatttatcctccctgattgattgtaacttcattttgatggtggtgatggttaactctgattgctgtctaaacaaccggacggaacttatcataaatttaagtaaaatcagtcatctagttcaagggatca

SEQ ID NO: 57265 - DNA, 2391 bp, Zea Mays
ctccccctctgctccgatcgctaaccctcgctgaccgccgcgtgggacggggagcttgtccgcttacgtgtgccggttactgcccgcgccgccctggctagaatcttccgtctctttcgctaactgtttggatcattttacgtggagattgcatgccatcaccttccttgaagtgaaaaatatatgggctgatcttggcatttcatgggaggttttgaagatgatgaaccaccctcaaaacgcgcaagagcatcctcagtagaatctgcaagtttaccagactgtttcttgttttcaaaatctgccaatcctttgggaagtacaatggctagacctttgccttcccaagggaaagaagctatggttggttccaagggtgttattaagaaggaggaatttgttaggataatcagcaaaactctgtatagtcttggatatgagaaaagtggagcagttctggaagaggaatcagggattactttacataaccctatggtgaatcttttcagagagcaggtgattgatgggaattgggataatgcggttgttaccttgaataagattggccttcaagatgtaaacatcatgaaatctgcggcatttttgatattggagcagaaattctttgaacttctaagaaatgacaatgtcatgggcgctatgaagactttacgacgtgagatcacaccccttggtgtgaatagaaaaagagtgcatgaactgtcgacttgtatgatttcttgttctccacagcagttgttccttgggttttcaaaacttggcattgattcttctagttcaaggtttaagcttctagaggaattgcaaaaggtgctccctccaactgttatggtgccagagaggaggttagaaaatttagttgagcaagcacttactgtacaaagagatgcttgctacttccataattctgttgatgggttgtcactttacattgatcatcattgcgggaaagatcagctaccatctcgcacgttacaggttttgcatgcacatcatgatgaagtgtggtttgtccaattttcaaacaatgggaagtatttagcctcagcgtcaaatgataaatctgcaattatatgggaggttaatgaagatggagagctattactgaggcatacattgagtggtcatcaaaagtcagtgatgatggttgcatggagttcagatgattgccagctcctcacatgtgggcaggaggaagccatcagacgctgggatgttaaatctggcaaatgtcttcatgtttatgaacatcctggcattggtttgagatcatgtgcttggtttcgagatggaaagcaaatattgtctggtctagctgatcaaaccttttgcatttgggatttagatggtaaggaagtagattgctggaaagggcagagatcggcaacaacatctgattttgctgtagcaaaagatggaaatcttataataagcttgagtagggacaatgcaattcttctatttgatagggagacaaaacatgagagaataattgaagagggtagtacaattacttcattttctctatcagaagatggtgatttcctgcttgtaaatcttgtaagtgaagagattcatttgtggaacataagaaatgatcctgttcgagtcaaccgatacaatggccataagcacagccggtttgtgataaggtcttgttttggcggatctgagcaggcgttcattgctagtgggagtgaagattcacaggtctacatatggcatagagccactggtgatctcattgagactctcgctggtcactcgggcacagtcaactgcgtaagttggaatcctgtgaatccccacatgctcgcatcagcgagcgacgatcacacagttcgtatatggggggcaaaggtcagtcttaagcgcaaggatgttgggagcagcaattgcaacagtaacgggttccaccactcgaatggaaatgcacatggcaatggtttcgctcaccagtgcaacgggaacagcaccaaatgatttgccaaggcaatgtacccccatggatggttgactggcatctgtaaatccccctttacttccctcctagaacaagagtcgccgccgaaatagtaaaagaaaagaaaagcaaaaaagaaagctgcagcacaaagtgtgggcaacctgctgggtttcgtgcgccatctttcccttgttctatcatgacagccatcacatttatttcttaattcaagatgggatggaattatgatattactttgcgtctttgatatcttgatttatcctccctgattgattgtaacttcattttgatggtggtgatggttaactctgattgctgtctaaacaaccggacggaacttatcataaatttaagtaaaatcagtcatctagttcaagggatca

SEQ ID NO: 57266 - DNA, 2180 bp, Zea Mays
gggacggggagcttgtccgcttacgtgtgccggttactgcccgcgccgccctggctagaatcttccgtctctttcgctaactgtttggatcattttacgtggagattgcatgccatcaccttccttgaagtgaaaaatatatgggctgatcttggcatttcatgggaggttttgaagatgatgaaccaccctcaaaacgcgcaagagcatcctcagtagaatctgcaagtttaccagactgtttcttgttttcaaaatctgccaatcctttgggaagtacaatggctagacctttgccttcccaagggaaagaagctatggttggttccaagggtgttattaagaaggaggaatttgttaggataatcagcaaaactctgtatagtcttggatatgagaaaagtggagcagttctggaagaggaatcagggattactttacataaccctatggtgaatcttttcagagagcaggtgattgatgggaattgggataatgcggttgttaccttgaataagattggccttcaagatgtaaacatcatgaaatctgcggcatttttgatattggagcagaaattctttgaacttctaagaaatgacaatgtcatgggcgctatgaagactttacgacgtgagatcacaccccttggtgtgaatagaaaaagagtgcatgaactgtcgacttgtatgatttcttgttctccacagcagttgttccttgggttttcaaaacttggcattgattcttctagttcaaggtttaagcttctagaggaattgcaaaaggttttgcatgcacatcatgatgaagtgtggtttgtccaattttcaaacaatgggaagtatttagcctcagcgtcaaatgataaatctgcaattatatgggaggttaatgaagatggagagctattactgaggcatacattgagtggtcatcaaaagtcagtgatgatggttgcatggagttcagatgattgccagctcctcacatgtgggcaggaggaagccatcagacgctgggatgttaaatctggcaaatgtcttcatgtttatgaacatcctggcattggtttgagatcatgtgcttggtttcgagatggaaagcaaatattgtctggtctagctgatcaaaccttttgcatttgggatttagatggtaaggaagtagattgctggaaagggcagagatcggcaacaacatctgattttgctgtagcaaaagatggaaatcttataataagcttgagtagggacaatgcaattcttctatttgatagggagacaaaacatgagagaataattgaagagggtagtacaattacttcattttctctatcagaagatggtgatttcctgcttgtaaatcttgtaagtgaagagattcatttgtggaacataagaaatgatcctgttcgagtcaaccgatacaatggccataagcacagccggtttgtgataaggtcttgttttggcggatctgagcaggcgttcattgctagtgggagtgaagattcacaggtctacatatggcatagagccactggtgatctcattgagactctcgctggtcactcgggcacagtcaactgcgtaagttggaatcctgtgaatccccacatgctcgcatcagcgagcgacgatcacacagttcgtatatggggggcaaaggtcagtcttaagcgcaaggatgttgggagcagcaattgcaacagtaacgggttccaccactcgaatggaaatgcacatggcaatggtttcgctcaccagtgcaacgggaacagcaccaaatgatttgccaaggcaatgtacccccatggatggttgactggcatctgtaaatccccctttacttccctcctagaacaagagtcgccgccgaaatagtaaaagaaaagaaaagcaaaaaagaaagctgcagcacaaagtgtgggcaacctgctgggtttcgtgcgccatctttcccttgttctatcatgacagccatcacatttatttcttaattcaagatgggatggaattatgatattactttgcgtctttgatatcttgatttatcctccctgattgattgtaacttcattttgatggtggtgatggttaactctgattgctgtctaaacaaccggacggaacttatcataaatttaagtaaaatcagtcatctagttcaagggatca

SEQ ID NO: 57267 - DNA, 2442 bp, Zea Mays
ttactgcccgcgccgccctggctaggaattgagaggaattggaaagtaatctagtaatgaattgggaagcactttctaattctatatattggattcaattcatgggaagggtacccctcaccttcaatgtcactggtggcttcatttttatgaatcttccgtctctttcgctaactgtttggatcattttacgtggagattgcatgccatcaccttccttgaagtgaaaaatatatgggctgatcttggcatttcatgggaggttttgaagatgatgaaccaccctcaaaacgcgcaagagcatcctcagtagaatctgcaagtttaccagactgtttcttgttttcaaaatctgccaatcctttgggaagtacaatggctagacctttgccttcccaagggaaagaagctatggttggttccaagggtgttattaagaaggaggaatttgttaggataatcagcaaaactctgtatagtcttggatatgagaaaagtggagcagttctggaagaggaatcagggattactttacataaccctatggtgaatcttttcagagagcaggtgattgatgggaattgggataatgcggttgttaccttgaataagattggccttcaagatgtaaacatcatgaaatctgcggcatttttgatattggagcagaaattctttgaacttctaagaaatgacaatgtcatgggcgctatgaagactttacgacgtgagatcacaccccttggtgtgaatagaaaaagagtgcatgaactgtcgacttgtatgatttcttgttctccacagcagttgttccttgggttttcaaaacttggcattgattcttctagttcaaggtttaagcttctagaggaattgcaaaaggtgctccctccaactgttatggtgccagagaggaggttagaaaatttagttgagcaagcacttactgtacaaagagatgcttgctacttccataattctgttgatgggttgtcactttacattgatcatcattgcgggaaagatcagctaccatctcgcacgttacaggttttgcatgcacatcatgatgaagtgtggtttgtccaattttcaaacaatgggaagtatttagcctcagcgtcaaatgataaatctgcaattatatgggaggttaatgaagatggagagctattactgaggcatacattgagtggtcatcaaaagtcagtgatgatggttgcatggagttcagatgattgccagctcctcacatgtgggcaggaggaagccatcagacgctgggatgttaaatctggcaaatgtcttcatgtttatgaacatcctggcattggtttgagatcatgtgcttggtttcgagatggaaagcaaatattgtctggtctagctgatcaaaccttttgcatttgggatttagatggtaaggaagtagattgctggaaagggcagagatcggcaacaacatctgattttgctgtagcaaaagatggaaatcttataataagcttgagtagggacaatgcaattcttctatttgatagggagacaaaacatgagagaataattgaagagggtagtacaattacttcattttctctatcagaagatggtgatttcctgcttgtaaatcttgtaagtgaagagattcatttgtggaacataagaaatgatcctgttcgagtcaaccgatacaatggccataagcacagccggtttgtgataaggtcttgttttggcggatctgagcaggcgttcattgctagtgggagtgaagattcacaggtctacatatggcatagagccactggtgatctcattgagactctcgctggtcactcgggcacagtcaactgcgtaagttggaatcctgtgaatccccacatgctcgcatcagcgagcgacgatcacacagttcgtatatggggggcaaaggtcagtcttaagcgcaaggatgttgggagcagcaattgcaacagtaacgggttccaccactcgaatggaaatgcacatggcaatggtttcgctcaccagtgcaacgggaacagcaccaaatgatttgccaaggcaatgtacccccatggatggttgactggcatctgtaaatccccctttacttccctcctagaacaagagtcgccgccgaaatagtaaaagaaaagaaaagcaaaaaagaaagctgcagcacaaagtgtgggcaacctgctgggtttcgtgcgccatctttcccttgttctatcatgacagccatcacatttatttcttaattcaagatgggatggaattatgatattactttgcgtctttgatatcttgatttatcctccctgattgattgtaacttcattttgatggtggtgatggttaactctgattgctgtctaaacaaccggacggaacttatcataaatttaagtaaaatcagtcatctagttcaagggatca

SEQ ID NO: 57268 - DNA, 521 bp, Zea Mays
acgtatgatgcgtgaagctttgatagatggatcaggatgtgcaaaggcagcgggataccaagggcgtgtcgtgtttggggactattgccaggttccctagccacacgagacgctcgccagccagcctgttggctctccctctctctctcggcagcaaggagaactttgctagcacgggacacaagataggtgaacacaaaatccaaacgacctgctcggtccatttttttttaattattgtagcaggatccggcaaaagtcccgaatgaacagctggcagcagcgtttcgatcgagttgatctgcttgcgggtgttcaaagagcacatggctggtggttttgggtatatcttcaataatgtgccatttgcgatgtaattattccgttcattttgtcggcaagaaataaaggctccaccggctgttataatcgagtcgtttagatagatctacatgtgcatctatctataatgtatccattcgatcaatcacagatcgacgcacagcagcgtcaaaatccgg

SEQ ID NO: 57269 - DNA, 1108 bp, Zea Mays
tccaatcctctctctctcctttggcttttttcgatcgaggttagtttactgggatttgtggcacatttgtatgattgtatatgtatgacttcttctctatgtggcgtgtttgtttggtctctctccctgcttgcttgtacaataatgttcgtttccatccatgccgttttctgataatattatttgttaacctttatatgtagtaactgctcgctgttttctgataatcatgatttatacgaaatttacaatggaagatttgcatgacttggataataaatatcaatgcaactcattttagtagcgtgattaatagggactctctaattgtttgtttgttactgcacagttagatactgcatttttattttgtgttggagcctttgcattgcaaagcataggtgtctaagcattggaaccactaagggcatggtctacaggacattttaagtgtatgaaactaatggcatttggtttcaaaatattggcaatatcattatcttacaatgctcaattatgttactaacttgtcacaagaaacggaaggatttatcaaggggaaaaggggcaatggaaggcttggttgttgcttcaaacggttttagcaagaagcatatgattcagataaccatagcagcgggataccaagggcgtgtcgtgtttggggactattgccaggttccctagccacacgagacgctcgccagccagcctgttggctctccctctctctctcggcagcaaggagaactttgctagcacgggacacaagataggtgaacacaaaatccaaacgacctgctcggtccatttttttttaattattgtagcaggatccggcaaaagtcccgaatgaacagctggcagcagcgtttcgatcgagttgatctgcttgcgggtgttcaaagagcacatggctggtggttttgggtatatcttcaataatgtgccatttgcgatgtaattattccgttcattttgtcggcaagaaataaaggctccaccggctgttataatcgagtcgtttagatagatctacatgtgcatctatctataatgtatccattcgatcaatcacagatcgacgcacagcagcgtcaaaatccgg

SEQ ID NO: 57270 - DNA, 759 bp, Zea Mays
tctctccctgcttgcttgtacaataatgttcgtttccatccatgccgttttctgataatattatttgttaacctttatatgtagtaactgctcgctgttttctgataatcatgatttatacgaaatttacaatggaagatttgcatgacttggataataaatatcaatgcaactcattttagtagcgtgattaatagggactctctaattgtttgtttgttactgcacagttagatactgcatttttattttgtgttggagcctttgcattgcaaagcataggtgtctaagcattggaaccactaagggcatggtctacaggacattttaagtgtatgaaactaatggcatttggtttcaaaatattggcaatatcattatcttacaatgctcaattatgttactaacttgtcacaagaaacggaaggatttatcaaggggaaaaggggcaatggaaggcttggttgttgcttcaaacggttttagcaagaagcatatgattcagataaccatagtaagcaccaccaattatgctacaaagtatactgaaacatcatcaggatcataggttccttataaatccttgatttacagagtttctctaagttagagcaagtataataaggtgacatagccgggttgtagaagatgtcacattacatgtgattagatgtggtgacaccaaagaaagaaataaagagaagtaggtgtttgtttgggattataatatgccctgatttggtggacagagatcacgag

SEQ ID NO: 57271 - DNA, 1560 bp, Zea Mays
atttacctattgccattcgtaggatagggccctagcgcgattagaagggacacgagcaaccgatgctgccgcagcctcacactcaaccaatatttctcctgtatacaaagaaaaagaaatcttccatacatcagactttgactcgcttctatctcgcgcaagccgagaagaaaggagcccgtctacgcgagagatgggcggctacgagaacggcgagtcgacggcggccgcggcgcttgctgacggtggtgtgattctgggcgtggacggcggcaccaccaacaccgtttgcgtctgcctgccggctgcaatgacgccgccggagtctccggccaccgtacccgtgcttgcacgcgccgtcgccggctgctcaaaccgcaattccgtcggagaaaatgctgccttggaaactctcgagcaggtcatgacacaggctctagcattggccaacacagatcgttcagctgtccgagcagtttgtttagccgtatcaggagtgaaccatccttcagatcagctgaggatgctggaatggatccgggatctgttcccagacaatgcaaaaaattatgtagaaaatgatgcagtggcggccctggctagtggtacaatgggaaagctgcatggttgtgtgttaattgcgggcactggatgcattgcttatggagttacagaagatggaaaagtagcaagagcagctggtgctgggcctgttttgggcgactggggccctgacagcagttataaaagcatacgatggtcgtgggccacaaactagacttacaagagatatccttgagaagcttgatctttcttcaccagatgaaatcatagggtggacatatgcggatccatcttgggctcgtattgcagcacttgtaccagttgtggtatcttctgctgaagatggtgatgaagtagctaacaaaatcttgcatgattcagtccaagagttggctgacactgttatagcggttgttcagcgtcttagattgtgtggcgaagatggaaaggacatgtttccacttgttttggttggaggggtccttgaaggaaataaaaagtgggatatcagtggtgaggtcataaaatgtatttccaaggtcttcccgggcactgatcctatttggcctgaggtggaaccagcaatcggtgctgccttgctagcctggagccatcaccacaaagggttgaaattggagaatggaagttgattcccagcatttaagggtgtcaattgtacattgaggagttggcgagccaaaggggtattggtcccaatgatacattcatcggcatgaaggcttttcgttcccagcaaaaagaataaatcgtggatgggtgcaaacatgcggtgtggatagaacatatttctgatgtaagtaggtagtaagaattgttcaaatattcctctgattctaactctcggtgattgttgtatgtgttctgtttgtgtttggaggtagtaacatgtatctgtctaccatggataattgatcgtcaaatgttcagatctttttttacatacattgtgcttggcctctataaactttagttggc

SEQ ID NO: 57272 - DNA, 1557 bp, Zea Mays
atttacctattgccattcgtaggatagggccctagcgcgattagaagggacacgagcaaccgatgctgccgcagcctcacactcaaccaatatttctcctgtatacaaagaaaaagaaatcttccatacatcagactttgactcgcttctatctcgcgcaagccgagaagaaaggagcccgtctacgcgagagatgggcggctacgagaacggcgagtcgacggcggccgcggcgcttgctgacggtggtgtgattctgggcgtggacggcggcaccaccaacaccgtttgcgtctgcctgccggctgcaatgacgccgccggagtctccggccaccgtacccgtgcttgcacgcgccgtcgccggctgctcaaaccgcaattccgtcggaggtcatgacacaggctctagcattggccaacacagatcgttcagctgtccgagcagtttgtttagccgtatcaggagtgaaccatccttcagatcagctgaggatgctggaatggatccgggatctgttcccagacaatgcaaaaaattatgtagaaaatgatgcagtggcggccctggctagtggtacaatgggaaagctgcatggttgtgtgttaattgcgggcactggatgcattgcttatggagttacagaagatggaaaagtagcaagagcagctggtgctgggcctgttttgggcgactggggtagtggatatggcattgctgcacaggccctgacagcagttataaaagcatacgatggtcgtgggccacaaactagacttacaagagatatccttgagaagcttgatctttcttcaccagatgaaatcatagggtggacatatgcggatccatcttgggctcgtattgcagcacttgtaccagttgtggtatcttctgctgaagatggtgatgaagtagctaacaaaatcttgcatgattcagtccaagagttggctgacactgttatagcggttgttcagcgtcttagattgtgtggcgaagatggaaaggacatgtttccacttgttttggttggaggggtccttgaaggaaataaaaagtgggatatcagtggtgaggtcataaaatgtatttccaaggtcttcccgggcactgatcctatttggcctgaggtggaaccagcaatcggtgctgccttgctagcctggagccatcaccacaaagggttgaaattggagaatggaagttgattcccagcatttaagggtgtcaattgtacattgaggagttggcgagccaaaggggtattggtcccaatgatacattcatcggcatgaaggcttttcgttcccagcaaaaagaataaatcgtggatgggtgcaaacatgcggtgtggatagaacatatttctgatgtaagtaggtagtaagaattgttcaaatattcctctgattctaactctcggtgattgttgtatgtgttctgtttgtgtttggaggtagtaacatgtatctgtctaccatggataattgatcgtcaaatgttcagatctttttttacatacattgtgcttggcctctataaactttagttggc

SEQ ID NO: 57273 - DNA, 1087 bp, Zea Mays
atccctgatgctctggattgtcagaatgatgctgcttttgtggatctgttcccagacaatgcaaaaaattatgtagaaaatgatgcagtggcggccctggctagtggtacaatgggaaagctgcatggttgtgtgttaattgcgggcactggatgcattgcttatggagttacagaagatggaaaagtagcaagagcagctggtgctgggcctgttttgggcgactggggtagtggatatggcattgctgcacaggccctgacagcagttataaaagcatacgatggtcgtgggccacaaactagacttacaagagatatccttgagaagcttgatctttcttcaccagatgaaatcatagggtggacatatgcggatccatcttgggctcgtattgcagcacttgtaccagttgtggtatcttctgctgaagatggtgatgaagtagctaacaaaatcttgcatgattcagtccaagagttggctgacactgttatagcggttgttcagcgtcttagattgtgtggcgaagatggaaaggacatgtttccacttgttttggttggaggggtccttgaaggaaataaaaagtgggatatcagtggtgaggtcataaaatgtatttccaaggtcttcccgggcactgatcctatttggcctgaggtggaaccagcaatcggtgctgccttgctagcctggagccatcaccacaaagggttgaaattggagaatggaagttgattcccagcatttaagggtgtcaattgtacattgaggagttggcgagccaaaggggtattggtcccaatgatacattcatcggcatgaaggcttttcgttcccagcaaaaagaataaatcgtggatgggtgcaaacatgcggtgtggatagaacatatttctgatgtaagtaggtagtaagaattgttcaaatattcctctgattctaactctcggtgattgttgtatgtgttctgtttgtgtttggaggtagtaacatgtatctgtctaccatggataattgatcgtcaaatgttcagatctttttttacatacattgtgcttggcctctataaactttagttggc

SEQ ID NO: 57274 - DNA, 3290 bp, Zea Mays
gaactattgaaggctcgttaatttgtgatccgtcgcaacgcacgggcatatacctggtagatattattggagtcggttgatgcgagatgctttgtgaaggtgaaggaccaaagctaaaccccacgtccccctcacgcgctcccatctcccaccccccggcacgcgccgaaacccaagctcgcgcgaaatccaaggtaagaatccagggggggcggcggcgccctcaccccccacccagcaccccctcctcaccgtcgagcccgtcggagtcctttcctcccgagttcgtcgagtgcgtagccgtctcgccggtctccgatgacgacgaatcagatgattgctgcgtttgcgacggcgacgatgtggactccatccgctacttcaaccgccaactgcgtgaggcgaaagagttcatcaggaggcaattcaaaatcaaatggtacaatgtttcttcgcgagtatccaattccaaggaattcaagtgccgtatgtatttacgatacacgtggctggtcaaacgacctagagaaaaatttcaaaatgctgcatcagtggatgacaaaaggaataagccatggggagacaacaatgtgggatgatgatgaaggcaataagatagggaacatgaaaccattggggaggcaatacagttttcttcgttacaaaatccggaaggtcaatttcgtgttatttgttgttgatggtgttgctgtcctcgagtcaatggatgacagcaataaaggatacactgagatacttcgtcaaacttttatgtatccgttcttgtcgattggagatgataaacctgttgttgttgtcacacatggtgatagactgtcgatacagcaacgtgttcacgttcaagctgagttagcagagctactagatattcctgcccagcaaatttatgatataccaggatccgatgatgaccaaactgatatggttgtactggatatgctacattactgtgtccgacatgcagagcagaacctccctgttaagttaaactaccatttggaggtgcttgggcatgaaactctcaataaaatggcagagcaattgatgggcttagatgcagtcattgaagtcgccattattttcctatgcatcctggtcctgctgcttcgattttccgataaattggtgcagccgtagctacgttctgcacttggggttgtaactaagaaaacatcatggtgactacttgtcctcctcagctagtagagtaccctaactacttttatgtgtgcattgtatatattgacagaacgcgctgtgctggaaatctgtatatatttacaataatactaaatccgatctcgaatatttgtcgcaactaaaacacgacaaataaaaaagaacggacaggacagggtataatacaatacaactagtttctcacgaactgcccgaggaagaattctcagtacaggcaactgaaaactaagcaagaacgccgccatcatcacatcttaacattgtcccaagtccaccggagccatgcaactcggttcttcggagtggtgatgcacctaaatgccgcgcgtcggatcggcgacctaaacagctcagtagctatgaagaacagctcagatccctgagacacgccgtccttttctacgagctgcagcaactctaccacctcttcttgctcacgcctgatggcactgctgctctcgttcctgcttccgagcatgctctcggacacgccttcggcatagtaccccgtgttcttaggcttcttggctgggcggctgccgaccatgtggatgtggtggtcctggcttgaccatggggacgcacggccagacctgtaacaccccaggctctcctccggacaagcggcattgtcccctgacgctcgagcatggttctcttcctcgcctcctccgcccccgcctggtgttctgtcaccggcgccaccacctacggacggcgaatttgtgccgtctttggggccgaaaagaacggcgagcgcgtcctcgtgcgcgagcgccttgccacggaagtcttctgctgcactggtctcctgctagccagcaacggcgaatacgtaaggtaagaggaccgaccattcagaataaaccattctgcaatttaataaccacagatgtccagctaacggtggcactgttaaactcacagaaagcaagaactggcattaagcacaacgggctgtacttaccgtgatctggttgtcccatccgtcagcatcctgtgtaacagtgctcgaactcttgtcccacccgcctcctcctccaggtccagccttgtcgttctgcagtctccacaggctgtacatcctcttcaggccgttgaacttgttctgcagctgcttggtatcataagacctgcgtgtctcttccttgaagttgcggtacagattgtgccaccctatcttggtcaaccccttgctgttgtagttctgcttttccttctcggcgatgcagaggtccaggaatattcttgtggtggtgtcgtcccagtgagcacggcatcgatccatctgcgcgtcacttttcctttttacatgtctttctgattacaagatctatacgccacacgtgcatcaccaacaacaggatacaaggaaagttagctaacacttgcctcgacggggttgtgcctcgctggagttgtatgcagatcgtagccacaaacttcaggtgcagagcatgatgacgtcgaggagtaagccagagttgtcaccctccagtggcgtatctgaaaattcactaaccagtcagaattatcaggatatttgtttatcgcctgaatttctaactaataattgtatcatgtgcatgcctagaaaactatgtgcatgatagaacaggtcatgcgcaaacacaaatttccaatcagtaggtgcctgcactattccatagttgtactcgggctggaactgcacttacatttgagttggcctaaaattgaactctaggagcaaaaaaaatgttgcaaacaaaatgttctgcaggagtgccatttagtttgaaaggaagctgcaatacatggatccaaaacttaccttgcaacagctatcttctagagctgaatgccggttatcgaaattaacagaagctgttttttcagggaccaaccaaaagatagaagtagaattagtacatgcagcaacatgaatacatatgttcaagggagctgtttgcagctattgcttggattaggttgacaacataggacccactttgggagagctccacttcctgattcttcagctctactccttgattctttgattgaggattccattggattcctaggag

SEQ ID NO: 57275 - DNA, 3656 bp, Zea Mays
tggagtcggttgatgcgagatgctttgtgaaggtgaaggaccaaagctaaaccccacgtccccctcacgcgctcccatctcccaccccccggcacgcgccgaaacccaagctcgcgcgaaatccaaggtaagaatccagggggggcggcggcgccctcaccccccacccagcaccccctcctcaccgtcgagcccgtcggagtcctttcctcccgagttcgtcgagtgcgtagccgtctcgccggtctccgatgacgacgaatcagatgattgctgcgtttgcgacggcgacgatgtggactccatccgctacttcaaccgccaactgcgtgaggcgaaagagttcatcaggaggtataagcctggggactggattgagggagtcggaagtgcaaaggctggacattttgtcttgcctgaggtcaccacattgctcttggtgggccctagaggttctggcaagagcacacttgtaaaccgaattactagggtctttgacaaggatgatgatccttttgcaccagatcgagcacaggtgtcatgcaattcaaaatcaaatggtacaatgtttcttcgcgagtatccaattccaaggaattcaagtgccgtatgtatttacgatacacgtggctggtcaaacgacctagagaaaaatttcaaaatgctgcatcagtggatgacaaaaggaataagccatggggagacaacaatgtgggatgatgatgaaggcaataagatagggaacatgaaaccattggggaggcaatacagttttcttcgttacaaaatccggaaggtcaatttcgtgttatttgttgttgatggtgttgctgtcctcgagtcaatggatgacagcaataaaggatacactgagatacttcgtcaaacttttatgtatccgttcttgtcgattggagatgataaacctgttgttgttgtcacacatggtgatagactgtcgatacagcaacgtgttcacgttcaagctgagttagcagagctactagatattcctgcccagcaaatttatgatataccaggatccgatgatgaccaaactgatatggttgtactggatatgctacattactgtgtccgacatgcagagcagaacctccctgttaagttaaactaccatttggaggtttgagttccttccctatgtccttatcatggattatattatctctcgcccatgcaatataagaaattaacgttttcgcatatgttgaacagatcagaccgttttgttttcatagagtacatgttagtggcgattcacctgttttttgtcactcatggcacttaaatctctctctataatatatataccacttgatttgttgatatttggaagatacacctgctctaaagctcatgttttgacaggtgcttgggcatgaaactctcaataaaatggcagagcaattgatgggcttagatgcagtcattgaagtcgccattattttcctatgcatcctggtcctgctgcttcgattttccgataaattggtgcagccgtagctacgttctgcacttggggttgtaactaagaaaacatcatggtgactacttgtcctcctcagctagtagagtaccctaactacttttatgtgtgcattgtatatattgacagaacgcgctgtgctggaaatctgtatatatttacaataatactaaatccgatctcgaatatttgtcgcaactaaaacacgacaaataaaaaagaacggacaggacagggtataatacaatacaactagtttctcacgaactgcccgaggaagaattctcagtacaggcaactgaaaactaagcaagaacgccgccatcatcacatcttaacattgtcccaagtccaccggagccatgcaactcggttcttcggagtggtgatgcacctaaatgccgcgcgtcggatcggcgacctaaacagctcagtagctatgaagaacagctcagatccctgagacacgccgtccttttctacgagctgcagcaactctaccacctcttcttgctcacgcctgatggcactgctgctctcgttcctgcttccgagcatgctctcggacacgccttcggcatagtaccccgtgttcttaggcttcttggctgggcggctgccgaccatgtggatgtggtggtcctggcttgaccatggggacgcacggccagacctgtaacaccccaggctctcctccggacaagcggcattgtcccctgacgctcgagcatggttctcttcctcgcctcctccgcccccgcctggtgttctgtcaccggcgccaccacctacggacggcgaatttgtgccgtctttggggccgaaaagaacggcgagcgcgtcctcgtgcgcgagcgccttgccacggaagtcttctgctgcactggtctcctgctagccagcaacggcgaatacgtaaggtaagaggaccgaccattcagaataaaccattctgcaatttaataaccacagatgtccagctaacggtggcactgttaaactcacagaaagcaagaactggcattaagcacaacgggctgtacttaccgtgatctggttgtcccatccgtcagcatcctgtgtaacagtgctcgaactcttgtcccacccgcctcctcctccaggtccagccttgtcgttctgcagtctccacaggctgtacatcctcttcaggccgttgaacttgttctgcagctgcttggtatcataagacctgcgtgtctcttccttgaagttgcggtacagattgtgccaccctatcttggtcaaccccttgctgttgtagttctgcttttccttctcggcgatgcagaggtccaggaatattcttgtggtggtgtcgtcccagtgagcacggcatcgatccatctgcgcgtcacttttcctttttacatgtctttctgattacaagatctatacgccacacgtgcatcaccaacaacaggatacaaggaaagttagctaacacttgcctcgacggggttgtgcctcgctggagttgtatgcagatcgtagccacaaacttcaggtgcagagcatgatgacgtcgaggagtaagccagagttgtcaccctccagtggcgtatctgaaaattcactaaccagtcagaattatcaggatatttgtttatcgcctgaatttctaactaataattgtatcatgtgcatgcctagaaaactatgtgcatgatagaacaggtcatgcgcaaacacaaatttccaatcagtaggtgcctgcactattccatagttgtactcgggctggaactgcacttacatttgagttggcctaaaattgaactctaggagcaaaaaaaatgttgcaaacaaaatgttctgcaggagtgccatttagtttgaaaggaagctgcaatacatggatccaaaacttaccttgcaacagctatcttctagagctgaatgccggttatcgaaattaacagaagctgttttttcagggaccaaccaaaagatagaagtagaattagtacatgcagcaacatgaatacatatgttcaagggagctgtttgcagctattgcttggattaggttgacaacataggacccactttgggagagctccacttcctgattcttcagctctactccttgattctttgattgaggattccattggattcctaggag

SEQ ID NO: 57276 - DNA, 3404 bp, Zea Mays
tggagtcggttgatgcgagatgctttgtgaaggtgaaggaccaaagctaaaccccacgtccccctcacgcgctcccatctcccaccccccggcacgcgccgaaacccaagctcgcgcgaaatccaaggtaagaatccagggggggcggcggcgccctcaccccccacccagcaccccctcctcaccgtcgagcccgtcggagtcctttcctcccgagttcgtcgagtgcgtagccgtctcgccggtctccgatgacgacgaatcagatgattgctgcgtttgcgacggcgacgatgtggactccatccgctacttcaaccgccaactgcgtgaggcgaaagagttcatcaggaggtataagcctggggactggattgagggagtcggaagtgcaaaggctggacattttgtcttgcctgaggtcaccacattgctcttggtgggccctagaggttctggcaagagcacacttgtaaaccgaattactagggtctttgacaaggatgatgatccttttgcaccagatcgagcacaggcaattcaaaatcaaatggtacaatgtttcttcgcgagtatccaattccaaggaattcaagtgccgtatgtatttacgatacacgtggctggtcaaacgacctagagaaaaatttcaaaatgctgcatcagtggatgacaaaaggaataagccatggggagacaacaatgtgggatgatgatgaaggcaataagatagggaacatgaaaccattggggaggcaatacagttttcttcgttacaaaatccggaaggtcaatttcgtgttatttgttgttgatggtgttgctgtcctcgagtcaatggatgacagcaataaaggatacactgagatacttcgtcaaacttttatgtatccgttcttgtcgattggagatgataaacctgttgttgttgtcacacatggtgatagactgtcgatacagcaacgtgttcacgttcaagctgagttagcagagctactagatattcctgcccagcaaatttatgatataccaggatccgatgatgaccaaactgatatggttgtactggatatgctacattactgtgtccgacatgcagagcagaacctccctgttaagttaaactaccatttggaggtgcttgggcatgaaactctcaataaaatggcagagcaattgatgggcttagatgcagtcattgaagtcgccattattttcctatgcatcctggtcctgctgcttcgattttccgataaattggtgcagccgtagctacgttctgcacttggggttgtaactaagaaaacatcatggtgactacttgtcctcctcagctagtagagtaccctaactacttttatgtgtgcattgtatatattgacagaacgcgctgtgctggaaatctgtatatatttacaataatactaaatccgatctcgaatatttgtcgcaactaaaacacgacaaataaaaaagaacggacaggacagggtataatacaatacaactagtttctcacgaactgcccgaggaagaattctcagtacaggcaactgaaaactaagcaagaacgccgccatcatcacatcttaacattgtcccaagtccaccggagccatgcaactcggttcttcggagtggtgatgcacctaaatgccgcgcgtcggatcggcgacctaaacagctcagtagctatgaagaacagctcagatccctgagacacgccgtccttttctacgagctgcagcaactctaccacctcttcttgctcacgcctgatggcactgctgctctcgttcctgcttccgagcatgctctcggacacgccttcggcatagtaccccgtgttcttaggcttcttggctgggcggctgccgaccatgtggatgtggtggtcctggcttgaccatggggacgcacggccagacctgtaacaccccaggctctcctccggacaagcggcattgtcccctgacgctcgagcatggttctcttcctcgcctcctccgcccccgcctggtgttctgtcaccggcgccaccacctacggacggcgaatttgtgccgtctttggggccgaaaagaacggcgagcgcgtcctcgtgcgcgagcgccttgccacggaagtcttctgctgcactggtctcctgctagccagcaacggcgaatacgtaaggtaagaggaccgaccattcagaataaaccattctgcaatttaataaccacagatgtccagctaacggtggcactgttaaactcacagaaagcaagaactggcattaagcacaacgggctgtacttaccgtgatctggttgtcccatccgtcagcatcctgtgtaacagtgctcgaactcttgtcccacccgcctcctcctccaggtccagccttgtcgttctgcagtctccacaggctgtacatcctcttcaggccgttgaacttgttctgcagctgcttggtatcataagacctgcgtgtctcttccttgaagttgcggtacagattgtgccaccctatcttggtcaaccccttgctgttgtagttctgcttttccttctcggcgatgcagaggtccaggaatattcttgtggtggtgtcgtcccagtgagcacggcatcgatccatctgcgcgtcacttttcctttttacatgtctttctgattacaagatctatacgccacacgtgcatcaccaacaacaggatacaaggaaagttagctaacacttgcctcgacggggttgtgcctcgctggagttgtatgcagatcgtagccacaaacttcaggtgcagagcatgatgacgtcgaggagtaagccagagttgtcaccctccagtggcgtatctgaaaattcactaaccagtcagaattatcaggatatttgtttatcgcctgaatttctaactaataattgtatcatgtgcatgcctagaaaactatgtgcatgatagaacaggtcatgcgcaaacacaaatttccaatcagtaggtgcctgcactattccatagttgtactcgggctggaactgcacttacatttgagttggcctaaaattgaactctaggagcaaaaaaaatgttgcaaacaaaatgttctgcaggagtgccatttagtttgaaaggaagctgcaatacatggatccaaaacttaccttgcaacagctatcttctagagctgaatgccggttatcgaaattaacagaagctgttttttcagggaccaaccaaaagatagaagtagaattagtacatgcagcaacatgaatacatatgttcaagggagctgtttgcagctattgcttggattaggttgacaacataggacccactttgggagagctccacttcctgattcttcagctctactccttgattctttgattgaggattccattggattcctaggag

SEQ ID NO: 57277 - DNA, 3117 bp, Zea Mays
ctcatctcctgatgtgtttcgttttgctgttttttcatgattcgtggcatggactgaatcgtataagcctggggactggattgagggagtcggaagtgcaaaggctggacattttgtcttgcctgaggtcaccacattgctcttggtgggccctagaggttctggcaagagcacacttgtaaaccgaattactagggtctttgacaaggatgatgatccttttgcaccagatcgagcacaggtgtcatgcaattcaaaatcaaatggtacaatgtttcttcgcgagtatccaattccaaggaattcaagtgccgtatgtatttacgatacacgtggctggtcaaacgacctagagaaaaatttcaaaatgctgcatcagtggatgacaaaaggaataagccatggggagacaacaatgtgggatgatgatgaaggcaataagatagggaacatgaaaccattggggaggcaatacagttttcttcgttacaaaatccggaaggtcaatttcgtgttatttgttgttgatggtgttgctgtcctcgagtcaatggatgacagcaataaaggatacactgagatacttcgtcaaacttttatgtatccgttcttgtcgattggagatgataaacctgttgttgttgtcacacatggtgatagactgtcgatacagcaacgtgttcacgttcaagctgagttagcagagctactagatattcctgcccagcaaatttatgatataccaggatccgatgatgaccaaactgatatggttgtactggatatgctacattactgtgtccgacatgcagagcagaacctccctgttaagttaaactaccatttggaggtgcttgggcatgaaactctcaataaaatggcagagcaattgatgggcttagatgcagtcattgaagtcgccattattttcctatgcatcctggtcctgctgcttcgattttccgataaattggtgcagccgtagctacgttctgcacttggggttgtaactaagaaaacatcatggtgactacttgtcctcctcagctagtagagtaccctaactacttttatgtgtgcattgtatatattgacagaacgcgctgtgctggaaatctgtatatatttacaataatactaaatccgatctcgaatatttgtcgcaactaaaacacgacaaataaaaaagaacggacaggacagggtataatacaatacaactagtttctcacgaactgcccgaggaagaattctcagtacaggcaactgaaaactaagcaagaacgccgccatcatcacatcttaacattgtcccaagtccaccggagccatgcaactcggttcttcggagtggtgatgcacctaaatgccgcgcgtcggatcggcgacctaaacagctcagtagctatgaagaacagctcagatccctgagacacgccgtccttttctacgagctgcagcaactctaccacctcttcttgctcacgcctgatggcactgctgctctcgttcctgcttccgagcatgctctcggacacgccttcggcatagtaccccgtgttcttaggcttcttggctgggcggctgccgaccatgtggatgtggtggtcctggcttgaccatggggacgcacggccagacctgtaacaccccaggctctcctccggacaagcggcattgtcccctgacgctcgagcatggttctcttcctcgcctcctccgcccccgcctggtgttctgtcaccggcgccaccacctacggacggcgaatttgtgccgtctttggggccgaaaagaacggcgagcgcgtcctcgtgcgcgagcgccttgccacggaagtcttctgctgcactggtctcctgctagccagcaacggcgaatacgtaaggtaagaggaccgaccattcagaataaaccattctgcaatttaataaccacagatgtccagctaacggtggcactgttaaactcacagaaagcaagaactggcattaagcacaacgggctgtacttaccgtgatctggttgtcccatccgtcagcatcctgtgtaacagtgctcgaactcttgtcccacccgcctcctcctccaggtccagccttgtcgttctgcagtctccacaggctgtacatcctcttcaggccgttgaacttgttctgcagctgcttggtatcataagacctgcgtgtctcttccttgaagttgcggtacagattgtgccaccctatcttggtcaaccccttgctgttgtagttctgcttttccttctcggcgatgcagaggtccaggaatattcttgtggtggtgtcgtcccagtgagcacggcatcgatccatctgcgcgtcacttttcctttttacatgtctttctgattacaagatctatacgccacacgtgcatcaccaacaacaggatacaaggaaagttagctaacacttgcctcgacggggttgtgcctcgctggagttgtatgcagatcgtagccacaaacttcaggtgcagagcatgatgacgtcgaggagtaagccagagttgtcaccctccagtggcgtatctgaaaattcactaaccagtcagaattatcaggatatttgtttatcgcctgaatttctaactaataattgtatcatgtgcatgcctagaaaactatgtgcatgatagaacaggtcatgcgcaaacacaaatttccaatcagtaggtgcctgcactattccatagttgtactcgggctggaactgcacttacatttgagttggcctaaaattgaactctaggagcaaaaaaaatgttgcaaacaaaatgttctgcaggagtgccatttagtttgaaaggaagctgcaatacatggatccaaaacttaccttgcaacagctatcttctagagctgaatgccggttatcgaaattaacagaagctgttttttcagggaccaaccaaaagatagaagtagaattagtacatgcagcaacatgaatacatatgttcaagggagctgtttgcagctattgcttggattaggttgacaacataggacccactttgggagagctccacttcctgattcttcagctctactccttgattctttgattgaggattccattggattcctaggag

SEQ ID NO: 57278 - DNA, 1508 bp, Zea Mays
acgcacgccaggcagtgcattcttcttccccgctcgcagaggctccctgcagccatctccctctctccttccacatcctagccaactccagccccttggtcatgcgctccctctctcaggtccgagctcaagaggttgacgcccaggctggagaccgagctcgcctctgccctggctgcattggtggccgaagttctcgtcgttggtggagatctcggccagtcctgcaagggctcctcccatggccgcctccctggcgcacctcgccagcagcagggagtctccaagtgcaggcgagcagcagctcctcctctcctccatgggcgcgcaaccccttccccttggcttcacctccctcggcggcgcccttcttccccaagcaaggagcagcagctcgtcctcagcaacgcgccgcgactctctctgctcgtgcgcgggatttgccgagcaggaggtccccatggccggcgcgcgcccctgctgcatttccccctgcgagctcgggcttccccctcggcagccccacctggccgccattttccccaagtgctggtgcatgggaactctgtcccctctgtccagaaaacgcagagctcgagcacaactctctgctcccttccatggcatgccatagctcctcctcatggcgccccactccctgcaggcaagctgcagcccctccagctccttccatggcgcctagttcatatgcacggccgggatccatcggttcctgtgttccccatggctgagctcgccccatggccaggagcttgacaccgaccaccttcctgtgtcccttgccgcaggagcagtagctcttgcctgcgccctctccctgctcttgtcgaagccgacgtcccctgctcctactctcttccccacaaaacagcagccgcagcgagctcgccgtcaacctcgcgcagcagctgcgacgccagttcacgcagccacatgggttctcgctgtgtcgcgccctcggcgtgctcgacgaaatgccgcagcagcagcagcgacgcccttcgctgcgtcgcactcgccaggacgggcctcacgctatcgatctgcgcagcatttgcgcgtcgccgtcaatccgcgctagctatcgatgtcgtgcctcgtgctcaacctatgcgacgaaatgctagccggtggacaacacatgcgactcactgatccggccaggttgcttttgtttcatttacgatttagtcgatgacgtgaatatgtgcgtgaaaatataattgtatgaatggacgcgagtagaaagaaaatgaagtagaaaagaactcggatgtttttatatttttatatttgataggaaaaatatgtgatgcgttgtttaaatgcgaaaactaagttacaaaatgcggattttgttttgggaaatgcgtcgatatgtgtttatgtgaaaagtgtatttgttttatgcaacgtgatgggattcgtaattatataggggatataattgttaatgtgacgagtagtttagacaatgctaatttgcg

SEQ ID NO: 57279 - DNA, 850 bp, Zea Mays
ccctattcttggccatttccatcatcttaaatgctgcataactcccagtgtacaactgctgccacttttgacgactgtgccctcgagtaagttgcaactctagcacggccatcaaaactcgagcagatgccgattcaacagaatcctgcccaataggaatgctttccattaatcgggcctggtgatgatacacaaatgggtcacttaaggcaactgcagggaacaacctcatagatgtggcttgtatttcttcccatttctggtaacaaatggttgttagcgcctctaaggcagctacctgagcaccctcccaaggagtcattccttcagcatggaacatccaatatggccaagatggttttctagcacgttctggaatacgcactactacctcataccatggttgtcctctaagaaccgtgcgtgaccactggtacttgggtgcttcggtatatccgacttcttgaagtagtcgccacaggaccactggaacaccaaaatctcgtagaaagtctccaactcccgtaggggcttcttgttgattcatttatagagaagggcaacggatacactctattcactaaagatgtatgaacaaggtagatgattcatagctacgcagggggtttaacttaaaattgtatgacatgatgcatgtgtaattacagaatcaaccttggttgattcacaccttctatacattgcactcttcctatctggtctttaaaataaactcttcagaatttcttagataagaagggaaaagattttgtagataagactttagaaaatcttttgaagatgcctaataatatctgcagagaagggctacgctccgataccagctgtg

SEQ ID NO: 57280 - DNA, 205 bp, Zea Mays
ggtgagccgtgccacggaatcgggagctccaagtgggccatttttggtaagcagaactggcgatgcgggatgaaccggaagccgggttacggtgccaaattgcgtgctaacctagaacccacaaagggtgttggtcgattaagacagcaggacggtggtcatggaagtcgaaatccgctaaggagtgtgtaacaactcacctgcc

SEQ ID NO: 57281 - DNA, 273 bp, Zea Mays
gtcacattacatatatatatttttttttgtcacaaaatgcacatacaaataaaatatccagcatgatggaacaatttagtagcatgtcttttattaattgttcttggacatggtgttctcatatgatgatgcatcaagatcaaactcacataaagagaaattgttttctctattggtgttttatctagcaattacaaagtgggtgttacaaatcctaccccccttaaaaataatctcgtccccgagatttaagaagaactagagaaaaggtgg

SEQ ID NO: 57282 - DNA, 454 bp, Zea Mays
cagagccaatccttttcccgaagttacggatccgttttgccgacttcccttgcctacattgttccattggccagaggctgttcaccttggagacctgatggggttatgagtacgaccgggcgtggacggtattcggtcctccggattttcaagggccgccgggggcgcaccggacaccgcgcgatgtgcggtgctcttccggccgctggaccctacctccggctgaaccgattccagggttggcgggccgttaagcagaaaagataactcttcccgaggcccccgccggcgtctctggacttcctaacgtcgccgtctgccgccacgtcccggctcgggaaatcttaacccgattccctttcgggtgacgcgcgtgatcgcgctatctgccgggtttcccccgtcccttaggatcggcttacccatgtgcaagtgccgttcacatggaaccttt

SEQ ID NO: 57283 - DNA, 1644 bp, Zea Mays
aaggagagaggtgggaggagaaaggaagcggcgaagccctgccggattgttgatctgaaggaagcagatgcaaaacatgtatcgggagaagctatggcggaagaggggtcatcccccggagttatatcccaacgcgtctagtaaggatgctcctgttcctcctgacctccctgtacctaactgtgactgtgggagaccggctgtagtatttcgatcgagacatccagacatggctcctcattgcttttacacatgcagcagttttaatgatcatgcgaagtgcttttttctagtggatcgacggtcctgataagtttgaccctaggtacctccttttcgaccattggtggagagggaggaatacacgtgagcgctttaagcggtgggtgcctcctcccctgaaccccccgccaatgacggaggaggagaagaaccttgccacaaatagacgactagagtctccgcctccatacgattgcggagatcgtgctgttatatgcccggagaaccagcaggactttgtgtatcctaatagtgactatccatacggtaggcgaaagtgttttttagagagtggttgtattggcctaagtctcattggccggagccaaaggaaaaggagaagaagaaaaaagagaggaagtacgaacctgtactatgcagatgtggtgttgaagctaagtatggactagttccttcagagcttggagtaggatatttttgtggtcatatggtagactacgaagaggagaccaggaaatgcacttgggagtactacgatgataaagatgaagtgaagcatgagataaggtcgaacaaactcatgggagagaagatgcagtgtggatctcagctcattgattcgtacattaaacagtgcggacagaagatacgtaggtttgccgaagaacttggctgtaatagcccgatgcgtgttgagcggagaaaaaggaaggtggcttacgagaagagggcacaggaggctagggaaatgccggcggccagagccgaggaggaaatgctggacaatcttgctggtcatctgtgtaccaagattggatgcaccgggaagcacatcgtagaggaggcccgtgcaagatacgtggagcagaaaatggcagaggtggagttgctggcggaggaggaaggcgacacttcaagattgagtgagcttctggagctagctgagactggattacatgtggaggaggaggaatttatgtctcaggctgccgatcaagcagaggccgctcattacaagcgaaaggcagatgaggcaagtgcaggtgtaatgttgttggcccaggaggaggagaacgagttaatatcccaggctgcagatgtggtggaagcagcatactacaagagaaaggccgaggagggaaatgcaggacaatcaagcaagtggaacaatattgtgattgaggattgtgcgacggatgacacagacgacgagttgcttactgattatgtttcggactgacttcgctacccatgtgtttggtagtaccttgtattctgcatgggttgtttcattgtattgtactctttatgtatttgtaatcacgaaaaaaattcgcaagagtttcccttgttttagtcccatccacagttataataagcaaacgcaatatgatctaagca

SEQ ID NO: 57284 - DNA, 1631 bp, Zea Mays
acatcctctcttcatactatctaccacaactagttgccagagttcgtcatggacttctacaaagagttcgtggagacttcgtccgatgacgattccgaagactgaggtcgacactcgacaccatgtacgtttagcaagcccttgagcaactaggtgttggaggttcgagcgggcgtcgtagacgctcttccttgccacgtctagtaatccatagggatcacagtgctagcgaaaatctgataaagctccactacttcggtccaaatcctgtctatcccgcccacattttccaacgaaggagagtgctcgtaaagatatcgagagaacttttggtgtgttgcagtcgcgtcgggcagtactccgcgggccagcttatggttgggttcgcaatcacctcacggagatgatgattgcatgcattatcatgcataacatgattgtcgaggacgaaggcgaaggagcagaaaatgttgattttgttggtgccaccccacctcctgatctttcgactgcaattccgtaagtccggaacgagtggttgaacacgactgcctggtccgaaatgccaaatgaaggagatattgatatcacctgcaagaacacgtacctatctttgcagtacaaccttgtcgaacatctttgggcaaggcgtggttccatgggttgaagtatggctacttaattaagttgtcgagtatcagtgtaatgtgttggtgtctactttagtgtactttagtcgatgtaagcctccagttgtggtcaagataactgctgttatgtgagcgtcttggatgtaactatgtatggtttcatccatacttcaataaaatttagataatgtgtgctttgttcattagcaacttaaattaagggagttctcaaacataacataaacgtctaaaggtaatgagctcaaacataacatatagtggacaagttcaaactgacaattcataaccataagtgacgagaataagtttacaaacataacataatcttgagttcttcaactgaaatgaagacactaacgcagtccaaagtcacacttcaaaaaatgtgattattacagcacgcattactaaaacagaaactcaactagtgaaaaccgtggtccacaattttcactaaacgaacaactcagtttggattgttgacaaaccagtccacaagtgctttcctctttgctatgaaagcaggcctcaaatcttcggctatgtcctccaaatccacagccattgcttccttcaactcatcgttcttctctttgcgttcttgaaacttcagttttgttttctccacttcaatttgttcttgttgaacttgcagcttcttatattcgagatccttgaaaacctcataatgtgcttctttcttctccactttgtcttcactttgtttcaaccgggccatttgcaggtcatgaattctggtcaaatacttcatggactgggacgacgtggacatggccttcttccttgatgcctttgtggagtctcggcctaatggccttttcccagttaaacctagagaatcgctatccaaatcgtttacacttgcagttggtgtggcactgccaaccggtgacatccctgctgcccctcgtagtgaagtgccttgaacaatagcttgcc

SEQ ID NO: 57285 - DNA, 2211 bp, Zea Mays
acatcctctcttcatactatctaccacaactagttgccagagttcgtcatggacttctacaaagagttcgtggagacttcgtccgatgacgattccgaagactgaggtcgacactcgacaccatgtacgtttagcaagcccttgagcaactaggtgttggaggttcgagcgggcgtcgtagacgctcttccttgccacgtctagtaatccatagggatcacagtgctagcgaaaatctgataaagctccactacttcggtccaaatcctgtctatcccgcccacattttccaacgaaggtttcggatgcagcggcctttgttcctgcgtatccttagaggtgtgcagcaagtggacggatttttttactgttaggtgtgatgctacgggtttagcgggactcggtccgttgcaaaaagtctctgctgctttgcgtgtcctcgcatatgggttgcctacggatgctgtcgatgagtacattcaaatcggacaaactaccgctagggactgtctcatccgtttctgccatgcaatcatctcatgctacaaccaacgttacctccgtattcctaacagaaacgatgttgctcgcatacttcgtgtcaacgctgataggggtttcccgggcatgcttggctcaattgactgtatgcattgggaatggcgtaactgtccaactgtatggcggggtcaattttgtggccggaactcacgtccaaccatgatattagaagctgtggcgtcgtacgacctctggatttggcatgccttttttggaatgccaggaagtaacaacgacctcaacgtgctccataggtctcccattttcgatcctttacacaacgacgccatgcccccccgtgcactacaccatcaatggagagtgctcgtaaagatatcgagagaacttttggtgtgttgcagtcgcgtcgggcagtactccgcgggccagcttatggttgggttcgcaatcacctcacggagatgatgattgcatgcattatcatgcataacatgattgtcgaggacgaaggcgaaggagcagaaaatgttgattttgttggtgccaccccacctcctgatctttcgactgcaattccgtaagtccggaacgagtggttgaacacgactgcctggtccgaaatgccaaatgaaggagatattgatatcacctgcaagaacacgtacctatctttgcagtacaaccttgtcgaacatctttgggcaaggcgtggttccatgggttgaagtatggctacttaattaagttgtcgagtatcagtgtaatgtgttggtgtctactttagtgtactttagtcgatgtaagcctccagttgtggtcaagataactgctgttatgtgagcgtcttggatgtaactatgtatggtttcatccatacttcaataaaatttagataatgtgtgctttgttcattagcaacttaaattaagggagttctcaaacataacataaacgtctaaaggtaatgagctcaaacataacatatagtggacaagttcaaactgacaattcataaccataagtgacgagaataagtttacaaacataacataatcttgagttcttcaactgaaatgaagacactaacgcagtccaaagtcacacttcaaaaaatgtgattattacagcacgcattactaaaacagaaactcaactagtgaaaaccgtggtccacaattttcactaaacgaacaactcagtttggattgttgacaaaccagtccacaagtgctttcctctttgctatgaaagcaggcctcaaatcttcggctatgtcctccaaatccacagccattgcttccttcaactcatcgttcttctctttgcgttcttgaaacttcagttttgttttctccacttcaatttgttcttgttgaacttgcagcttcttatattcgagatccttgaaaacctcataatgtgcttctttcttctccactttgtcttcactttgtttcaaccgggccatttgcaggtcatgaattctggtcaaatacttcatggactgggacgacgtggacatggccttcttccttgatgcctttgtggagtctcggcctaatggccttttcccagttaaacctagagaatcgctatccaaatcgtttacacttgcagttggtgtggcactgccaaccggtgacatccctgctgcccctcgtagtgaagtgccttgaacaatagcttgcc

SEQ ID NO: 57286 - DNA, 1038 bp, Zea Mays
gtgcaattgccctcttggcattataatcccggacgctttgaacatctggcattcgtggcggctgatcgtcattaccaggtatgctattcccttgctgcccctcgctcgtgccttccgtttgcaccgtctggtttttccgttcagccgagtactccagttcatcgagcgctccagttcgtccgtctccttggtccaagtggtggccgcgaactcctactggatgctgcgtcctccccaccgccgccgctgaccagatctgtgccgccgctctggagcgctctgcggtctacgcgacggcgcgcacaggagctgaggacctcggcctgtaggtcatggactctccacgaggtgcggcattgtctctgtctctgactgaagaaaatgtgcaattgttgttcggccgtggcgtgtcgccaaccaatgaaatgactgcaccgcgctgcgaagaggaagattggagtttagcttgtattggccaggacgatcgcgtcacatttggtacctcgggaaattgtaatccaagtgaatatgttgattgggattcaatcgaagttgaagacaggtggaccgaggaaggaagacagaatgttactagtgaacaagcattgtatatccagctgggtttgcataatgaggatgtgtttgaatctgctcaaagggaagaagaatcagctcgtcatgttagatggagtaatagagactttttggatggtgaagcatcagctgccattccatgttctgattctgtggtagatgaggaacggattgtttatgacatgaacaatcctgttaagaaaaaaaccttcttaaattttccttcaggcaattttccttcgcatcacagggctaagttaagaaaaaaaccttcttaaatcctcatctctccaaaaaacctgctgttgtcacagggctaagttaactttgccctcagctactaaatttctcctcatttgaatccattcgagttcaatgacaaatagcatcactgggcatcactaggcacagttccagcacatataatttcatttaacagaactg

SEQ ID NO: 57287 - DNA, 4167 bp, Zea Mays
ctttcgcgcgcgcaaagaactcatttaccgtccttcgaattcgcaagcttccttccagcagcatctctcttgctgtctcgctctgcaaaacagaccaagcatcgagccaaaagcaacagctatagatcacttctataggatcaaaaaccaacttgccattaaaacaagcattattccttgttctccagattgcccataaaactgccccacaacccaccagcactagattgcgaacagatttgttaaaggattgaatccaatcacaaaacaagtgagcagttgtagaaggagtagaagacaaattaaaggcaacctggacaattctccaaataaacttcgcaacaaagcactcaaacaaaagatgaggagaggattcacagataccacaaaagctgcaatccgaggaacccacccaacctctttttaagagattctccttagacaagataccatccttcagaagaagccataggaaaatttttattttctgaggaaacttaattttctagagaaatttataagggactttcacagcatcacttctgatacgagaatatagcgacttgacagagaaccccttattctctagagtccaaatagctttgtccctctcatttgataagacaaagttctcacacataatctagagggtttcaaataaagtggtggtttcgggccccaaaattcttctaaaactcaaagaattgagattagactgaagagcacaattcacggtaatattcttatcaaaggttaagtcaaaaagccttttacatcttacagccaggggggaatcgccacaccaggtgtcaaaccaaaaactggtgtcctcaccattcccaatgattttttttctgtatttaaggaaatgatccttaaccttcattaaccctttccagaagtgggagtcattgggtccttttttcaccaaagctaaaggaattcctttcagatatttagctttgacaatcttctgccacagcccatcagaagaatctaatttccacaaccatttggttaaaaggctgatgttcatgcatttaaagtccaccaaccctaaacccccttggtcctttgggagacaaactgtgtctcagtcgaccaagtggtactttctagtagcacaacccccttgccaaagcagccttttcctatacatgtctatcttttttagaaccagattaggagctggataaagagacaacatgtataaaggcacattagccagacaactattaagcaaagttacttttcccccatgctaagaaacctccccttccaggctcccaactttttttccaccttttcttctgtggggagccaaagggagcaaccaattttcttgttatcaatagggatacccaaatacttcaggggcagctctttgtaagggcaagtgaagatttcaacaaaagaatccttaagagttactgcatcaccaaagcagaccacctcgcttttatgaaaatttattttcaagcccgacatttgttcaaacaagagtaagataaacttcagattcctagccatacccaagtcattttgcaacaagaagatggtatcatctgcatattggagatttaccaccccattatctacaatatgaggaatgagcccagtaattaagccttcttgctgagcttttctaactaaattagaaaggccatccgcagaaagattgaaaagaagaggagaaaaggggtcaccctgtctgacccctttgtgagtagagaagaaaggaccagttaagtcatttgtcctaacagccaccttgccacctctgacagttctcataacccagtcacaccatttaactccaaaacctttcataatcatcatttgatataaaaactgccaattaaccttgtcataagccttttcaaaatctatttttaacaaaataccactttgtttaccccttttcacttcatgtaaaatctcatgtagggcaacaacactatcaagaatatacctccctctaataaaaccagactgagtatcactaatcacctttttgatgcaacaagcaagcctattgttcagaactttagtaatgattttgtaacaaacatttaacagacaaattggcctaaaatatttcatctcagacgcattctcaaccttaggaagcaaagtaatcacaccaaaattcagacgttctatgggaagcacttcattataaaaatctacaaacaatgcaaacatatccttttttataatatcccagaaggtctagaagaattccgccggcaaaccatcggggcccggagcactattgtgttttaacgagtcaatcaccattttaatttcatcataagagaaaggggaagtaagaaaatttctatcattctcatctagctgggtcaagttaaggtttcccatgctaatgtgagaaatattcgaaggaccaaacagctctttgtaaaagtcagtagccactttgttcaactccatttcacccacgacaacagaaccattatgaaaaagagattgaattctaatctttcttcttctccctttagctttcaaatggaaatattttgtattcccatctccttcaaccacttgtttctctcgagctatctatttcattttaatttcttcttcagaaataattgatctcaaggcaagctcgcattgcaatttttcttgtctttccgattcagacaagatcttacattcactctcaatgtcccaagaattgattttttctgaatcaattcctttttagtttttttataagctccttcaacattacagtgccaccctttcaaagtctttttgagtctctttattttttctttccacacatcaatactgcacctactcctaaccgggagacaccagctgttagtcactacctggcgaaaatcggctctagaattccaacacaattcatatctaaagatcctattaataggggcacggtcgcctgtgtcaagacataaaggggagtgatccgaaaaggacctatttaaaccaaaaatcatcacactccgatacgccaaatcccattctggacttaccaaaaacctatcaagtttttcaaaggtagggtctaaacggttattggaccaagtgtactgtctaccaaccaaatccaactcaatcaagccatattgctcaataattgcattaaagagaaagctccatttattagtacccccaggcttatttttgtcactctctcttctaatgatattgaaatccccaccaacaagaagggggagagaggaactatgacaaaaggaggccagctcacataaaaaatcccttttactgacttcttgagcagcaccgtatacatttaaaaaaatccacgaaaaattcttctcttttgtgagtgataaggctgctgatcataaacttaccacacttgtgactaagaatgtcaaaggtatcagagttaaagcccgacagcaacccaccagatctcccattgggttcagcagagacccaaataaaactcctagtgccacacagaccatccaaccaattctgattaaagactttcctattgattttctgtaaaccaataaaatccaacttctcttcacttgtgagttccttgataaactcatatttgccttttttttcaaaccctgataattccatatgatgcctttcataggaaactaggatattgagagtgagccttgcccttttttttctcctcttgctagaggagcctttggcagcaaagggaaaatgttttttcccttttgattttttggacccacttatgtaaaccatgtccaaggcactttccttttctaaattaaggaaaaagtcctcatcagacacatttcccatgtcattttgagagtcatcaatgggctgtgaagagactacgtcacgatcttcagaaagaaccagaggagaagagtcctgtctaccaccacttgagttcaacataacatttaatttggtttcttcaagcatttttatgtcctgaagactgagctctatttcatttttattatttcctaggcacacacctaacgaatttgcaaggtctactagcacagcatctttagtatttaagacagagaagggattccagcagttacctttatgtatgaaggtgtctttagcttcagctctgttgatagctttctcagtaatgttcaaatcatcatcagcttcaagtcttgggctcctcctcag

SEQ ID NO: 57288 - DNA, 608 bp, Zea Mays
atgggtgtttgtcgccggcgaagggcccgacgaagaccaggcgaaggggtcgacgaggctaccaagaccggggcacctggcgtaggatggcggaccctttttcagctcctcctagagctggcgacctgccttctgatcctgtcattcaacaaatactacgccttcgccatcctcaccgccgtcgtcgccctcctccaaccgaagctgcggcatgcggcagacagacacgtgttgccatccttcacacaggacatgatcggagacgatgaggacagtccatacctgggccatttgctggacctttcacaaggcatcgccagttctggcggcctcttcacggcgatcgccggacgcttcatggtagggccattcaacacggttggtttcttcttcttctgtgcgatagctctcgggctgtatctgtccatggtggtgacggtgggagctgtgtctcgtccccacgccaagtgtctcgccatcgtcgtcgtggtcctcgtcgtgctcacgcttatcgccgcctgcatcctatttgttgggcactcgggaagcaagccgcaggttgtcacctagtagatccatagatctttatctacttaattatccttggc

SEQ ID NO: 57289 - DNA, 2747 bp, Zea Mays
attaaataaagtcgtacatagttgtcgattggtctcaacatatctaagactaataaaattgtttttttcccaaaaaaaaatgcaggtgatgtatggcaatggtaccgcagtggttcagctcgaacatcgaaagaaaagttggcccaactacactctgaaggccctgttgttcgcttgcgccatgttgttttccgcatacatgaatctttcttcactaacatcaatcaccatcaagatactgtttgtggttgatattattgtcttcttcatcatcaatggagtactctacataaatccgcctgattggggcaatgccttggtctgcatctcatgcctcctcctacaagtggcattgtgccttctgactgtcccattcaacggatgctacgccttcgccatcttcctcgtggtgtgcctgatccttgttgtcactctccttcaaccaaagtttcagcattcagtaaagaagtatgtgctgcccaccttcaccaccaatgatggcaatacacaaggcgacatcggcgatcaagagaatcattacttgaaccatttattcgacatatcaaacggcattgccacttgtggtggcctggtaaccgggatcatgggatacgactcctacatggtacggccggtcaccgcagctggctggcttcatcttcttctccactgtacttctcggactctatctgatgatggtcatagcaatgagagctgtgtccccactccatgccgcctgcctcgccatcgtgctgaaggttctcctcctgctcactatcgttaccgcctcaatctcatttgttcaccactcagtgaccactccaaaagttgcaaactagactccaatcacagaaagaaccttgtcatgttgtgacttctgagaatgaaaccaaaagtgcggctccaatactaacgcaggcgcctcgttggatctaggaaggtaaatttttttttttaaaaaaaatccttgtatgtatctgagtatcatgtgctatatgatgctcctgttgtgcatttttttaaataatgtatttttactgcttcaaagacagaaataccgttgaaaatacaaatcacaagaatttgtcagaattctccattttttttgttagctgaactgtgagtaatgagtgctacatctttacaggctgactgtcatggtttggaatgtattctggaatagttccagtccctatctagctggttgttaagaaatattttgcctaatcaaatccagtaactcagacttaatatatgaagcaagttttaagtagtagataaacaggaagggtgtgccaaactgccaatcacctggctataactaatcggtgtgcttccaccggtggtctccccttgctcccatggaggcagcgatgcaaggatccaataaactctacagcatgtatattgcaaataagaagaaaacaaagacaattcttgtatttgagaatcattcaaatccagtgagcaatatcaatggcagcattgcatcttctagttagaattgaacagttattcctgactaagtgacaaattttagtagttttaaagaagcattgctagaagagcaatactgtagaaatgttaatgtcaaattcctttgttcttgctctcctcagtatttccctatattgtagaataagctagtcacaagtgtgcaataaagaagatttactgaatcataatttagttcaacataatttcgcatcaaactgctgaacacatcatacaagctgagttaaatcagctaaccatagttttttttttaatttcaaagccttgtaaagataaccaatgtgaatctgtgtggtattacattcagaaccctagttctgaattttgacaaggttacaaaccggctatgatatcaaccaaaaaaaaatacacaataatatttggtcatgtcatgtgaaggtgaggctgaataaatgttttctcaaatcaaacaagcctataagattaccgatctcatttgacttgattataacaactttaattgaattatcatatagtgcatgatttttttcattggcacaacctgccagaagtaaaattacctactcaattcaagaaggaataaaaaaattacttagtttcgagacagaagggtaaagagcaaaatacttgattgttgcccttgtggtgaatatcgagatttctattctgtgttcgcagccatgccgcttaattactcgattataagttgtgacaacactccatggtggtggtggcataacctgatggaggggagttgcttatcagacatgatatactatgttggaaacctatggcactaaccatcagagatcaatggcagggatgaaaacttaaggagcagaaaaacatcttaatcttacaaatgtagctttaatggtactattaaaaaaatgcagtattagactcaaaatatccatgtcgtatattgttatgtgttgtatcgaacacatgcttcttcagaattgatgcagtaatccaaaggagcaagaaaatgaaactttaacagagctgcagaccttattgcgcatagctctgttgaaaatggaacttaacacacgcagggtggctgaggtgaagttaacacatgcaagtgacattgtgttgggcccaggtgagcctcagataacggtatcaagtcgcctagtcaatactaatgtaaggggactggtgggacaactaatcgaacctagttggtagtctagtcctgccttcatgccatcgtacaagggtgtatgtgctatatgtagtat

SEQ ID NO: 57290 - DNA, 1088 bp, Zea Mays
cttaataaaagtacgaagatgaattcatcattgctgcattctcttatgtgtgaagtatgtccaagaaactaggcagtattctggcattcgttggaacacatacgttgcatccatatcgcactatgttccatgacatgaattcctggtcacattgcatcgaacagcttgcgagctagggtgatgtccccgctctggatagtggacatgagcaggtaaaaggtaatcatgcattcgacgccagtgttccatgcgccatttcatcaaacacccttcgagcatcaaccacccgcccagcatgcgtgtagcccaatagtaggatggtgcttgtgcttgtgcgcaagttgctgccggcgctcgacgaacgatagttgatgggacaagccaaaggctcagtagtaaactagtaatggcgcctagccagagtggagaaaggctgtaggcgtggtcacgtgaagcagagcatatgagaagcggcggggaagtgaacagcccaaggcgacctggtgatggaaggcggcgaaggctgagcagagtgcagagcggtgcggtgctcttctagttctgagctggcccaaggtatggcgtgggccatacctggccataccgggtcctccgcccctgatcatgggcagcatgcaggggtagaaatccccgctctggtggtgtcgccgtcgcggcgctgctggtgggactcgtcgcagaggaattcgaaggtggggaggaagagcggacctgggagggtagcgaggggagagacatcggagcagatagaaacgcggaatggttgggggtggaggcgaggaagaaggggttttttttttcgaggaagaaggctcgcaggggaaggggaaggggacgagatcctctgcagtaacttcgtgggacgtagctccccggagtcgctgccgcatgggggcaggcgcggccgcgcgggcacaggcacagtgaccctgcccgtggctacgtcccggaaagttactgcagacgagctattcccaaggggaaggtggaggagaaagaagattgttggagatgctgaaagcttgaagggtgtgttgtgtttgggcaggctttgctttgcggattga

SEQ ID NO: 57291 - DNA, 1085 bp, Zea Mays
cgtctctgccttgctcgagctggcgaagtagacgtcgtcgctctccagtcacttccgctctctctcgccctcactgctcaccggcgttgagctgtcgttctcgtttcttctcgagtcggagcacgtcgtcgatcgtgtggacacgttcgcgaagccactggccaactccagcacgctttgctcgccttcaaatagtcggaacattcagttttcttgctttttcttttctctgttgccgacagccatcttcaccgtcgccgatcaaattcgcgttgcttgatcgatcaaacctcaaatttactgcatatttagcttcacagcatccttgcgcaccgtttggtccagctctactcgtgtgtgatcgccggaatcactctcgcgccaccgtcttcctccgcggcggccacaacacgccggagctccgcctcaccgtggccagagctctatgctaacgcgtcggaatgtcgttgccatcatcggagaacgctgtcgttgccgctgtcaccgtcgacaacctatctctactccatctccgcctcaactagctagctctatcgcttcaggaatacgaaggtgaattagttcacatggaacctttatccacgcaaggcactccatccgtcgaagtggtagctaactctagtttagcttctgaggaactcggatcgtctgatattcaaggtgaccaccaggaatcggtatgtttaggaccgtgctgtatgacggtcgttaacgagagcgatgaagaatagacattgaagttaggaaaggcagggcctttcatatgatgtaatatactctatcatacctcactactatgagttgtaataataagtttcaaacaaagcagtttgtaaattaagttattgtaaatctttccgctattgtactctggtatatatatgtgttgtatgaaatgttgtaatactgtgatgttttgcgaaatggtgatctggctgggagttacaggttgctgatgtaaacccggtagtaacctctaagtttttggtacatatgcatagccgtcaaaggtctttgggacaatgataggtgcatgtggacccaaaaatttagcaggttttgtt

SEQ ID NO: 57292 - DNA, 968 bp, Zea Mays
cgtctctgccttgctcgagctggcgaagtagacgtcgtcgctctccagtcacttccgctctctctcgccctcactgctcaccggcgttgagctgtcgttctcgtttcttctcgagtcggagcacgtcgtcgatcgtgtggacacgttcgcgaagccactggccaactccagcacgctttgctcgccttcaaatagtcggaacattcagttttcttgctttttcttttctctgttgccgacagccatcttcaccgtcgccgatcaaattcgcgttgcttgatcgatcaaacctcaaatttactgcatatttagcttcacagcatccttgcgcaccgtttggtccagctctactcgtgtgtgatcgccggaatcactctcgcgccaccgtcttcctccgcggcggccacaacacgccggagctccgcctcaccgtggccagagctctatgctaacgcgtcggaatgtcgttgccatcatcggagaacgctgtcgttgccgctgtcaccgtcgacaacctatctctactccatctccgcctcaactagctagctctatcgcttcagggtgaccaccaggaatcggtatgtttaggaccgtgctgtatgacggtcgttaacgagagcgatgaagaatagacattgaagttaggaaaggcagggcctttcatatgatgtaatatactctatcatacctcactactatgagttgtaataataagtttcaaacaaagcagtttgtaaattaagttattgtaaatctttccgctattgtactctggtatatatatgtgttgtatgaaatgttgtaatactgtgatgttttgcgaaatggtgatctggctgggagttacaggttgctgatgtaaacccggtagtaacctctaagtttttggtacatatgcatagccgtcaaaggtctttgggacaatgataggtgcatgtggacccaaaaatttagcaggttttgtt

SEQ ID NO: 57293 - DNA, 1063 bp, Zea Mays
cgaagtagacgtcgtcgctctccagtcacttccgctctctctcgccctcactgctcaccggcgttgagctgtcgttctcgtttcttctcgagtcggagcacgtcgtcgatcgtgtggacacgttcgcgaagccactggccaactccagcacgctttgctcgccttcaaatagtcggaacattcagttttcttgctttttcttttctctgttgccgacagccatcttcaccgtcgccgatcaaattcgcgttgcttgatcgatcaaacctcaaatttactgcatatttagcttcacagcatccttgcgcaccgtttggtccagctctactcgtgtgtgatcgccggaatcactctcgcgccaccgtcttcctccgcggcggccacaacacgccggagctccgcctcaccgtggccagagctctatgctaacgcgtcggaatgtcgttgccatcatcggagaacgctgtcgttgccgctgtcaccgtcgacaacctatctctactccatctccgcctcaactagctagctctatcgcttcaggaatacgaaggtgaattagttcacatggaacctttatccacgcaaggcactccatccgtcgaagtggtagctaactctagtttagcttctgaggaactcggatcgtctgatattcaagggtgaccaccaggaatcggtatgtttaggaccgtgctgtatgacggtcgttaacgagagcgatgaagaatagacattgaagttaggaaaggcagggcctttcatatgatgtaatatactctatcatacctcactactatgagttgtaataataagtttcaaacaaagcagtttgtaaattaagttattgtaaatctttccgctattgtactctggtatatatatgtgttgtatgaaatgttgtaatactgtgatgttttgcgaaatggtgatctggctgggagttacaggttgctgatgtaaacccggtagtaacctctaagtttttggtacatatgcatagccgtcaaaggtctttgggacaatgataggtgcatgtggacccaaaaatttagcaggttttgtt

SEQ ID NO: 57294 - DNA, 787 bp, Zea Mays
tgcgatccccgttccccatcatcgtctcgtcctcaatatatggagccgtgtgggcgacggcggtgggcgcgtcggtggcgtacagccggcggcgggcgccggcgcgggcgacgggcatgcgcctcatccacgccaggatgcacgcgcaggcgctcacgctcgccgtcctcgggggagccgcgctcgcgcaccactaccacggcaagagcaccaacgccgggaagaggcagcagcaggaggacctggactacggcttctactcgcagctgccgccggccaccgacgccgacggcaacgagaacgagcgctggagctggtagagcatgctgcatcgggacaagaacaagacagcagcgagaagaaagaaaaaacaataaattagtagcaataattggtgggtggtttggcatttggcaatgatgcgtgacgtggcgcctgcaggctttcttggtcctaatcctaatcctaatcctaatcccaatccatccagctaagacgtccacgcccgtggttttgtcctgttgatttgccaccggagacgacgatgcagcgcttgctctttgatttccatggcttattatcgatcagcctccgattcttctcctgcactactactacttgtaccatttcatctattgattgaatgaatggtcacgatgatgacgataattatgttttgtttgtttgcaaaaaaaaaacagtggatgtcatgtggcggttctgtgctgtgtgtgtgtgactactgccttgcgttattttaattattgttgcaccagcttgaggcata

SEQ ID NO: 57295 - DNA, 4779 bp, Zea Mays
gttggtgtaaatagaacaagtgtaaggggtttcttgtataatggtgaaatataatgtgagcttgggggtgttgtgaggaataactcaccccaaatcaacaacatggtatatggagctagggttcgcaggcgccgccactcgagctccgccttgcgcgtgtgaggaagaaggcggtcacccagccgagcccggagccggagcaggaaaccgtggtggagaagcgcgtggaggaggcggatccatggagcgcagctcggcgggcggccccctggcagctggcgtggcgagctcatccgcgcgtcctcgactcgtccgcgccggtgccggccgccgtccccgtcctgtgcgacggcgagctcgtcggcgtgggctcccgcccctatgcgcaccagctgcgcactcccccctgctcgacccctcagttcctggtggtcgccctcgggcccctccgctggtgtggctgctgggattgctgctacggacgctggtgctgtagctgctcccaaggaagaagagaaggccgagtacctcaaggaccgagcaagtttgctgttgctgctcctgcagctgagaaagggggaagaggaggaagcctctactgctgcgatgtgcgagctcatggaggagctgctggagcatagcctggaggcgtctgctaatcccatgaaggtggtggagtacgtgcagaaggagtcgccgctgatcgccgtggtgctgaaggcacacatgcactgcgaggcctgcgccgaggggatcaggaagaggatcctcaatatgaaaggcgtccagtccgtagaaccagacctcaaggcatcggaggtggctgtcatgtccaaaaaggtccggagagtggaggcggtggtggcggaactggagtgtaggaactctgagctgtttggcgagaagggtgaactggaggagaaattggtggctgccaaggaggtgttggcgaggctgacggcgatgacgagggaacaggaggctagggtgtttgctagaaggagagagtctgatttggtgaaggagaaagaggctgttgctaaggctcttgatgctgagaaggctgaagtagcaaggttgaggttgaaaattgaggagctagagaaatgtagcggtgagaaggatggtgacatcaggaagatgaaaccagcctactttgccaactatgcccacatgggtgaaggtactcaggaacaagctcttacatactcatgtaggcatcaaaaggagtgggtcatagattcaggagcatctaagcatgtcatgggcatatccagctctttcaaagcttacatcccacatacacattatgagtttgttcaaattgctgatggctcatcccaacgaatccatggtgtagggtccatagagtgtacaccatctcttagctcatcctcagtcctacatgtcccatcttttccggtcaatctcatttctgtaagttcaatcattgatcagttcaagtgtacagtaacgtttgatgaaaacacttgtgtctttcaagagaaggggactgggagaaggattgggactggagtcagacgtgatggtttgtggttcatcggtcatgaagaatcagcattgagagcagttgctgaaagggatgtgaaggaaattctgctacttcattgtcggttaggacatatatcttttgagaccttaagacggctgcaccctgctatgtttaagggagtggacaaaagtaggcttgtatgtgatgcatgtgagcttggcaagcatactagatccatctatcccagtattggtcttcgcagttgtgaaccatttactatgatacactcagatgtttggggtccttgctctgttacttctgtgaatggtgctaagtcgtttgtcacctttattgattgttgcactcgtatgacttggatctatattcttaagcataaaaatgaggtgttccagtgctttcaagactttcataaattagttgcaaatcagtttaatgcaagagttcgaatcattaggacagataatggaacagagtatgtgaataatgagttcagatcatatatttcagatcaaggaatcattcatcaaacaacttgtcctggaactccacctcagaatggtgtagctcagcgaaaaaatcgccatttgttggaggtagcaaggtctctaatgtttcggatgaatgtacctaagtacttgtggagtgaagcggtgatgacagccacatacctcatcaatcggatgccctcaaggatacttgatatgaaatcacctgctgagctcctgttgggaaaccagaactttagagttccacccaaggtctttggttgtgtttgctttgtgaaagatcatcgacctatggcgagcaagttggatcctcaagctgtcaagtgcatttttgtgggttatgcctctactcagaaaggatacaagtgttgggatcctattgggaggagactctttgtgagtatggatgtaacattccgtgagaaggaaccatactacacaagaaaggttgacctagacaattttctggaggacttctctccagtcaatggaagggactggagagagggagagaatgatagtggacaggatgatgattgtggccaagatagtgatttggttagtaggacttcaggaggggtgattgttggaggtatggttccaccagaaatgagggaagtgataaccacagagatagtgagtaatgatgaaagaagtggtggtggagatcaggatgatccaactgtcaatagtcaggaggagataaaggatgatgaagctgtgattgttgggacaatcccgtgttctattggggcagaggtgaataagaagcagggggagcaacgacctatagtgtactatcgaagacgggctaagaagcagggggagcaacctctacctgaacagacataatctgaacaagttgaagctctagtcccatacctctcttcagactgctctccagttccgaatggtaatgttgctcctccctctgaacatgtagaattacctattgcacaaagaagagatcctagagtcaatgctggaaaacccccttctcgttatggttatgaatatgatattgctaagtatgtctcatactctagtgtctcctgtatatagaacatttgttacatctctacaaacattgtctattccgaaggattggaagtgtgctaaacaggacccaaagtggaaggatgccatgaaagaagagttgcttgcccttcaaaagaacaagacatgggaacttgttcaccttcctgaaggaaagaaggcggtagggtgcaagtgggtcttcacagtaaagcagacccctgaaggaaagattgataggtacaaagcaagactcgtggcgaagggatatagttagacgtatgggattgactatgatgagacatttgcacctatggcaaaaatgggcatggtgaggaccttaatctcatgtgcggccattggttggacgtttcatcagctggatatgaagaatgcatttcttcatggtgacctgcaggaagaggtctatatggaaattccacctgggtttgcaaatgaacagacagttgggaaagtgtgtagacttaagaagtcactctggtctgaaatagtcaccacatgcatggtttgatatattcaggcgagcagtatgtgatatgggctattatcaatgcaatggagatcacacggtcttctacaaacatcagggttcttgtatcactattctggttgtttatgttgatgatatagtgatcactggagatgatgtgaaggaaattaggaaactaaaggaaaggctaggtagagcctttgaggtaaaagatcttggaccacttcgatacttccttgggattgagattgctaggtcatctaagggaattattctcttaacggaagtacgtccttgatttgttggcagaaacaggaatgcttgggtgtcgtccatgtggctcaaccattgataagaatcaccaaacttgtgctgagttaggtgaccctatggatcgagaaagatatcagaggatagttggtcgattgatatacctctgtcacacaagaccagacattgcttatgcagtgagtgtggtgagtaggtacatgcatgatcctagagttgggcatatgagggtaatttatcaaatcctgagatacctgaagggaacccctggcaagggtttgtggtttagggcaaaccaacacctgaatctagaagggtattgcgatgctgactaggcaagtagtagggatgatcggagatccacatctggatattgtgtttttgtgggtggtaatctagtttcgtggagaagcaagaagcaagcagtggtatctcggtctactgcagaggcagaacaaagagcaatggatctagccttatgtgaaatgatgtggttgaaaggtcttctaaaggagcttcaggtgtagaagaatgagaccatgttacttcattgtgataatgttgctgcaatcaacatagcaaataatctagttcagtttgaccgcatgaaacatgtggagattgataggttctttatcaaggagaagattgatggtggggctttgaagttgaattatgtcaagtctcgtaatcagttagcagatagtctcacgaaaggtctaggtcctaaggataatgagttggcttgtaacaagatgggaatgttgaatatatttagcccatcttgagggggagtgttggtgtaaatagaacaagtgtaaggggtttcttgtataatggtgaaatataatgtgagcttgggggtgttgtgaggaataactcaccccaaatcaacaacaaatact

SEQ ID NO: 57296 - DNA, 3562 bp, Zea Mays
gttggtgtaaatagaacaagtgtaaggggtttcttgtataatggtgaaatataatgtgagcttgggggtgttgtgaggaataactcaccccaaatcaacaacatggtatatggagctagggttcgcaggcgccgccactcgagctccgccttgcgcgtgtgaggaagaaggcggtcacccagccgagcccggagccggagcaggaaaccgtggtggagaagcgcgtggaggaggcggatccatggagcgcagctcggcgggcggccccctggcagctggcgtggcgagctcatccgcgcgtcctcgactcgtccgcgccggtgccggccgccgtccccgtcctgtgcgacggcgagctcgtcggcgtgggctcccgcccctatgcgcaccagctgcgcactcccccctgctcgacccctcagttcctggtggtcgccctcgggcccctccgctggtgtggctgctgggattgctgctacggacgctggtgctgtagctgctcccaaggaagaagagaaggccgagtacctcaaggaccgagcaagtttgctgttgctgctcctgcagctgagaaagggggaagaggaggaagcctctactgctgcggtgagcgtggagttggggagagtgaggtggtgctgctcctgcagctgagaaagggggaagaggaggaagtccctactgctgccctcgtagctgttgtggcctgtgtagctgtggaggccggtaggagctggtatggggttctgaagcgagttctgaactgtcctgtctgcttgaagccggagctactgctctgcttgttgtggtgaaggagtagatgtgcgagctcatggaggagctgctggagcatagcctggaggcgtctgctaatcccatgaaggtggtggagtacgtgcagaaggagtcgccgctgatcgccgtggtgctgaaggcacacatgcactgcgaggcctgcgccgaggggatcaggaagaggatcctcaatatgaaaggcgtccagtccgtagaaccagacctcaaggcatcggaggtggctgtcatgtccaaaaaggtccggagagtggaggcggtggtggcggaactggagtgtaggaactctgagctgtttggcgagaagggtgaactggaggagaaattggtggctgccaaggaggtgttggcgaggctgacggcgatgacgagggaacaggaggctagggtgtttgctagaaggagagagtctgatttggtgaaggagaaagaggctgttgctaaggctcttgatgctgagaaggctgaagtagcaaggttgaggttgaaaattgaggagctagagaaatgtagcggtgagaaggatggtgacatcaggaagatgaaaccagcctactttgccaactatgcccacatgggtgaaggaggggtgattgttggaggtatggttccaccagaaatgagggaagtgataaccacagagatagtgagtaatgatgaaagaagtggtggtggagatcaggatgatccaactgtcaatagtcaggaggagataaaggatgatgaagctgtgattgttgggacaatcccgtgttctattggggcagaggtgaataagaagcagggggagcaacgacctatagtgtactatcgaagacgggctaagaagcagggggagcaacctctacctgaacagacataatctgaacaagttgaagctctagtcccatacctctcttcagactgctctccagttccgaatggtaatgttgctcctccctctgaacatgtagaattacctattgcacaaagaagagatcctagagtcaatgctggaaaacccccttctcgttatggttatgaatatgatattgctaagtatgtctcatactctagtgtctcctgtatatagaacatttgttacatctctacaaacattgtctattccgaaggattggaagtgtgctaaacaggacccaaagtggaaggatgccatgaaagaagagttgcttgcccttcaaaagaacaagacatgggaacttgttcaccttcctgaaggaaagaaggcggtagggtgcaagtgggtcttcacagtaaagcagacccctgaaggaaagattgataggtacaaagcaagactcgtggcgaagggatatagttagacgtatgggattgactatgatgagacatttgcacctatggcaaaaatgggcatggtgaggaccttaatctcatgtgcggccattggttggacgtttcatcagctggatatgaagaatgcatttcttcatggtgacctgcaggaagaggtctatatggaaattccacctgggtttgcaaatgaacagacagttgggaaagtgtgtagacttaagaagtcactctggtctgaaatagtcaccacatgcatggtttgatatattcaggcgagcagtatgtgatatgggctattatcaatgcaatggagatcacacggtcttctacaaacatcagggttcttgtatcactattctggttgtttatgttgatgatatagtgatcactggagatgatgtgaaggaaattaggaaactaaaggaaaggctaggtagagcctttgaggtaaaagatcttggaccacttcgatacttccttgggattgagattgctaggtcatctaagggaattattctcttaacggaagtacgtccttgatttgttggcagaaacaggaatgcttgggtgtcgtccatgtggctcaaccattgataagaatcaccaaacttgtgctgagttaggtgaccctatggatcgagaaagatatcagaggatagttggtcgattgatatacctctgtcacacaagaccagacattgcttatgcagtgagtgtggtgagtaggtacatgcatgatcctagagttgggcatatgagggtaatttatcaaatcctgagatacctgaagggaacccctggcaagggtttgtggtttagggcaaaccaacacctgaatctagaagggtattgcgatgctgactaggcaagtagtagggatgatcggagatccacatctggatattgtgtttttgtgggtggtaatctagtttcgtggagaagcaagaagcaagcagtggtatctcggtctactgcagaggcagaacaaagagcaatggatctagccttatgtgaaatgatgtggttgaaaggtcttctaaaggagcttcaggtgtagaagaatgagaccatgttacttcattgtgataatgttgctgcaatcaacatagcaaataatctagttcagtttgaccgcatgaaacatgtggagattgataggttctttatcaaggagaagattgatggtggggctttgaagttgaattatgtcaagtctcgtaatcagttagcagatagtctcacgaaaggtctaggtcctaaggataatgagttggcttgtaacaagatgggaatgttgaatatatttagcccatcttgagggggagtgttggtgtaaatagaacaagtgtaaggggtttcttgtataatggtgaaatataatgtgagcttgggggtgttgtgaggaataactcaccccaaatcaacaacaaatact

SEQ ID NO: 57297 - DNA, 4593 bp, Zea Mays
ataactcaccccaaatcaacaacatggtatatggagctagggttcgcaggcgccgccactcgagctccgccttgcgcgtgtgaggaagaaggcggtcacccagccgagcccggagccggagcaggaaaccgtggtggagaagcgcgtggaggaggcggatccatggagcgcagctcggcgggcggccccctggcagctggcgtggcgagctcatccgcgcgtcctcgactcgtccgcgccggtgccggccgccgtccccgtcctgtgcgacggcgagctcgtcggcgtgggctcccgcccctatgcgcaccagctgcgcactcccccctgctcgacccctcagttcctggtggtcgccctcgggcccctccgctggtgtggctgctgggattgctgctacggacgctggtgctgtagctgctcccaaggaagaagagaaggccgagtacctcaaggaccgagcaagtttgctgttgctgctcctgcagctgagaaagggggaagaggaggaagcctctactgctgcggtgagcgtggagttggggagagtgaggtggtgctgctcctgcagctgagaaagggggaagaggaggaagtccctactgctgccctcgtagctgttgtggcctgtgtagctgtggaggccggtaggagctggtatggggttctgaagcgagttctgaactgtcctgtctgcttgaagccggagctactgctctgcttgttgtggtgaaggagtagatgtgcgagctcatggaggagctgctggagcatagcctggaggcgtctgctaatcccatgaaggtggtggagtacgtgcagaaggagtcgccgctgatcgccgtggtgctgaaggcacacatgcactgcgaggcctgcgccgaggggatcaggaagaggatcctcaatatgaaaggcgtccagtccgtagaaccagacctcaaggcatcggaggtggctgtcatgtccaaaaaggtccggagagtggaggcggtggtggcggaactggagtgtaggaactctgagctgtttggcgagaagggtgaactggaggagaaattggtggctgccaaggaggtgttggcgaggctgacggcgatgacgagggaacaggaggctagggtgtttgctagaaggagagagtctgatttggtgaaggagaaagaggctgttgctaaggctcttgatgctgagaaggctgaagtagcaaggttgaggttgaaaattgaggagctagagaaatgtagcggtgagaaggatggtgacatcaggaagatgaaaccagcctactttgccaactatgcccacatgggtgaagagaaggggactgggagaaggattgggactggagtcagacgtgatggtttgtggttcatcggtcatgaagaatcagcattgagagcagttgctgaaagggatgtgaaggaaattctgctacttcattgtcggttaggacatatatcttttgagaccttaagacggctgcaccctgctatgtttaagggagtggacaaaagtaggcttgtatgtgatgcatgtgagcttggcaagcatactagatccatctatcccagtattggtcttcgcagttgtgaaccatttactatgatacactcagatgtttggggtccttgctctgttacttctgtgaatggtgctaagtcgtttgtcacctttattgattgttgcactcgtatgacttggatctatattcttaagcataaaaatgaggtgttccagtgctttcaagactttcataaattagttgcaaatcagtttaatgcaagagttcgaatcattaggacagataatggaacagagtatgtgaataatgagttcagatcatatatttcagatcaaggaatcattcatcaaacaacttgtcctggaactccacctcagaatggtgtagctcagcgaaaaaatcgccatttgttggaggtagcaaggtctctaatgtttcggatgaatgtacctaagtacttgtggagtgaagcggtgatgacagccacatacctcatcaatcggatgccctcaaggatacttgatatgaaatcacctgctgagctcctgttgggaaaccagaactttagagttccacccaaggtctttggttgtgtttgctttgtgaaagatcatcgacctatggcgagcaagttggatcctcaagctgtcaagtgcatttttgtgggttatgcctctactcagaaaggatacaagtgttgggatcctattgggaggagactctttgtgagtatggatgtaacattccgtgagaaggaaccatactacacaagaaaggttgacctagacaattttctggaggacttctctccagtcaatggaagggactggagagagggagagaatgatagtggacaggatgatgattgtggccaagatagtgatttggttagtaggacttcaggaggggtgattgttggaggtatggttccaccagaaatgagggaagtgataaccacagagatagtgagtaatgatgaaagaagtggtggtggagatcaggatgatccaactgtcaatagtcaggaggagataaaggatgatgaagctgtgattgttgggacaatcccgtgttctattggggcagaggtgaataagaagcagggggagcaacgacctatagtgtactatcgaagacgggctaagaagcagggggagcaacctctacctgaacagacataatctgaacaagttgaagctctagtcccatacctctcttcagactgctctccagttccgaatggtaatgttgctcctccctctgaacatgtagaattacctattgcacaaagaagagatcctagagtcaatgctggaaaacccccttctcgttatggttatgaatatgatattgctaagtatgtctcatactctagtgtctcctgtatatagaacatttgttacatctctacaaacattgtctattccgaaggattggaagtgtgctaaacaggacccaaagtggaaggatgccatgaaagaagagttgcttgcccttcaaaagaacaagacatgggaacttgttcaccttcctgaaggaaagaaggcggtagggtgcaagtgggtcttcacagtaaagcagacccctgaaggaaagattgataggtacaaagcaagactcgtggcgaagggatatagttagacgtatgggattgactatgatgagacatttgcacctatggcaaaaatgggcatggtgaggaccttaatctcatgtgcggccattggttggacgtttcatcagctggatatgaagaatgcatttcttcatggtgacctgcaggaagaggtctatatggaaattccacctgggtttgcaaatgaacagacagttgggaaagtgtgtagacttaagaagtcactctggtctgaaatagtcaccacatgcatggtttgatatattcaggcgagcagtatgtgatatgggctattatcaatgcaatggagatcacacggtcttctacaaacatcagggttcttgtatcactattctggttgtttatgttgatgatatagtgatcactggagatgatgtgaaggaaattaggaaactaaaggaaaggctaggtagagcctttgaggtaaaagatcttggaccacttcgatacttccttgggattgagattgctaggtcatctaagggaattattctcttaacggaagtacgtccttgatttgttggcagaaacaggaatgcttgggtgtcgtccatgtggctcaaccattgataagaatcaccaaacttgtgctgagttaggtgaccctatggatcgagaaagatatcagaggatagttggtcgattgatatacctctgtcacacaagaccagacattgcttatgcagtgagtgtggtgagtaggtacatgcatgatcctagagttgggcatatgagggtaatttatcaaatcctgagatacctgaagggaacccctggcaagggtttgtggtttagggcaaaccaacacctgaatctagaagggtattgcgatgctgactaggcaagtagtagggatgatcggagatccacatctggatattgtgtttttgtgggtggtaatctagtttcgtggagaagcaagaagcaagcagtggtatctcggtctactgcagaggcagaacaaagagcaatggatctagccttatgtgaaatgatgtggttgaaaggtcttctaaaggagcttcaggtgtagaagaatgagaccatgttacttcattgtgataatgttgctgcaatcaacatagcaaataatctagttcagtttgaccgcatgaaacatgtggagattgataggttctttatcaaggagaagattgatggtggggctttgaagttgaattatgtcaagtctcgtaatcagttagcagatagtctcacgaaaggtctaggtcctaaggataatgagttggcttgtaacaagatgggaatgttgaatatatttagcccatcttgagggggagtgttggtgtaaatagaacaagtgtaaggggtttcttgtataatggtgaaatataatgtgagcttgggggtgttgtgaggaataactcaccccaaatcaacaacaaatact

SEQ ID NO: 57298 - DNA, 2850 bp, Zea Mays
tttatgggtaaaagatgcacaacctctgcagagtgtaaaactggtatatcagccgtgctcatggtcaagagcggctcggacactcacatgagtaaattatggaattaaacttaacctgacatgcatttgcattgcattgtgggatttattattcatctatgatctattatttatttgggattggtattcacttatacttagtaattgctaataaaattttgaccaacaaaattaaaagcaatgctcagccttaaccattttccttggtaagccttacacatgagccccaccataagtgagctcaaacacactttttcccacacttgctgagcgatgaccgtatgggagctcacccttgctatgatcacaccaggtcaacaacaggtaccgctggaggaacatgaaggatgctacgatgagttcggagaggtctaggtcgtcgtctcccagtcaactagggattgtggaggatcgtcgtcgtcatatgatgtatttatttagctattttgtatagaactcctatatataataaagatgtgacattgatttctgtaccatgagtcatcatatgtgtgagacttgatcctagcacacatttgagacgcacccgggtttgcccttaaatcgggatgtgacacacttggtgctccaccgatcatagtggcacttgtagccaagggtacatttcgtggattcctggacacgaggacaccattatatgctgtgggtgctggcaacctattaaatgcagtacttgatgcattacttatttttccaattggtctaggagtaagcggtgctgcactggccactgtgacctcggagtacctgacagcattcatcctcctttggaagctgaataatgaagtagatctgttctcatggaatataattgaggatggaggagtcatccgctacctgaaatctggtggtctactaattggcaggacaattgcagtattcttgacactgacactgtctacatctctggctacaagggaagggcctattccaatggtgggctatgagatatgcttgcaattgtggttaacaatttctctactcaatgatgctctagcccttgctggccaggctctacttgctagcgaatatgcaaaagggaactacaagccagcccgcgtggttttatacaaagtcctgcaggttggaggtgtgattggttttctccttgctgcttccttgtttgttgggtttggatctttgtctttgctgtttacagatgatccagcagttttagacgtagcgcactctagagcctggttttttgtaggagctgtctcatcaatattcctactagtagctgctcctaagtttggtctcgatggcatatgggctggtcttactctgttcatgagtttgcgtgcagttgctggattctagaggtagatctggcgtagatctggatggatgaagtgatttcaatttctattaccggttctactttctacaagaaaaggcatgagatggttgaaacaacaggggctaatcaagttgaaattgtgtttgggcgggtggaggttgaatgtggacagagtggatgaatgattcagcgtagtaaaatattatgctttttctctcttaaaaatactatatcttgaacttcagacttgcaatatggttctttgtgaaatcagccccgtacaaagaataaaaaacacaaactcgaacaatatggagaaagaatcagtgagaacgactatatacatgccgaccaattgggtcttaagctctagcaatggattggacatcgcttgcaactgagggtgttataccaacttgatgcactaggataaactgttatattcacatgtggttaattgctcatactccttttatgatgcactgactcaactctctgtttcacttagcttggggaaaatttgatctaggtgcaactccttcaagtgcttttaagagtattcatgtatacattttgtctatctatatccgtgccccatatgtatagtatctttgcttacaatctgaccaaaacgttccatgttgattaacagaattgcttctgacttgtgaaaatggcgaatgaactacgctctatttatatggtccagaaggttcatattcaatctgtgttgttgagcagaatatcttcctattcgttttgtagtgcaatttgatttgtcttgtcgcggcagccaggtacgtctcctctcgccccgagcgtctttttctttgatgttgcagtctcaccagcataagcatctaagttaaaggagtacttatatgttgaagcaaaatatatcttcccctcattccaacccttaaatactcgcccagcatccccttcaatattaaactgaagcaaaatgtacacaatataaggcaatgtaatggcataaaaatctattggggatgggtcaattatcaaaagatttattggagcttttcagatttcctttgtagtgcttgtcagcataaagcggtagcatcccaagaatccaacaactccaaacatgttttccgagctgttggaggctaacattaccgttccacaatatctaaactgatgacaaattgagatatcattagttagcatcactagtacacattctaacaatgtaggaacatataaatagagtgagtttaattcactagtacacagaggctctatagtggcggttctagagctgtttgcactggcgtttttcagtgccgccagtgttaggggccagtggaaatcgccatttccactggcggtttgcttaagaaaaccgccagtggaaatgctatttccactggcggttttctttatttagccgtcagtggaagttttcccgccttattttaaattttcaatcagtactgaaattt

SEQ ID NO: 57299 - DNA, 1990 bp, Zea Mays
ccctcctccccgcgtgagccgcctgcgatgaccacgacggaggcccgcgcctgctgccccccgtgcgaggcctgggctccaaccgcgatctgccccgcccgagatagccgccgccgtgcagccccccgcccgagatacccgccgccctcttcatcagtgcgccaaaacctcctcttcgtacctgcccacctcaaaccctaaccccaagccaccgcgggagagggcgacgaagcaaaacaagcagccgcctcccgacacggccaccctccgcccgcatcggcacagccactccagcgccaagcttgtgcacggcctcccgcaccggggacacgacgagggcctctaccgcgcgcgcgcgacaatgactgccgtgttcaagtccatcttcggctgggaccccacctccctgcacacctctctggccatggcgttgatgtacaacatgtcgctcgtcgcctcatctcatcccatcgaccctacgagagcccgtcccaactccaccagaccaccacctctcttctcggtggcgtgagcgagaggactccgacgatcgtggcgtcagcgggaacctaggcttcgttgcatctcctctcctcactctccccatctctctgatgcgtagtgtttctaggtagatctggcgtagatctggatggatgaagtgatttcaatttctattaccggttctactttctacaagaaaaggcatgagatggttgaaacaacaggggctaatcaagttgaaattgtgtttgggcgggtggaggttgaatgtggacagagtggatgaatgattcagcgtagtaaaatattatgctttttctctcttaaaaatactatatcttgaacttcagacttgcaatatggttctttgtgaaatcagccccgtacaaagaataaaaaacacaaactcgaacaatatggagaaagaatcagtgagaacgactatatacatgccgaccaattgggtcttaagctctagcaatggattggacatcgcttgcaactgagggtgttataccaacttgatgcactaggataaactgttatattcacatgtggttaattgctcatactccttttatgatgcactgactcaactctctgtttcacttagcttggggaaaatttgatctaggtgcaactccttcaagtgcttttaagagtattcataattgcttctgacttgtgaaaatggcgaatgaactacgctctatttatatggtccagaaggttcatattcaatctgtgttgttgagcagaatatcttcctattcgttttgtagtgcaatttgatttgtcttgtcgcggcagccaggtacgtctcctctcgccccgagcgtctttttctttgatgttgcagtctcaccagcataagcatctaagttaaaggagtacttatatgttgaagcaaaatatatcttcccctcattccaacccttaaatactcgcccagcatccccttcaatattaaactgaagcaaaatgtacacaatataaggcaatgtaatggcataaaaatctattggggatgggtcaattatcaaaagatttattggagcttttcagatttcctttgtagtgcttgtcagcataaagcggtagcatcccaagaatccaacaactccaaacatgttttccgagctgttggaggctaacattaccgttccacaatatctaaactgatgacaaattgagatatcattagttagcatcactagtacacattctaacaatgtaggaacatataaatagagtgagtttaattcactagtacacagaggctctatagtggcggttctagagctgtttgcactggcgtttttcagtgccgccagtgttaggggccagtggaaatcgccatttccactggcggtttgcttaagaaaaccgccagtggaaatgctatttccactggcggttttctttatttagccgtcagtggaagttttcccgccttattttaaattttcaatcagtactgaaattt

SEQ ID NO: 57300 - DNA, 1973 bp, Zea Mays
ccctcctccccgcgtgagccgcctgcgatgaccacgacggaggcccgcgcctgctgccccccgtgcgaggcctgggctccaaccgcgatctgccccgcccgagatagccgccgccgtgcagccccccgcccgagatacccgccgccctcttcatcagtgcgccaaaacctcctcttcgtacctgcccacctcaaaccctaaccccaagccaccgcgggagagggcgacgaagcaaaacaagcagccgcctcccgacacggccaccctccgcccgcatcggcacagccactccagcgccaagcttgtgcacggcctcccgcaccggggacacgacgagggcctctaccgcgcgcgcgcgacaatgactgccgtgttcaagtccatcttcggctgggaccccacctccctgcacacctctctggccatggcgttgatgtacaacatgtcgctcgtcgcctcatctcatcccatcgaccctacgagagcccgtcccaactccaccagaccaccacctctcttctcggtggcgtgagcgagaggactccgacgatcgtggcgtcagcgggaacctaggcttcgttgcatctcctctcctcactctccccatctctctggtagatctggcgtagatctggatggatgaagtgatttcaatttctattaccggttctactttctacaagaaaaggcatgagatggttgaaacaacaggggctaatcaagttgaaattgtgtttgggcgggtggaggttgaatgtggacagagtggatgaatgattcagcgtagtaaaatattatgctttttctctcttaaaaatactatatcttgaacttcagacttgcaatatggttctttgtgaaatcagccccgtacaaagaataaaaaacacaaactcgaacaatatggagaaagaatcagtgagaacgactatatacatgccgaccaattgggtcttaagctctagcaatggattggacatcgcttgcaactgagggtgttataccaacttgatgcactaggataaactgttatattcacatgtggttaattgctcatactccttttatgatgcactgactcaactctctgtttcacttagcttggggaaaatttgatctaggtgcaactccttcaagtgcttttaagagtattcataattgcttctgacttgtgaaaatggcgaatgaactacgctctatttatatggtccagaaggttcatattcaatctgtgttgttgagcagaatatcttcctattcgttttgtagtgcaatttgatttgtcttgtcgcggcagccaggtacgtctcctctcgccccgagcgtctttttctttgatgttgcagtctcaccagcataagcatctaagttaaaggagtacttatatgttgaagcaaaatatatcttcccctcattccaacccttaaatactcgcccagcatccccttcaatattaaactgaagcaaaatgtacacaatataaggcaatgtaatggcataaaaatctattggggatgggtcaattatcaaaagatttattggagcttttcagatttcctttgtagtgcttgtcagcataaagcggtagcatcccaagaatccaacaactccaaacatgttttccgagctgttggaggctaacattaccgttccacaatatctaaactgatgacaaattgagatatcattagttagcatcactagtacacattctaacaatgtaggaacatataaatagagtgagtttaattcactagtacacagaggctctatagtggcggttctagagctgtttgcactggcgtttttcagtgccgccagtgttaggggccagtggaaatcgccatttccactggcggtttgcttaagaaaaccgccagtggaaatgctatttccactggcggttttctttatttagccgtcagtggaagttttcccgccttattttaaattttcaatcagtactgaaattt

SEQ ID NO: 57301 - DNA, 2135 bp, Zea Mays
gcgcattagtgattttttcatgaaatattataaatccatacaatttgcgatcatgattgattcttcatgcatacaatatgtcattaaacaaaataaattgtaatgccgaaattatctaatttcaaagtatatcatccatccaaaaaaatctagcacaagtatttcaacaaaaaacaaatttggactccaataacataaatcctaataatcatgtagcttaggctcatataactttaatcctccatctggtatgtgatgtatcttgacaccatcaagttggtaggcatatttaaggaggcacttggctacaatttatgcttaaaatctgacgaaggaggctactattttctgctatggacttcttcacttagcaatggtctcatcagatgcctgtgtcttagccttcaagctttggacttcatctcgtagtccatctttttcttgcctctcaatttgtaattgagactcaagttgctgcacctttgctgaaacagtcatttaagagcttttgttggtgggggctaggcctacattctgaaggaataaacttgatttaggtagcacttgggaaactacttctattgaagactttacgtggtgtccatcttcaactggtgctgccgccattgattccatatcaacaaaagctttctagacagtttcgctaaatcctttcttcttgctgcaatgcatctccttgaaaagatcaattgcactaggtttgatatctttaaatttatcttacttctaacatgatgtgaatttattattgtcagcaaggaacatttagcacaggttggacatctgatttggtgaagcatgcagtataagattactagaacagttgtacaacaaatgaattaacaaagcactgcatgtattagatattaaatacaaagacttaattacatgtatgcaagaagatctgcttgtagaagcatacacaatatctgagatgtaaaattgtatgtattataatcattaccattataagagtaatcaagtatatggtgtagctataacatatttaatcaagagcagtacttataaatacatatcaggtagcagaagcattcaaaagaattcatgttgtagctagtacatggatattagcatagtacattttttttgtaacaacacaatacttatttgcaagcctagacatgaacagttagcaggagcattaaaaatatttgaatggatagtgtgtattagaagaagtgcccattctgaaaataaacaactatgatctttaattgtaagtaacatttttatcttattgacttcaacaagtgtgcagatacgaaagaagtttatatatgacatggtaattttcttaccattgaatatgcctttgcaatgtaggattgagagcctgtgccctgtggaaactttacttgttcacaactaactttgttcttcatacatgtgtcctatacattgaatgagtatgacagcacaatagagagattataaatttgaaaaggtacatccgtatttatatggaggaaactggaggttgatgtcaaataccttgtgctttgaggtagaccacatttccattagaagtttccattggtcgtcgatcatgaacgaaataggcgatgtagtcctcacttgattcgctggaaccccattgaagtatttcttttttagcttatacctcatctagcgttgcccaccctttagcatatcaatgcatgctgctcttactgctgcattatcggcgtccatggtgaattgtccctagtaagttagcagtgaatccagtatatatgtttgcaaaggacggtaaacaatatctgaggaaaatgaagtacaaagctacttacaacaatctttccagtgtagttttctattttaccggtgttctcttccttcttgtactccgtcctgtgtggaactatcggcatgtgctgcctaagtacaatcccaccttctgatgcaaatttgacagcttgggtaggtgcctctggtcttcatttcccttcacgaatttgtattggaattttaatgcctaatcctctgcttaatgattcaagttgtcgacacatactactttgtcttggtactagttctatttattgttgacagtatgaaaaactaataattagtatgaaaccaaaatgaaatta

SEQ ID NO: 57302 - DNA, 1341 bp, Zea Mays
attgtaatgccgaaattatctaatttcaaagtatatcatccatccaaaaaaatctagcacaagtatttcaacaaaaaacaaatttggactccaataacataaatcctaataatcatgtagcttaggctcatataactttaatcctccatctggtatgtgatgtatcttgacaccatcaagttggtaggcatatttaaggaggcacttggctacaatttatgcttaaaatctgacgaaggaggctactattttctgctatggacttcttcacttagcaatggtctcatcagatgcctgtgtcttagccttcaagctttggacttcatctcgtagtccatctttttcttgcctctcaatttgtaattgagactcaagttgctgcacctttgctgaaacagtcatttaagagcttttgttggtgggggctaggcctacattctgaaggaataaacttgatttaggtagcacttgggaaactacttctattgaagactttacgtggtgtccatcttcaactggtgctgccgccattgattccatatcaaccattgaatatgcctttgcaatgtaggattgagagcctgtgccctgtggaaactttacttgttcacaactaactttgttcttcatacatgtgtcctatacattgaatgagtatgacagcacaatagagagattataaatttgaaaaggtacatccgtatttatatggaggaaactggaggttgatgtcaaataccttgtgctttgaggtagaccacatttccattagaagtttccattggtcgtcgatcatgaacgaaataggcgatgtagtcctcacttgattcgctggaaccccattgaagtatttcttttttagcttatacctcatctagcgttgcccaccctttagcatatcaatgcatgctgctcttactgctgcattatcggcgtccatggtgaattgtccctagtaagttagcagtgaatccagtatatatgtttgcaaaggacggtaaacaatatctgaggaaaatgaagtacaaagctacttacaacaatctttccagtgtagttttctattttaccggtgttctcttccttcttgtactccgtcctgtgtggaactatcggcatgtgctgcctaagtacaatcccaccttctgatgcaaatttgacagcttgggtaggtgcctctggtcttcatttcccttcacgaatttgtattggaattttaatgcctaatcctctgcttaatgattcaagttgtcgacacatactactttgtcttggtactagttctatttattgttgacagtatgaaaaactaataattagtatgaaaccaaaatgaaatta

SEQ ID NO: 57303 - DNA, 631 bp, Zea Mays
cgacggtcggggacggtgtgatgtaggcggcgctggcggcttggagcagccaggggtgtggccagacgtgctccgaccatgcttcagccattctcctttagcttttgctcgatccgtccatccatccatccaccaacaaccatttcctccttggtcccgtgcatgctcatagctcagaggcagatatgttgaatggacaaaagttatccatgtggtgcccatgtgctgactgtgagaatgaaaagcaatactcaaattcgttgactgtccatgcccacctaatcattcgaggattcatggatgactaaagatgttggaacaaacatggagaagaagatgtcaatgatcgagaccaggcgcaggctgctggtcaatacgatggcgaggaagcactccatgaaacttaggaagcactccatgaatcttatgccggtggtgaggaagcacactttggcaatcaggatctctctgatgataatgtagcagatattgctaccagctatgatgcagtccatctgacagagaatctagaggataaggtgcatgataccttgggctttgaggagtatactgatttggagttgtaatacccaaatttagtggataaaaaaaaatatatagaattatttgg

SEQ ID NO: 57304 - DNA, 359 bp, Zea Mays
ctcacttgtaacacacaccaacacataccaagctctctctactctctcaagatgtagctctagtagtagttagtcttggtgggagctctgctaggagtctggagtagtcttcaagagtctgacgagcaagtgaccgaggaacccgaagtagcccaagttggagattctgagcaggagctcgcagaaggtcaagaacaggtactgcaagatgaagactactacgacgagtttgatgagatctaggcgtcgtctcctagtcaactagggcttgtggaggatcatcgtcgtcatatggtgtaatatatttagttattttgtaaagaaactccgattatttaataaagatatgacattggttt

SEQ ID NO: 57305 - DNA, 1171 bp, Zea Mays
attgtggctagccctccggatagttgtggtagtggcaggtggtgacagccctgtttacctatgtattccaccatgttggggctagttattaaatcataggtctcattgtgctttgtgcctaatcaaccccctagaattatctacatgagcataagaaatatcaacagaaagcaggccctaaaagataccaaacctatagttgactcgaaagcaatgtctttggaaaatgaaagcgcactacagacggtgcacgtaagaagaggtggaagaaaatgtcaatcctatgggagctatcttactggaaagacttagaggtccaccacaacatcgatgtcattcacgtgaaaaagaatgtttgtgggagtttgcttgggacactcatgagtgatagatggaaaaccaaggaccatgcaaaagcacgagctaaccttgaagaattggacataaggcccgagctctatcctgacagtaccagtgcccaaccacctttatccagaatatattgccagaaaaaacccgaatggcaatcatgaacctctacttatttaatgtaatctctcagaaggtccttgatgaaggatcactggatgatcatgaaatgaacatgtgtgagatgatgtgtcttcccgagcttacttctcgctgactttctttgacatatccatcctatatttggttaaggagatcaggtttcttgcaccgatgttcctccaccacatgtatctgtacgagagatttatgagtactctgaatatccaaacaaaagaagacttttgataatcagagtacaaacccctttgttcagttgtgtgctaacaaacttagagagtgatctctacccttttgctcttgtgttttccttcgtggagattacagaagcgaccgcatcatcgccacccaatcagtgctcctgatccattgattctaggttgcgtaggttggttctttgagagtgtgattgggtgaatccttggttcaggctgctatatagacatagtgattggctccttgtgcatgtactcaagttgcactagttgtcgctgcttgcagcaagttattggttcttctttagctagttataaacatcagaatcctatgtctgtattttagcgtacttattgtactcatcaacatcatccatgacatcaactctgataatactttgtttccc

SEQ ID NO: 57306 - DNA, 338 bp, Zea Mays
attttccattaccctgaggtagcaatgagactcttaaacacattgttggacctccaagtctgaccaataaggcagatacttaaacaagatcgactgtttcttaaaaggtacactagggacaggagtacatccgaaggggattcagtcttcgggttgttgtcataaaatttgatgaacatcttgctgcggtatatgtgagttgtctttaagaagcatcggtaccttagaaaaaacaaacagcgcaaggcaatcattggtagtgacaatgataatggatctacatagaacgtcctcctttctgaacgcatcgtacatcggctgtaatacctggattctag

SEQ ID NO: 57307 - DNA, 280 bp, Zea Mays
ctccgcctccccggtcgtctagagaagccaagcgggagattccccgtcgtgtggcacggctgatgaagggagagggtgagcgcagggagccgagaagggagttcaggttcttcaacgacgaagcacgcaggggcgggccacggtgcttccccataccgcgcgggagtcgtccgcgtccgcgacttcaccgagccggagactggagcatcgctgtcggatcgaagggcaccgtcacgccgagaccttccgtaggcaaccgtatttatgccgacgagcaagt

SEQ ID NO: 57308 - DNA, 1884 bp, Zea Mays
gttctcttctactgctaccttgtatccataccgagttgctaacactggtcctcattttatagtccgtcctgacgtgggaagcacgcgggggaaggagtccagcggaggaacgccatcagacagtgtccgatccgaactctagcatgaggaagaggaagaagctgacagcgcgggcccggttgtcagtggaagcaaggcacgacccacttgtcggtggtcgagacagaagagggagtgcgcgctttcagcaaaaacaggctacgcgatactgggcctcaagctgctgggctacggccgcggaccgctagagctgaccacacgcttcaccaggcttagcacggagagaaaagaagagatgggctgcgttttggtgtggagctgggctgtagaaacaacttcactggaagactgcgcgtaaagaggatggggaagcaggccgcggctttgggcttccaggcttttttctgcggattgttgatggcggcgatggtgtgctctgctgtcgttagcgaaacagtgagtaagatcgtctcaagcctcctcgctaaggatgatggcaagtccagtgcagcagaaaacatagaaaggctggagatggcacacatcaagatggagtccgcgctgcacatggctgaaaaatggcaggtcactgatgtgccgctgctaaggtggcggagcaagctgaagcgcgccgcagaggagtgtgacggcgctctgcggaggtgcaagcagcgcgccctggaagaggaagagatccggcagtcctcgtttcccaaacggattgctcatgctaccaagtcatttatctcgtctttccccgccgccggcgctagcagagatgagacaagctcaggcagtagcgatgtccggagattcgagagggaaatctatgaagtaccacgcagttcacatgaattcctcaaggggtttatatcttggcttcatgctgcggctctctgaaagcactgacatactcggcgtcatcatcaggtgcttgcagtcagtcacgccgcggttgaagcctaccgcagaatgtgtcaagagagagctcattcagctgcctacgcaagatttctcctggttgccgtatggtctccataccaaaaatgagtactggaacaacgtccactgcagtttgactcagtggtatcgtccaaaccctctttgttgcaacgagcacaagaacaacaacaacttgatcacctcctctgttattggtagcacatttccggaggaggacaaaactaatctgagttctgcagctcaacatggaggaactggttttcaggattcagattttccgccagtgaaagtaggagttttgatcatacctcacgactctccagaggacatggagcctggagctgagacctatgctctagaggtgattgctgaaaaggagaagggaatggtggtacacaccaatgcatgcctgcaagacctagatgagaagttactacccaaggcgataaattacctgaatcagaatcctgaatcgaaggaataccaaatgtgtttcaagtctagacatggcacggcgcacctttacctggagaagacgagtgcacaaatgcaaaaaggacgtacaagtaaaagcaaaaccacaaagctgcaggctcggaagaaaagggtaattccattcgacagcgtagagatatggaagcaggcctcccgggactatctcaagttatgggttgttcgtgcatcgagcacactacgaagtttattcaggtcttgggctggccatacttagcttcgcacaagggctggtacaccagaatgtattgaaaaaaaaaaatgctatgtgctgctagttccatccaccagggatactgaaatgtgtttagccagtgaagtatctgttgtgtataaattaaatccatg

SEQ ID NO: 57309 - DNA, 1963 bp, Zea Mays
gtttattatgtcagttatcaaaataattcaatgctttacttgatgacttcagttctccttgtacctcccactcagaactctgagcttctgaacatggaacttgactaataaagtaataatactgctgatgacttgagacttggcaatggtctctttcttgtcgtctatctgaggctcaaggcctaaacttcaaaggtgggattgtgggaagcacaaatctaatctatcgaatgtcctagtggaacgccatcttgacttgaatgatgacttcagttctccttcgttgctatatatcccttgaacctatacatacgcgtatctctcactcagaactttgaacctcttcatgctgcaaacccttcgcccaggatcgcaatcccacactacaaagtgatccatctctgggccttgccgacaacaaaagcaactacagcgcttttttctgcggattgttgatggcggcgatggtgtgctctgctgtcgttagcgaaacagtgagtaagatcgtctcaagcctcctcgctaaggatgatggcaagtccagtgcagcagaaaacatagaaaggctggagatggcacacatcaagatggagtccgcgctgcacatggctgaaaaatggcaggtcactgatgtgccgctgctaaggtggcggagcaagctgaagcgcgccgcagaggagtgtgacggcgctctgcggaggtgcaagcagcgcgccctggaagaggaagagatccggcagtcctcgtttcccaaacggattgctcatgctaccaagtcatttatctcgtctttccccgccgccggcgctagcagagatgagacaagctcaggcagtagcgatgtccggagattcgagaggtttgcagacagttcacatgaattcctcaagttcgtcgaggtcggtggaaccccctggaagtacacgttcttcaaccctctcatcggccatcttcttgcagggaaatctatgaagtaccacgcagttcacatgaattcctcaaggggtttatatcttggcttcatgctgcggctctctgaaagcactgacatactcggcgtcatcatcaggtgcttgcagtcagtcacgccgcggttgaagcctaccgcagaatgtgtcaagagagagctcattcagctgcctacgcaagatttctcctggttgccgtatggtctccataccaaaaatgagtactggaacaacgtccactgcagtttgactcagtggtatcgtccaaaccctctttgttgcaacgagcacaagaacaacaacaacttgatcacctcctctgttattggtagcacatttccggaggaggacaaaactaatctgagttctgcagctcaacatggaggaactggttttcaggattcagattttccgccagtgaaagtaggagttttgatcatacctcacgactctccagaggacatggagcctggagctgagacctatgctctagaggtgattgctgaaaaggagaagggaatggtggtacacaccaatgcatgcctgcaagacctagatgagaagttactacccaaggcgataaattacctgaatcagaatcctgaatcgaaggaataccaaatgtgtttcaagtctagacatggcacggcgcacctttacctggagaagacgagtgcacaaatgcaaaaaggacgtacaagtaaaagcaaaaccacaaagctgcaggctcggaagaaaagggtaattccattcgacagcgtagagatatggaagcaggcctcccgggactatctcaagttatgggttgttcgtgcatcgagcacactacgaagtttattcaggtcttgggctggccatacttagcttcgcacaagggctggtacaccagaatgtattgaaaaaaaaaaatgctatgtgctgctagttccatccaccagggatactgaaatgtgtttagccagtgaagtatctgttgtgtataaattaaatccatg

SEQ ID NO: 57310 - DNA, 505 bp, Zea Mays
cccggccaatggtacaaattttaccccttccttccaagcttccgaccatgttcctcgtcggtctgcatctaaaacccaggatcgttttccctatcagtctccacatcttctattcgggggtcgtgcacatggatctcaattcagtccttatttaggccaattacccaaaatgaatttccccgccttcgatggcgaaaatcccaagctgtggatggctcgttgtgaggactactttctcatgtatagcgttgatcctctagcctaggttatggtagccactatgcagttctctggtcctgctgctagatggttacagtctgtcaaacctcgtttagttcacatgtcatggggagatttcaaggtccttctgctagacagatttggcaaagatgaacatgcattccttattcgccagctgttccaacttaaacaaaccgaaactatgtcagattacatcgatcagtttgctcatttaattgatcaattgaatgcctatcagaccgtt

SEQ ID NO: 57311 - DNA, 1672 bp, Zea Mays
gcatcgaaccccgtgagtgttcgccgacgtggcccggcgtcagcgtcgcgtcgatctctctgccgaggacctcgctctccaccaagaggcggtcagcgctgcccgacggcaccgtcgcctctagggcatcgaacaccgtcgagtagtagcccatcgccgcggtcacccgctatggcaggtcatcggagcagtcgtcgctgccggtgctgttggcttccttctcaacgatggtcaccacggcggggttcatggatttaacccacttcaggaatgtaccttgacttcgtccgggagaagcagaaactggtctcgtgaatccttctaagctcctgaccagcattgacgaacagatagcggaaagccagggaggagccgtccaggagagaaatcatggagaagataaacaagtggctgctggcttgcgaggaagagaaatggctggatgagtacaatatggtaggtccaaaatgtgggtttggatacatcgaacactgatttcaaatgtggaagacagataaagaccaggcaaactatattgaatgggagaggataaagccaatcaacatatgagaggtcgccgtcgcaggctgcgcagcaggtgtcgccccagcagcaatataggcggtggtggctgtgcgggcccaggcactggcccaggtgacgcgggcaagccaaagaggtcgggctgcaggctgtagctgccgccgagctgctcctggcgcttctggttccagtcgccaactcatcagatgtactatatagatatagaccgtgaactttgtattgatgattttctttgtggtgatgattacaaaataaatatttctgaactaatgaagatcagttcaataacctgcatgggattagccaattggaacatcaaaagtctgatgccctcgccttgtaccgtcttgagtacaagtcctctagctccaaaagaagcgtcaggtcaaaactgtccagtagtccactgaatgaaatccagcagcaaatgggcaggctgactgcagacagtcctgtggagaacaaacggactgctaggagcaagccaaaggctaaccagaaggataccaatgcaaatattcatccccatgttaacgcccccaatcaagttaatgctccaaatgcttatcaagcaacaccgcaggtgaaccaaatgacacttatgaatgggaacgttgtttatggacctcatctcccacattctgaagacgtcatctatggacctcatcttccacatggatactcagctgaaggaagcagcttcttttggaacacaagtgactatcaatatacataaaagttgctaacaaaaactatcacatttttctcaaagatcagttcaaattaaagtgctcttattctgtgtttaagcgacttatttctgtatattgcggaatgtctgaagcttatgttcactgtttgatctgctgctgctgaataatgttgccagcctagggttcatgtcacttttcatctgcatttttactacaagcatcctagaaatgagatggagtggtgttggaattgatgacacatgtgtgcgatttgaaaaacacctgttttgtgttgtgcttccttgcattctctacaacaatgtaatagattactatgccttttctgtaatactttttatctgaatttttttataatatttatatcttacaacaaa

SEQ ID NO: 57312 - DNA, 2166 bp, Zea Mays
gcatcgaaccccgtgagtgttcgccgacgtggcccggcgtcagcgtcgcgtcgatctctctgccgaggacctcgctctccaccaagaggcggtcagcgctgcccgacggcaccgtcgcctctagggcatcgaacaccgtcgagtagtagcccatcgccgcggtcacccgctatggcaggtcatcggagcagtcgtcgctgccggtgctgttggcttccttctcaacgatggtcaccacggcggggttcatggatttaacccacttcaggaatgtaccttgacttcgtccgggagaagcagaaactggcactacaagctgtgcgttggccgttggctcgtcctccccgcctccccggcgacgtcgcgggggcagcaaccgtactaccacggcgcatatgcggagtccgggtccgaccgcttccactatgcgtaccagcgcgctggtagctccacagcatcggcgctgaggctgcgcatgaggggcgcgatgtccaaccgtaacatcacgctgtcagtcagcgcgcacaccaacctccttgccggcaacgaggaagggaacggtgaagtggaaatagtggctggcagcagtgaggaggatgaggcaaaggagtggagacggcgtacatcctccttgtcgggtgccatgcgagggtgaaatgggatctgcaagcctacatgggccctgattgttctttccttcttcttttttcaagtacatcggttcgattcaatctcagtaccaagaaatgaatttgcgaatctgatgagccatcatgtggttttccctacctgtcgtgacatggtctcgtgaatccttctaagctcctgaccagcattgacgaacagatagcggaaagccagggaggagccgtccaggagagaaatcatggagaagataaacaagtggctgctggcttgcgaggaagagaaatggctggatgagtacaatatggtaggtccaaaatgtgggtttggatacatcgaacactgatttcaaatgtggaagacagataaagaccaggcaaactatattgaatgggagaggataaagccaatcaacatatgagaggtcgccgtcgcaggctgcgcagcaggtgtcgccccagcagcaatataggcggtggtggctgtgcgggcccaggcactggcccaggtgacgcgggcaagccaaagaggtcgggctgcaggctgtagctgccgccgagctgctcctggcgcttctggttccagtcgccaactcatcaggtactatatagatatagaccgtgaactttgtattgatgattttctttgtggtgatgattacaaaataaatatttctgaactaatgaagatcagttcaataacctgcatgggattagccaattggaacatcaaaagtctgatgccctcgccttgtaccgtcttgagtacaagtcctctagctccaaaagaagcgtcaggtcaaaactgtccagtagtccactgaatgaaatccagcagcaaatgggcaggctgactgcagacagtcctgtggagaacaaacggactgctaggagcaagccaaaggctaaccagaaggataccaatgcaaatattcatccccatgttaacgcccccaatcaagttaatgctccaaatgcttatcaagcaacaccgcaggtgaaccaaatgacacttatgaatgggaacgttgtttatggacctcatctcccacattctgaagacgtcatctatggacctcatcttccacatggatactcagctgaaggaagcagcttcttttggaacacaagtgactatcaatatacataaaagttgctaacaaaaactatcacatttttctcaaagatcagttcaaattaaagtgctcttattctgtgtttaagcgacttatttctgtatattgcggaatgtctgaagcttatgttcactgtttgatctgctgctgctgaataatgttgccagcctagggttcatgtcacttttcatctgcatttttactacaagcatcctagaaatgagatggagtggtgttggaattgatgacacatgtgtgcgatttgaaaaacacctgttttgtgttgtgcttccttgcattctctacaacaatgtaatagattactatgccttttctgtaatactttttatctgaatttttttataatatttatatcttacaacaaa

SEQ ID NO: 57313 - DNA, 2078 bp, Zea Mays
gcatcgaaccccgtgagtgttcgccgacgtggcccggcgtcagcgtcgcgtcgatctctctgccgaggacctcgctctccaccaagaggcggtcagcgctgcccgacggcaccgtcgcctctagggcatcgaacaccgtcgagtagtagcccatcgccgcggtcacccgctatggcaggtcatcggagcagtcgtcgctgccggtgctgttggcttccttctcaacgatggtcaccacggcggggttcatggatttaacccacttcaggaatgtaccttgacttcgtccgggagaagcagaaactggcactacaagctgtgcgttggccgttggctcgtcctccccgcctccccggcgacgtcgcgggggcagcaaccgtactaccacggcgcatatgcggagtccgggtccgaccgcttccactatgcgtaccagcgcgctggtagctccacagcatcggcgctgaggctgcgcatgaggggcgcgatgtccaaccgtaacatcacgctgtcagtcagcgcgcacaccaacctccttgccggcaacgaggaagggaacggtgaagtggaaatagtggctggcagcagtgaggaggatgaggcaaaggagtggagacggcgtacatcctccttgtcgggtgccatgcgagggtgaaatgggatctgcaagcctacatgggccctgattgttctttccttcttcttttttcaagtctcgtgaatccttctaagctcctgaccagcattgacgaacagatagcggaaagccagggaggagccgtccaggagagaaatcatggagaagataaacaagtggctgctggcttgcgaggaagagaaatggctggatgagtacaatatggtaggtccaaaatgtgggtttggatacatcgaacactgatttcaaatgtggaagacagataaagaccaggcaaactatattgaatgggagaggataaagccaatcaacatatgagaggtcgccgtcgcaggctgcgcagcaggtgtcgccccagcagcaatataggcggtggtggctgtgcgggcccaggcactggcccaggtgacgcgggcaagccaaagaggtcgggctgcaggctgtagctgccgccgagctgctcctggcgcttctggttccagtcgccaactcatcagatgtactatatagatatagaccgtgaactttgtattgatgattttctttgtggtgatgattacaaaataaatatttctgaactaatgaagatcagttcaataacctgcatgggattagccaattggaacatcaaaagtctgatgccctcgccttgtaccgtcttgagtacaagtcctctagctccaaaagaagcgtcaggtcaaaactgtccagtagtccactgaatgaaatccagcagcaaatgggcaggctgactgcagacagtcctgtggagaacaaacggactgctaggagcaagccaaaggctaaccagaaggataccaatgcaaatattcatccccatgttaacgcccccaatcaagttaatgctccaaatgcttatcaagcaacaccgcaggtgaaccaaatgacacttatgaatgggaacgttgtttatggacctcatctcccacattctgaagacgtcatctatggacctcatcttccacatggatactcagctgaaggaagcagcttcttttggaacacaagtgactatcaatatacataaaagttgctaacaaaaactatcacatttttctcaaagatcagttcaaattaaagtgctcttattctgtgtttaagcgacttatttctgtatattgcggaatgtctgaagcttatgttcactgtttgatctgctgctgctgaataatgttgccagcctagggttcatgtcacttttcatctgcatttttactacaagcatcctagaaatgagatggagtggtgttggaattgatgacacatgtgtgcgatttgaaaaacacctgttttgtgttgtgcttccttgcattctctacaacaatgtaatagattactatgccttttctgtaatactttttatctgaatttttttataatatttatatcttacaacaaa

SEQ ID NO: 57314 - DNA, 1764 bp, Zea Mays
gtcacgggcttcttcgtcaccgagccttctcgtcctcgcggacttgtgacttgtgactccagtcccttccaatcaacaagttgctatagtagtcccttccaaaatccacactggaaccggaacctccatctccaatccaatccaactccagatccgcctccctgctgcatccccatcccgcacgagcaccaccccttgtcctctccgcctctacatctcatcggctggtgcacctcctccctcctctgctcggcccctccctcccttctcgtgctacggcagcgtggatgcacgagactacagctgtggcaaagcggagatccggcgggagtgcagcggccggcgtgcctctacgtggtatggtgacatgaagatgcgaggcgaggcgagcaaggccagctccggctccggctctggctccagcgaggatggtgagcgaaccggccccgtgccttcccccgctcgtcgcgcgccgcccatccgcatcgacgtcgccatgggctccttctccgcatgtcgccgccacgagatctgcccgcgcgtctccttcggcagccgatgcccgacggccgtccgacctccgacgcatcgtcgccggtccggtcctcttcgccccctctccgctgcgtggcgccacccgtcgtcacctccgcccccttcaccgacctctcctgggtcctccacacactgctcgtcaccatcgtcatgcgcgaggcgctcaaggactggtgattgcggtgtgttggttgaggatgccagagatgagctgaagcttctagcattatgtacaaaaggtatttgtcgaattacctggatgggattttgctatacttcacttgatttatcatatttcctttgctcatcagttctgaacaagtgaccacgtctaactcacaactctcccatttctggttgcgcgaatttcttcaattctttcagaaatcagaattgcatgacttttatcttaacataagttagagtagctgtgcataaatgtggagaatattgatcagagtttatgatttgttcaaactgaaactcactaaattcttgcaattaaggactatcggatggtcagcatccaatttatctatgttcagcataatggcatcaagtttttgctaatatgactgtagagtcttaagacttcaattaatttttgcaggggattgacatgctatcatttgtatcaattaaaactagagctgttctcttgatataagggttttctccatatttgagatggattgaacactgtatcctttacctgcagcattttttctgtatctcgtgataatttttcagtcactctaatctctctctccatgcagctgataggttttctccatatgttgcttgggaatgcttgattttttttctagctgcataaagctttgtatcatcaaacaattcataaaagaggctgacctgttctagttattggtgtcagatttgactgcagtcccatgattttttgcttcagatgggactggactttggttcagagtttgagataatcaatctgtagtctaaaaattgtatgtgtttgtagttgatgggagcacctctcaggagttaccttagtgctttagatgtaataattgttctgtaactgaataaacatttgcatttgtgatgcattttgactatatatgtgagatgtttataaaaacacgtgcaatatatataatattggctttcctccatgtttttttccagtttttcatttagtgacgcgtctcggcgagacacgccactgatttg

SEQ ID NO: 57315 - DNA, 1384 bp, Zea Mays
ttcttcgtcaccgagccttctcgtcctcgcggacttgtgacttgtgactccagtcccttccaatcaacaagttgctatagtagtcccttccaaaatccacactggaaccggaacctccatctccaatccaatccaactccagatccgcctccctgctgcatccccatcccgcacgagcaccaccccttgtcctctccgcctctacatctcatcggctggtgcacctcctccctcctctgctcggcccctccctcccttctcgtgctacggcagcgtggatgcacgagactacagctgtggcaaagcggagatccggcgggagtgcagcggccggcgtgcctctacgtggtatggtgacatgaagatgcgaggcgaggcgagcaaggccagctccggctccggctctggctccagcgaggatggtgagcgaaccggccccgtgccttcccccgctcgtcgcgcgccgcccatccgcatcgacgtcgccatgggctccttctccgcatgtcgccgccacgagatctgcccgcgcgtctccttcggcagccgatgcccgacggccgtccgacctccgacgcatcgtcgccggtccggtcctcttcgccccctctccgctgcgtggcgccacccgtcgtcacctccgcccccttcaccgacctctcctgggtcctccacacactgctcgtcaccatcgtcatgcgcgaggcgctcaaggactggtgattgcggtgtgttggttgaggatgccagagatgagctgaagcttctagcattatgtacaaaaggggattgacatgctatcatttgtatcaattaaaactagagctgttctcttgatataagggttttctccatatttgagatggattgaacactgtatcctttacctgcagcattttttctgtatctcgtgataatttttcagtcactctaatctctctctccatgcagctgataggttttctccatatgttgcttgggaatgcttgattttttttctagctgcataaagctttgtatcatcaaacaattcataaaagaggctgacctgttctagttattggtgtcagatttgactgcagtcccatgattttttgcttcagatgggactggactttggttcagagtttgagataatcaatctgtagtctaaaaattgtatgtgtttgtagttgatgggagcacctctcaggagttaccttagtgctttagatgtaataattgttctgtaactgaataaacatttgcatttgtgatgcattttgactatatatgtgagatgtttataaaaacacgtgcaatatatataatattggctttcctccatgtttttttccagtttttcatttagtgacgcgtctcggcgagacacgccactgatttg

SEQ ID NO: 57316 - DNA, 1204 bp, Zea Mays
gccttctcgtcctcgcggacttgtgacttgtgactccagtcccttccaatcaacaagttgctatagtagtcccttccaaaatccacactggaaccggaacctccatctccaatccaatccaactccagatccgcctccctgctgcatccccatcccgcacgagcaccaccccttgtcctctccgcctctacatctcatcggctggtgcacctcctccctcctctgctcggcccctccctcccttctcgtgctacggcagcgtggatgcacgagactacagctgtggcaaagcggagatccggcgggagtgcagcggccggcgtgcctctacgtggtatggtgacatgaagatgcgaggcgaggcgagcaaggccagctccggctccggctctggctccagcgaggatggtgagcgaaccggccccgtgccttcccccgctcgtcgcgcgccgcccatccgcatcgacgtcgccatgggctccttctccgcatgtcgccgccacgagatctgcccgcgcgtctccttcggcagccgatgcccgacggccgtccgacctccgacgcatcgtcgccggtccggtcctcttcgccccctctccgctgcgtggcgccacccgtcgtcacctccgcccccttcaccgacctctcctgggtcctccacacactgctcgtcaccatcgtcatgcgcgaggcgctcaaggactggtgattgcggtgtgttggttgaggatgccagagatgagctgaagcttctagcattatgtacaaaagctgataggttttctccatatgttgcttgggaatgcttgattttttttctagctgcataaagctttgtatcatcaaacaattcataaaagaggctgacctgttctagttattggtgtcagatttgactgcagtcccatgattttttgcttcagatgggactggactttggttcagagtttgagataatcaatctgtagtctaaaaattgtatgtgtttgtagttgatgggagcacctctcaggagttaccttagtgctttagatgtaataattgttctgtaactgaataaacatttgcatttgtgatgcattttgactatatatgtgagatgtttataaaaacacgtgcaatatatataatattggctttcctccatgtttttttccagtttttcatttagtgacgcgtctcggcgagacacgccactgatttg

SEQ ID NO: 57317 - DNA, 1671 bp, Zea Mays
gccttctcgtcctcgcggacttgtgacttgtgactccagtcccttccaatcaacaagttgctatagtagtcccttccaaaatccacactggaaccggaacctccatctccaatccaatccaactccagatccgcctccctgctgcatccccatcccgcacgagcaccaccccttgtcctctccgcctctacatctcatcggctggtgcacctcctccctcctctgctcggcccctccctcccttctcgtgctacggcagcgtggatgcacgagactacagctgtggcaaagcggagatccggcgggagtgcagcggccggcgtgcctctacgtggtatggtgacatgaagatgcgaggcgaggcgagcaaggccagctccggctccggctctggctccagcgaggatggtgagcgaaccggccccgtgccttcccccgctcgtcgcgcgccgcccatccgcatcgacgtcgccatgggctccttctccgcatgtcgccgccacgagatctgcccgcgcgtctccttcggcagccgatgcccgacggccgtccgacctccgacgcatcgtcgccggtccggtcctcttcgccccctctccgctgcgtggcgccacccgtcgtcacctccgcccccttcaccgacctctcctgggtcctccacacactgctcgtcaccatcgtcatgcgcgaggcgctcaaggtagttgaatttgatggcaaaatcgactgcttgctaggactggtgattgcggtgtgttggttgaggatgccagagatgagctgaagcttctagcattatgtacaaaagatttgactgcagtcccatgattttttgcttcagatgggactggactttggtaatccatttcacaattattttccaatgctgttagtatttcctttccttttgttctcaagtctttctaagaatgtcactcataactagtaatagtatttcttttccttttgttctcaagtctttctaagaatgtcactcataattggtaatagtatttcctttccttttgttcataagtcttctaagaatgtcagtcatagctggtaatggtaatcatggttgtaacctgatttgtagtgagagaccagtaaccatataatgagctatgttcttatgagataaaagctggagacttttttttgacatggttcttccttttagaatgataagaaaataatcttgatgtctatatgcacttattgagaccatgtaaagagaatataatgcaacatttgatatgtttgaaatatctctctgcctatattctaagctagaacaatccatactccatatgcttgaattatcctttcttagatgattgactcagattcgtctttgtacttgtattataaatataaacgaacttcttatttttcttcccttccaggttcagagtttgagataatcaatctgtagtctaaaaattgtatgtgtttgtagttgatgggagcacctctcaggagttaccttagtgctttagatgtaataattgttctgtaactgaataaacatttgcatttgtgatgcattttgactatatatgtgagatgtttataaaaacacgtgcaatatatataatattggctttcctccatgtttttttccagtttttcatttagtgacgcgtctcggcgagacacgccactgatttg

SEQ ID NO: 57318 - DNA, 1336 bp, Zea Mays
gacaaagcaatcaagatcagcatcgcaaggctccattgtgtgaccggtgcacttacatctgaaatagaatggtgccttcggctttttggccttcacaacgtcatccccggcttgctgtgcagccacttctggagacgcagaagaatcagacccgggaaacgaaccctgtgcatgatgctgcaacagctgtctcccagaacctgaggctccattccagatgaaccaggcgccccacgaattggaccagatcctcgacccgcaggtacctgatggggacgccgaaactgctgctgctgtccctgaagaatatgcgtcggtggtgcacgattctgtccaccccatcctcgcccacccctagccttcgtaggctggcgtgctgtcatagctgcgtaggagggacgaactggctgtggcggcggacgaaaacacgaagtcgcaatcgaacgcaatgaagggtaacatggagacgcagctgaccgcgggcgcagatgtggtgtggatcgggcccgcacgaagttgaggcaagaacgactgaattccttggcccggtcaaccagcagtaaattacttagaaaatcaaagcgtcctcatcgtccaatcctgtgatgcctctggtcctgctaagatctcgttctgtgtggttttccccttcggtcagccgagatagcggtgtttactcataaagtctggcaaccggtgtagatgcactggaagatggggaagatctgcagtttgatcctgaggcttacaattatctccgaggttttggcattggctggtcttgcttgagctactgaggaagaggaggtgaaccttgatcggcgtgttggcagaatactggaggaactcgagatggtctccattgaggaaggtcgtttgaggttcgagagcctgatgccactgttctaggaactactagagaacaagagcccgatggctatacttgaacccctcatgcaacagacgtttattagaattgacacacttaccattgtaaggcctagaccaattggttggttccctcccttgatgtagggatgatgcttgttgtattgcattactgcactggcaaccattgtacaggttgtagcttctcatggttagcagagtgcaggcatgattttttacatgtgcagcctgcacacctgtcgtccagtagtttggctcggttgtattagcagcaacaatgagtggtgttgtcgtgttatgccttaagcaaattgtatggtagttgtatcgatgattcgtctgtatggcttgggtgcctgtcgcaaaactgaataatcgatcgtgccttatgatgtgccagacattgtggtgcttggagatcattgtg

SEQ ID NO: 57319 - DNA, 1815 bp, Zea Mays
gacaaagcaatcaagatcagcatcgcaaggctccattgtgtgaccggtgcacttacatctgaaatagaatggtgccttcggctttttggccttcacaacgtcatccccggcttgctgtgcagccacttctggagacgcagaagaatcagacccgggaaacgaaccctgtgcatgatgctgcaacagctgtctcccagaacctgaggctccattccagatgaaccaggcgccccacgaattggaccagatcctcgacccgcaggtacctgatggggacgccgaaactgctgctgctgtccctgaagaatatgcgtcggtggtgcacgattctgtccaccccatcctcgcccacccctagccttcgtaggctggcgtgctgtcatagctgcgtaggagggacgaactggctgtggcggcggacgaaaacacgaagtcgcaatcgaacgcaatgaagggtaacatggagacgcagctgaccgcgggcgcagatgtggtgtggatcgggcccgcacgaagttgaggcaagaacgactgaattccttggcccggtcaaccagcagtaaattacttagaaaatcaaagcgtcctcatcgtccaatcctgtgatgcctctggtcctgctaagatctcgttctgtgtggttttccccttcggtcagccgagatagcggtgtttactcataaagtctggcaaccggtgtagatgcactggaagatggggaagatctgcagtttgatcctgaggcttacaattatctccgaggttttggcattggctggtcttgcttgagatcggagttccctcatacattctatggtgttgcaagaacgcaggttgtgttagtctttacacctttaaaacctaggcattgctttttcgcaaaaaaactaggtattattactatcgaaacttggattgcttttgatgtctatcacatagtgctttttgttatctaaattagaacttgtacatgaattagttttgtacttctgttcctgtttatgtgttttggatttaaaaagtgcaccattgctgattttaagctcagaaaagccatgccaaaaacgttttgtgagctctcgcttgcatttatatcattactgttgccagaaattgtgatggattgcaagcgggtgaatttggactggcaaaagattaatataagcttaaatgcgacaactttgtgtttgatgtactgtacctaccagtattctgacaataaaatttagtttttctttctgagttcgcaacgcactgtacctacctcagctactgaggaagaggaggtgaaccttgatcggcgtgttggcagaatactggaggaactcgagatggtctccattgaggaaggtcgtttgaggttcgagagcctgatgccactgttctaggaactactagagaacaagagcccgatggctatacttgaacccctcatgcaacagacgtttattagaattgacacacttaccattgtaaggcctagaccaattggttggttccctcccttgatgtagggatgatgcttgttgtattgcattactgcactggcaaccattgtacaggttgtagcttctcatggttagcagagtgcaggcatgattttttacatgtgcagcctgcacacctgtcgtccagtagtttggctcggttgtattagcagcaacaatgagtggtgttgtcgtgttatgccttaagcaaattgtatggtagttgtatcgatgattcgtctgtatggcttgggtgcctgtcgcaaaactgaataatcgatcgtgccttatgatgtgccagacattgtggtgcttggagatcattgtg

SEQ ID NO: 57320 - DNA, 1530 bp, Zea Mays
aagaatcagacccgggaaacgaaccctgtgcatgatgctgcaacagctgtctcccagaacctgaggctccattccagatgaaccaggcgccccacgaattggaccagatcctcgacccgcaggtacctgatggggacgccgaaactgctgctgctgtccctgaagaatatgcgtcggtggtgcacgattctgtccaccccatcctcgcccacccctagccttcgtaggctggcgtgctgtcatagctgcgtaggagggacgaactggctgtggcggcggacgaaaacacgaagtcgcaatcgaacgcaatgaagggtaacatggagacgcagctgaccgcgggcgcagatgtggtgtggatcgggcccgcacgaagttgaggcaagaacgactgaattccttggcccggtcaaccagcagtaaattacttagaaaatcaaagcgtcctcatcgtccaatcctgtgatgcctctggtcctgctaagatctcgttctgtgtggttttccccttcggtcagccgagatagcggtgtttactcataaagttgcgcctaaatgaatcaccttttttgcttagagttttcggattgttccttctgtaaaatggtgcatattgtttcagtgtgtgaactatactgaaccattcagtgcttcattttaggtctggcaaccggtgtagatgcactggaagatggggaagatctgcagtttgatcctgaggcttacaattatctccgaggttttggcattggctggtcttgcttgaggtaaagtttatcttcattccccccactttttgggtgcttacttcaggagtcaggacaatatacgatctgttttcaattactaaaaccttctgttgcggttttaatgttgtgcgcgatcaacttggactcatcagatcggagttccctcatacattctatggtgttgcaagaacgcagtttttctttctgagttcgcaacgcactgtacctacctcagctactgaggaagaggaggtgaaccttgatcggcgtgttggcagaatactggaggaactcgagatggtctccattgaggaaggtcgtttgaggttcgagagcctgatgccactgttctaggaactactagagaacaagagcccgatggctatacttgaacccctcatgcaacagacgtttattagaattgacacacttaccattgtaaggcctagaccaattggttggttccctcccttgatgtagggatgatgcttgttgtattgcattactgcactggcaaccattgtacaggttgtagcttctcatggttagcagagtgcaggcatgattttttacatgtgcagcctgcacacctgtcgtccagtagtttggctcggttgtattagcagcaacaatgagtggtgttgtcgtgttatgccttaagcaaattgtatggtagttgtatcgatgattcgtctgtatggcttgggtgcctgtcgcaaaactgaataatcgatcgtgccttatgatgtgccagacattgtggtgcttggagatcattgtg

SEQ ID NO: 57321 - DNA, 1210 bp, Zea Mays
cgggaaacgaaccctgtgcatgatgctgcaacagctgtctcccagaacctgaggctccattccagatgaaccaggcgccccacgaattggaccagatcctcgacccgcaggtacctgatggggacgccgaaactgctgctgctgtccctgaagaatatgcgtcggtggtgcacgattctgtccaccccatcctcgcccacccctagccttcgtaggctggcgtgctgtcatagctgcgtaggagggacgaactggctgtggcggcggacgaaaacacgaagtcgcaatcgaacgcaatgaagggtaacatggagacgcagctgaccgcgggcgcagatgtggtgtggatcgggcccgcacgaagttgaggcaagaacgactgaattccttggcccggtcaaccagcagtaaattacttagaaaatcaaagcgtcctcatcgtccaatcctgtgatgcctctggtcctgctaagatctcgttctgtgtggttttccccttcggtcagccgagatagcggtgtttactcataaagtctggcaaccggtgtagatgcactggaagatggggaagatctgcagtttgatcctgaggcttacaattatctccgaggttttggcattggctggtcttgcttgagttcgcaacgcactgtacctacctcagctactgaggaagaggaggtgaaccttgatcggcgtgttggcagaatactggaggaactcgagatggtctccattgaggaaggtcgtttgaggttcgagagcctgatgccactgttctaggaactactagagaacaagagcccgatggctatacttgaacccctcatgcaacagacgtttattagaattgacacacttaccattgtaaggcctagaccaattggttggttccctcccttgatgtagggatgatgcttgttgtattgcattactgcactggcaaccattgtacaggttgtagcttctcatggttagcagagtgcaggcatgattttttacatgtgcagcctgcacacctgtcgtccagtagtttggctcggttgtattagcagcaacaatgagtggtgttgtcgtgttatgccttaagcaaattgtatggtagttgtatcgatgattcgtctgtatggcttgggtgcctgtcgcaaaactgaataatcgatcgtgccttatgatgtgccagacattgtggtgcttggagatcattgtg

SEQ ID NO: 57322 - DNA, 1366 bp, Zea Mays
ccgataccttagtaaaaatcatccgcgtcatcttcaccattgtggtcaggagtttgtacttctactgagctcttacattccacatttacattccacattacattccacattaagtacttacaattgtgtgcttacattcctagcttagcaaacggctagatcataggattggatcctaggttgcaagtctttttatagtagaagtagcagcacttagcaaacctagtgcacatcaagttagatttattgcataggttttgttgagttaaaaaagtgagccttagtttttagaagcctaattcacccccctcttaggcatcaaggtcctccttcaagtggtatcaaagctaggccactcaattcaagtccactttcattgttattagagctcaccactcatatttggacttttggcttcaccaccagattgagtaaagttgacatataagagaaagggatggatacagataaggctccacactttgacggcacaaactacccctattggagtgttagaatagcttgtcatctagaggccgtaggtttggatgtttggagaatgacgatggaagcaacgaaaccccacgctaagcctgaaaagcttaccaaagcagaacgaaaggaggctaaactcaatgcgattgcatgtgatgctatctttggcgcattgagtcttgatgtcttcaatagagtaggtaccctgaaaagcgctcatgagatatggcatatgcttaaggacctccatgacggcacgagtgacgttaaggagcaacgacttagcttggcttcccgtgcatttgaatcttttgaaatgcttcctaatgaattggctaatgatatgtactcacgtttaaatattattgtcaatgagtagaattctatagggagaggaaccaagttgaccgatgctgatgtagcaagaaagatcatccaagtgcttccaaataaaatatatgcaagcatcatcacctacctcctcaacaatgaagagttcagcacaatgacgcccaccaaagttcttggcaaaattaccgcatttgagatgtaccacaagattggccaagaaccttcttcaccaaagttatgtggactcataagccatgaagaggagaagaaaaggaagggcaagagcaagaaaattgaatcaagctcaagctcaagtgaagaagaagatgatgagaaagatggtgatgaagatgatcaaaagcaaagttcctcctcctccgatgatgaagaaatgaagatgttgatcaagagattggagagaacaatgaagaagctcaactccaagggcatccccatcaccattgaagatgttcaattcaataaccaaaacggtgagaatttcgtgggtgatcaagaatac

SEQ ID NO: 57323 - DNA, 1871 bp, Zea Mays
gtgggatatcagtggatcctagcaaggtgcaagaagtattgaattggaaaccaccaactgatgttagtcagtttcgtagctttctgagattggctagttactacagaagatttattgaagggttttccaagattgctaagcctatgacagctctgctagagaagaatgccaagtttgtgtggtcagataagtgtcaagcaaacttcgaggagtcaaagaagagattgactacagcacccgtgttgattttgcctgatctaagcaagaactctatctattgtgatgcatctcgactgggtatatccgctaggtcttcgttggcaccttccctgacgacgagcacccacatggtgtgacttgaaggtggtgagcgatgcaaacgtcttcttccccaattgagactgtcctggcacacctcggcatgcatggctgcttctccgagatcaccaccaacctggcgagcgtcgacaccgatggtggtgtttagatctcaccgttctgtggccacgccccacagagatagcacccgccttgatgttgattgtcattttttgtatgtcattgcttataaaaaaacagagataccctgctatgcttaaggaagatgaaagtgacatgtaagattactcagtgcacttcatttttgctcttagttgacctgtacatgtctgatgtttatgctgttttgtcttctctactttaagtgcctactagattcaaaaaaatactttaagtgcctactaggtgcaattttaaattagtattttgtagtcaacagatagagcacactgctctgattgtagtcaacaaagatggcattgaagaacccagccagacatactaggattaagtgaatttgccaatatgagatgacccaaatggtttaagtgaatatctctatctcgagttggaggttgctatcagacactacctgtttttaactcttagtttgagcttacatctcaaaccaaactattatcttgcaatctgcatgaagaattgcagtgcttgttgcttcacttcagtttttactctcattttgcacgaaactatgtgttatttattacagatttcactcatttcttttgtttactgtgtagcaaaatatggagataatcaaactgccgactgaatttgatatcactaaaaaagacatggtactgctgagacaccaaacaaatacacaatgcaagcaccttggagtacatatgttccatgattaatgttagtccactaacagaagatattctctacagggattagtaaaacacttacaggcgcaacctcagctaggtttgggttgttgtctggaaggagattagtttcaaggactgagctgatcaacatgccggcaaggaacaactctttctttttgccttgcatgagctaggggaaattcagtactggctacacgggaagcgggataagttgcagtgacagcaaaaccagataggagaaagagtgcaggaactgaagaagattggtgggaagcacagctttctgatctttgaagaccgcaagtttgctgacattgggaacacaattggagcctcctgcaactacgaggggaaaaaaattctgatgactaaagtgcttcgattcttaaaccttcagtaggccagaaatatctttataatggacccgaggcctatacgaactggtaattgacaacatgggttccaaaaacattagattggaatcttaatctatctcaatatttacttcatttttaagagacatattgtcattttgtttttttccatagcgttagcatgggcatgtatactatcagtatatatgatttttttgccttacacctcggttcaatatacagtaatacacttccaatctattcaaacattatttattct

SEQ ID NO: 57324 - DNA, 1028 bp, Zea Mays
attgaattggaaaccaccaactgatgttagtcagtttcgtagctttctgagattggctagttactacagaagatttattgaagggttttccaagattgctaagcctatgacagctctgctagagaagaatgccaagtttgtgtggtcagataagtgtcaagcaaacttcgaggagtcaaagaagagattgactacagcacccgtgttgattttgcctgatctaagcaagaactctatctattgtgatgcatctcgactgggtatatccgctaggtcttcgttggcaccttccctgacgacgagcacccacatggtgtgacttgaaggtggtgagcgatgcaaacgtcttcttccccaattgagactgtcctggcacacctcggcatgcatggctgcttctccgagatcaccaccaacctggcgagcgtcgacaccgatggtggtgtttagatctcaccgttctgtggccacgccccacagcaaaatatggagataatcaaactgccgactgaatttgatatcactaaaaaagacatggtactgctgagacaccaaacaaatacacaatgcaagcaccttggagtacatatgttccatgattaatgttagtccactaacagaagatattctctacagattggtgggaagcacagctttctgatctttgaagaccgcaagtttgctgacattgggaacacaattggagcctcctgcaactacgaggggaaaaaaattctgatgactaaagtgcttcgattcttaaaccttcagtaggccagaaatatctttataatggacccgaggcctatacgaactggtaattgacaacatgggttccaaaaacattagattggaatcttaatctatctcaatatttacttcatttttaagagacatattgtcattttgtttttttccatagcgttagcatgggcatgtatactatcagtatatatgatttttttgccttacacctcggttcaatatacagtaatacacttccaatctattcaaacattatttattct

SEQ ID NO: 57325 - DNA, 1183 bp, Zea Mays
gaagatttattgaagggttttccaagattgctaagcctatgacagctctgctagagaagaatgccaagtttgtgtggtcagataagtgtcaagcaaacttcgaggagtcaaagaagagattgactacagcacccgtgttgattttgcctgatctaagcaagaactctatctattgtgatgcatctcgactgggtatatccgctaggtcttcgttggcaccttccctgacgacgagcacccacatggtgtgacttgaaggtggtgagcgatgcaaacgtcttcttccccaattgagactgtcctggcacacctcggcatgcatggctgcttctccgagatcaccaccaacctggcgagcgtcgacaccgatggtggtgtttagatctcaccgttctgtggccacgccccacagcaaaatatggagataatcaaactgccgactgaatttgatatcactaaaaaagacatggtactgctgagacaccaaacaaatacacaatgcaagcaccttggagtacatatgttccatgattaatgttagtccactaacagaagatattctctacagggattagtaaaacacttacaggcgcaacctcagctaggtttgggttgttgtctggaaggagattagtttcaaggactgagctgatcaacatgccggcaaggaacaactctttctttttgccttgcatgagctaggggaaattcagtactggctacacgggaagcgggataagttgcagtgacagcaaaaccagataggagaaagagtgcaggaactgaagaagattggtgggaagcacagctttctgatctttgaagaccgcaagtttgctgacattgggaacacaattggagcctcctgcaactacgaggggaaaaaaattctgatgactaaagtgcttcgattcttaaaccttcagtaggccagaaatatctttataatggacccgaggcctatacgaactggtaattgacaacatgggttccaaaaacattagattggaatcttaatctatctcaatatttacttcatttttaagagacatattgtcattttgtttttttccatagcgttagcatgggcatgtatactatcagtatatatgatttttttgccttacacctcggttcaatatacagtaatacacttccaatctattcaaacattatttattct

SEQ ID NO: 57326 - DNA, 2561 bp, Zea Mays
gttgtactgtcggcctgtggggcttcgggcgaatcgtgattttggttccgtgtggccttggtaaggttggaagcgtgtttgcttgtgaccccttcttacccaggcgtctaggcactttagggttgtgatctgggtacccctaattacggtacccgacaagtgggtagagcttcaacctgacattgaagatcaacatatttggcgtctctctggccatggtatttactccagcaggtcagcgtatgaagcattttttactagatctatcactttcgccccttggcggcgtgtgtggaagacctgggcccccttaaggtgcaaactctttgtttggttggcaatcaaaaaccgggtctggacagctgacagattggcctaaagaggactgccccatccagctgcgtgccctctttgtgatcaggcagaggagaccatccaacatactctcatcccttgtgtttttgcccggcaagtctggacgttgatcctccacaaattgggcctcctcatcattgctcctcagccaggatgctcgagattttcgagttggtggtgccaaagtattaaaagtgttgagaagaacttcaggaagggacttaactccctaatcattttggttgcttgggagttatggaagcaccgtaattcttgcgtctttgacggtgctacaccctgtgtccaaagtgttgtgcttgctgtgactgaagagggtagtgcctggtgcttggctggagcatcagctcttcaggacctcctcctgcgtcgactccccatggcgtcctagtagttgttaggtgatagttctggtcgtttgtcgccctgtgtgtgtggcgcgctgagttggggtaatggtgtggtgtgttggccttattggccttgtacttaggggatgacaagtcttgtctctcctaatttctctttcttaatgaaatgcctgcgtttgttcaaaaaaaaaagattcagccaactattctgcactactgctgccttgatgttgcttcaggtaatcgaccatatatggactgttttagtgtttttcacagcactgcatataggctttagtgtattacgagtatgtttctttctaattctacctttcttactttgtgcaacactgcaaatcaagacctgagttacaaaactgatttttattgtacggttgtctaagtttgcactatcatcattcaagttatatcatggtatgcagagatagcacccgccttgatgttgattgtcattttttgtatgtcattgcttataaaaaaacagagataccctgctatgcttaaggaagatgaaagtgacatgtaagattactcagtgcacttcatttttgctcttagttgacctgtacatgtctgatgtttatgctgttttgtcttctctactttaagtgcctactagattcaaaaaaatactttaagtgcctactaggtgcaattttaaattagtattttgtagtcaacagatagagcacactgctctgattgtagtcaacaaagatggcattgaagaacccagccagacatactaggattaagtgaatttgccaatatgagatgacccaaatggtttaagtgaatatctctatctcgagttggaggttgctatcagacactacctgtttttaactcttagtttgagcttacatctcaaaccaaactattatcttgcaatctgcatgaagaattgcagtgcttgttgcttcacttcagtttttactctcattttgcacgaaactatgtgttatttattacagatttcactcatttcttttgtttactgtgtagcaaaatatggagataatcaaactgccgactgaatttgatatcactaaaaaagacatggtactgctgagacaccaaacaaatacacaatgcaagcaccttggagtacatatgttccatgattaatgttagtccactaacagaagatattctctacagggattagtaaaacacttacaggcgcaacctcagctaggtttgggttgttgtctggaaggagattagtttcaaggactgagctgatcaacatgccggcaaggaacaactctttctttttgccttgcatgagctaggggaaattcagtactggctacacgggaagcgggataagttgcagtgacagcaaaaccagataggagaaagagtgcaggaactgaagaagattggtgggaagcacagctttctgatctttgaagaccgcaagtttgctgacattgggaacacaattggagcctcctgcaactacgaggggaaaaaaattctgatgactaaagtgcttcgattcttaaaccttcagtaggccagaaatatctttataatggacccgaggcctatacgaactggtaattgacaacatgggttccaaaaacattagattggaatcttaatctatctcaatatttacttcatttttaagagacatattgtcattttgtttttttccatagcgttagcatgggcatgtatactatcagtatatatgatttttttgccttacacctcggttcaatatacagtaatacacttccaatctattcaaacattatttattct

SEQ ID NO: 57327 - DNA, 2078 bp, Zea Mays
gttgtactgtcggcctgtggggcttcgggcgaatcgtgattttggttccgtgtggccttggtaaggttggaagcgtgtttgcttgtgaccccttcttacccaggcgtctaggcactttagggttgtgatctgggtacccctaattacggtacccgacaagtgggtagagcttcaacctgacattgaagatcaacatatttggcgtctctctggccatggtatttactccagcaggtcagcgtatgaagcattttttactagatctatcactttcgccccttggcggcgtgtgtggaagacctgggcccccttaaggtgcaaactctttgtttggttggcaatcaaaaaccgggtctggacagctgacagattggcctaaagaggactgccccatccagctgcgtgccctctttgtgatcaggcagaggagaccatccaacatactctcatcccttgtgtttttgcccggcaagtctggacgttgatcctccacaaattgggcctcctcatcattgctcctcagccaggatgctcgagattttcgagttggtggtgccaaagtattaaaagtgttgagaagaacttcaggaagggacttaactccctaatcattttggttgcttgggagttatggaagcaccgtaattcttgcgtctttgacggtgctacaccctgtgtccaaagtgttgtgcttgctgtgactgaagagggtagtgcctggtgcttggctggagcatcagctcttcaggacctcctcctgcgtcgactccccatggcgtcctagtagttgttaggtgatagttctggtcgtttgtcgccctgtgtgtgtggcgcgctgagttggggtaatggtgtggtgtgttggccttattggccttgtacttaggggatgacaagtcttgtctctcctaatttctctttcttaatgaaatgcctgcgtttgttcaaaaaaaaaagattcagccaactattctgcactactgctgccttgatgttgcttcaggtaatcgaccatatatggactgttttagtgtttttcacagcactgcatataggctttagtgtattacgagtatgtttctttctaattctacctttcttactttgtgcaacactgcaaatcaagacctgagttacaaaactgatttttattgtacggttgtctaagtttgcactatcatcattcaagttatatcatggtatgcagagatagcacccgccttgatgttgattgtcattttttgtatgtcattgcttataaaaaaacagagataccctgctatgcttaaggaagatgaaagtgacatcaaaatatggagataatcaaactgccgactgaatttgatatcactaaaaaagacatggtactgctgagacaccaaacaaatacacaatgcaagcaccttggagtacatatgttccatgattaatgttagtccactaacagaagatattctctacagggattagtaaaacacttacaggcgcaacctcagctaggtttgggttgttgtctggaaggagattagtttcaaggactgagctgatcaacatgccggcaaggaacaactctttctttttgccttgcatgagctaggggaaattcagtactggctacacgggaagcgggataagttgcagtgacagcaaaaccagataggagaaagagtgcaggaactgaagaagattggtgggaagcacagctttctgatctttgaagaccgcaagtttgctgacattgggaacacaattggagcctcctgcaactacgaggggaaaaaaattctgatgactaaagtgcttcgattcttaaaccttcagtaggccagaaatatctttataatggacccgaggcctatacgaactggtaattgacaacatgggttccaaaaacattagattggaatcttaatctatctcaatatttacttcatttttaagagacatattgtcattttgtttttttccatagcgttagcatgggcatgtatactatcagtatatatgatttttttgccttacacctcggttcaatatacagtaatacacttccaatctattcaaacattatttattct

SEQ ID NO: 57328 - DNA, 462 bp, Zea Mays
taccctgctatgcttaaggaagatgaaagtgacatcaaaatatggagataatcaaactgccgactgaatttgatatcactaaaaaagacatggtactgctgagacaccaaacaaagaatgaggttgtaaagggtcaaacaacaatgcttaaatatgcctcgatgattctaggacctggagtagttgcaggactgttggctgattggctttcttaaaatttaagatctgctgctgcttagatgtttgtttagctgttattgttttatttctcttaataattctggtcatgatacaacttcctttgttattattctatttacctttgagagcaatacttatcttctgttccagggaaaatagagcaccagcagtaacatcttccaaaatctctaaagttttcatttagcagtaaaagcaatgtgttttttgcgaaatctttggatgataggtttataataaaac

SEQ ID NO: 57329 - DNA, 5865 bp, Zea Mays
ccagcacacaatttttattccataagttccaagagtctgtatggggaaggcaagaaagaaaatacaaaaggaaaaaaaaaaatagtcgtcttcttcctcgtgaaggacggtctaggtgagattgtcctcttgtcgagatcctcacgtcccggtcctcaccaccggtggcgacggggtgtgacagttggtaccagagacggtgtatcctcggcgtggggggcgacggacggccaccagctcttctctgcgctagctatcggggtggcgacgacgattgttggcgcgtcgacggcggatccagcggtccggcgtggtgacctcattgatccggcgcgacctacctccttcagctaacggtggcgctccagcggcccttggctcgagttccgttttgttccgcgatggcttccctttcccccggcaactccttcatcgaggcggtgtcgacggcggtggttgcggcggatttggcggtgctgggctgacgggaggtctcgatttggcggtgctggtggcggcgactccatcaagttgcctgtgtgctccctcaactttcttcctcagatccccttcggcaggcggcgtgcccacgacgccactgtttgggatatctggtgacgagtgctctcagtcacggcactggtgacgggttccctttctctgagactccaaccactggcggcaacacgggatttggtgcgtgtgtgcggcagctacgggagattgtggagctcgagtggctctgcatcccgctcgtagcgctcagatcgtgattggctgctttcatcctctacaatcactagttgagcagattttgggtgagcgcggtgttaatttgttgatgctaaggcaagccagtaacctggcacacaacatgttcgatgatatgtcatttacagaggtggtctgggatgatgaaggggcactattcgatgaaatgcattgcacggatgtcatctgggatgaggagacacatcatggctttgactcacatggcctattgcagcaccatgctgaagcaatggataaccagatgcagggcaaggagaaattggctcaaagtggagattactatgatgagaggaaagtcaatattgaaccagacatcaacaacttgctcattcatgtcaatgaccatttctctatgttggtgattggtgcggattctaggcgaagtgatgttgtgtgggacgaggacatgttatctgacctcgatactcatggtggcttattacagttactggcatgttgtaaagatgatgagctcaaccaggacagagacactccttttctcttgggccttggtatggatcaggtggatgagatgctggccagcccgtccagccttggcatgaatgaggacttgccatctgtacctgagacacatggctcgttattgcagcaagtggcatgggacaggaagcactttgcttatgaaatgtgcacgcttattgctgagatggtcctggaagatgttctcaccgatgttggcaacctcgctttcagcattgattcaagcatgcagatcagtgatcaaccttccaaatatgcgctagtcatcgatgcttatctgctgaagacgcagtacaaaaaaccatacatttctataagccaatgggatccaggaatttggtgcaaaggtactatggcccatgagcagcaacagcttgagatatataggatgtttgagaaacaatgggattcagttatccttaaatggttcaggaatccttttgtgctgctgcaatcatgcaatggggaggatctgaatgaacaaggcacagtgcctgtaaatgacattttcgatgtattggctgctggccaggagttgaattttggcaacgtcaccttgatcatttatgggggatgccaaggagcaatgggtctgcaggttctttttgcagaattacacccttggcaccacaatgtctttacctccatagaattagcaatacagtcatggagaatcaatggtttcagtccaggaagctgcaagctcaacagacaatctatacttgttgctactaacttgcagttcaattataaagcttccaagtttgtatcctttactgatacttatcagatatacaagaacacatgcatttgtatcggagaattggaacctgctagttggagagatacttgttggctacctgagatctcacatgccaatgtgtccacacttgctagtgaggaaatagataacatgcttttccaggttggtgattttcatccaggagagagtgagcagcttgagctttacatgataacattgatacagtgggatctaggtccagtagaattttacaaatcaaactgtaggtgccctgctgcagaactgatagggtggtgctgattctagtttgttcatacaatctgtttatgttatgctgaaagctagtttcttctttatcatgaggtactacttggcccaacagtcatggaatttctgggatctttagtcaccaagatacaattcatggtcatgcggttgtttggggacaagcaaccatttgtgggggtggaaaggatatatggcaacacaggttaaagtcgtgttttaaaatggaaatgcatgctacagtcctgggtgtcaatgatgtattgcagcatatcagtgcttgttctctattcctgcagcttggtcgcagaaaactatatagggtggtgatgacttctgttctaaggcccagagatttgctgctgaagagctatacaacattcttgaccaagtcgatgaactattgttgcttcctgaccaaaagctcgggagaccatggtgtgacactgatctaatatgtgaaccgattctgtcttggagactcaatggtggcagcccaagcaaatgtttgttgcaactcaagacatacatagtcagacagtgggatccaggaatttctgggatctttagtcatcgagatacaattcaaggtcatgcggttgcttggggacaagcaacattttgtgagggtggaaatgtaacatccatgaatagcaacatgtccagggctttagctgacaagcgggccacccacccatgggacccaggtggaagaccagatgctgggtataagttccaagagtctgtatgggggaaggcaagaaagaaaatacaaaaaaatagtcgtcttcttcctcgtgaaggacggtctaggtgagattgtcctcttgtcgagatcctcacgtcccggtcctcaccacgggtggccacggggtgtgacatgatactaggagatgtaacggagcaaagaattctgagaggagccaaagatgaggataagggatactgaagatcctcgtcgagctggacaaggatctcaagtctgctctgtgcgatttggaagacgtcctggatgttattgaatatcgctgaatcgagaagaaagtcatcggtggtgacaaaaagttgatcagcactactatttgcatctgggcgctgcaagctattggcgattggatcacctactggaagcgtagctcgttcgggcaaaagctgttgcagtgcgcgcgcccagaaccagtatcagaagctcagggaccttggagagaagctgcagaagtgcgctcaggatctggatctgaagttttgggaccttgtagctaagctacagcagtgcgcccagaacctgaatcacatgttctgggactttcaagctaagttcttgcagtgcacccaaagcctgccactgtatatccatcagggagcagctgggcaaccaccaatgcggcaatgcctgattcacccgccgcaagatccactgcagaattcagggatgacattgaacaaggaccatcgacgcctgatgatgcaccctcgaatccaccgtcgcctaatgccctcccgaatgctgctggctccaccactggcaatcaacacggatcagctgaggaggcaccgacgcctgatgcaccctcgaattccctggtgcagatgatctgcgactgattggtctatgggtttacagcactccgttctttttatttggctgcgcgtcatcttcgggactggtcatatgaaccgattggcatcaaagaatgatggtggtactgcaacagattgggaccttcctactaatgagataatcagcttgaggaaaaggataaagaacatagaatatattgtcagtgagacaaataaatcacctctgtcgaaacatagtagcagcagcacaaagaatgaaattgatgacaaggaaagcagcagcaccaagaacagcggcaatgtaaggagcaccaaacagaaggaaattgactacgtatacagaagcattgaaaagaaagttaaagttttcggtcgagacaaggtccatgaagatataaggtgcttcataatggaccggctaccgatgcaccaagctccgactccagtaaaccttattctgtgattggcatatatggaattacaggttctgggaagactactctggcacaatatgtttgtgagtatgagaagggtgaggtttcaatcctatcatgttcatccatgtgggaactacattcagtgccggtgaaatattttgtgatatgctggaccagatcacgcaacagcggccctctgatgccaacggtcctaaaagcctaaaaacagagttaaaagatctaacactacagcaaacgccaaaatatacagctactcttgttgactgtccaaattcaaaatacacagcttataagcaaggctgtatatgtttgctactaactcatacctataggcagctaagaccggtgttatgccaagtgacattgaagtgtacatagctgaccataagggaccagacccttccaaacctgaggagttgtgcagtcaggcttgcacagatcggctggcagaatatggtcaagaaatggtgaggcgccatgaaaaggactacgaccggagaaaagcaccaatcgatcccatggtggtgtatgctactggaggcagaaagagtcatgggcggtactccatgtttaatggagtgattgactccagagaggttagatctcagaggtcggggtcttcctccgaacgatcaggggctagaactcatcgccaatcagagcatgagttggaggttgcaagggtgcaagaggagataaggcaacgtgatgcattccaaaggcacaacatgagtactttgcctcattcttggcgcagcagcagaccgtgcttcaagcaactttccaacagcaggggataaacgtagtccttccacaatttcaacctccaccactgccaccaatatggggatcgggtacccaataccttctgcaagtcaaggatcggcggcacaagggccccagatttaccatactccacctgcatagatactagcacctggagaccagttctacggccgatgctggaactacatttgtaaatgcaatcttcggtccaccctctggaggcagcggccaaaactccaatcatctgagaggtggcttgtcacactcggatttaagggcaaactcgggcgcatctcaaatgtgtgctaggatcaagtctcacacatatgatggctcatggtacagaaatcaatgtcatatctttattaaataatcggagtttttttacaaaataactaaatacaatacaccatatggcgacgagatcctccaccaacaaagttgactgggagacgacggcatagatctctccgaactcatcgtaacatccttcatgctctttatcttgcagtacctgtctttgacctggtgtgattatagcaagggtgagctcccatacggtcatcgctcagcaagtgtgggaaataatgtgtatgagctcacttacggtgggagctcatgtgtagtgtaaggctgatcaacaaataatggttaaggctgagcattgcttttaataagttggtcaaaattttattagca

SEQ ID NO: 57330 - DNA, 5738 bp, Zea Mays
aaagaaaatacaaaaggaaaaaaaaaaatagtcgtcttcttcctcgtgaaggacggtctaggtgagattgtcctcttgtcgagatcctcacgtcccggtcctcaccaccggtggcgacggggtgtgacagttggtaccagagacggtgtatcctcggcgtggggggcgacggacggccaccagctcttctctgcgctagctatcggggtggcgacgacgattgttggcgcgtcgacggcggatccagcggtccggcgtggtgacctcattgatccggcgcgacctacctccttcagctaacggtggcgctccagcggcccttggctcgagttccgttttgttccgcgatggcttccctttcccccggcaactccttcatcgaggcggtgtcgacggcggtggttgcggcggatttggcggtgctgggctgacgggaggtctcgatttggcggtgctggtggcggcgactccatcaagttgcctgtgtgctccctcaactttcttcctcagatccccttcggcaggcggcgtgcccacgacgccactgtttgggatatctggtgacgagtgctctcagtcacggcactggtgacgggttccctttctctgagactccaaccactggcggcaacacgggatttggtgcgtgtgtgcggcagctacgggagattgtggagctcgagtggctctgcatcccgctcgtagcgctcagatcgtgattggctgctttcatcctctacaatcactagttgagcagattttgggtgagcgcggtgttaatttgttgatgctaaggcaagccagtaacctggcacacaacatgttcgatgatatgtcatttacagaggtggtctgggatgatgaaggggcactattcgatgaaatgcattgcacggatgtcatctgggatgaggagacacatcatggctttgactcacatggcctattgcagcaccatgctgaagcaatggataaccagatgcagggcaaggagaaattggctcaaagtggagattactatgatgagaggaaagtcaatattgaaccagacatcaacaacttgctcattcatgtcaatgaccatttctctatgttggtgattggtgcggattctaggcgaagtgatgttgtgtgggacgaggacatgttatctgacctcgatactcatggtggcttattacagttactggcatgttgtaaagatgatgagctcaaccaggacagagacactccttttctcttgggccttggtatggatcaggtggatgagatgctggccagcccgtccagccttggcatgaatgaggacttgccatctgtacctgagacacatggctcgttattgcagcaagtggcatgggacaggaagcactttgcttatgaaatgtgcacgcttattgctgagatggtcctggaagatgttctcaccgatgttggcaacctcgctttcagcattgattcaagcatgcagatcagtgatcaaccttccaaatatgcgctagtcatcgatgcttatctgctgaagacgcagtacaaaaaaccatacatttctataagccaatgggatccaggaatttggtgcaaaggtactatggcccatgagcagcaacagcttgagatatataggatgtttgagaaacaatgggattcagttatccttaaatggttcaggaatccttttgtgctgctgcaatcatgcaatggggaggatctgaatgaacaaggcacagtgcctgtaaatgacattttcgatgtattggctgctggccaggagttgaattttggcaacgtcaccttgatcatttatgggggatgccaaggagcaatgggtctgcaggttctttttgcagaattacacccttggcaccacaatgtctttacctccatagaattagcaatacagtcatggagaatcaatggtttcagtccaggaagctgcaagctcaacagacaatctatacttgttgctactaacttgcagttcaattataaagcttccaagtttgtatcctttactgatacttatcagatatacaagaacacatgcatttgtatcggagaattggaacctgctagttggagagatacttgttggctacctgagatctcacatgccaatgtgtccacacttgctagtgaggaaatagataacatgcttttccaggttggtgattttcatccaggagagagtgagcagcttgagctttacatgataacattgatacagtgggatctaggtccagtagaattttacaaatcaaactgtaggtgccctgctgcagaactgatagggtggtgctgattctagtttgttcatacaatctgtttatgttatgctgaaagctagtttcttctttatcatgaggtactacttggcccaacagtcatggaatttctgggatctttagtcaccaagatacaattcatggtcatgcggttgtttggggacaagcaaccatttgtgggggtggaaaggatatatggcaacacaggttaaagtcgtgttttaaaatggaaatgcatgctacagtcctgggtgtcaatgatgtattgcagcatatcagtgcttgttctctattcctgcagcttggtcgcagaaaactatatagggtggtgatgacttctgttctaaggcccagagatttgctgctgaagagctatacaacattcttgaccaagtcgatgaactattgttgcttcctgaccaaaagctcgggagaccatggtgtgacactgatctaatatgtgaaccgattctgtcttggagactcaatggtggcagcccaagcaaatgtttgttgcaactcaagacatacatagtcagacagtgggatccaggaatttctgggatctttagtcatcgagatacaattcaaggtcatgcggttgcttggggacaagcaacattttgtgagggtggaaatgtaacatccatgaatagcaacatgtccagggctttagctgacaagcgggccacccacccatgggacccaggtggaagaccagatgctgggtataagttccaagagtctgtatgggggaaggcaagaaagaaaatacaaaaaaatagtcgtcttcttcctcgtgaaggacggtctaggtgagattgtcctcttgtcgagatcctcacgtcccggtcctcaccacgggtggccacggggtgtgacatgatactaggagatgtaacggagcaaagaattctgagaggagccaaagatgaggataagggatactgaagatcctcgtcgagctggacaaggatctcaagtctgctctgtgcgatttggaagacgtcctggatgttattgaatatcgctgaatcgagaagaaagtcatcggtggtgacaaaaagttgatcagcactactatttgcatctgggcgctgcaagctattggcgattggatcacctactggaagcgtagctcgttcgggcaaaagctgttgcagtgcgcgcgcccagaaccagtatcagaagctcagggaccttggagagaagctgcagaagtgcgctcaggatctggatctgaagttttgggaccttgtagctaagctacagcagtgcgcccagaacctgaatcacatgttctgggactttcaagctaagttcttgcagtgcacccaaagcctgccactgtatatccatcagggagcagctgggcaaccaccaatgcggcaatgcctgattcacccgccgcaagatccactgcagaattcagggatgacattgaacaaggaccatcgacgcctgatgatgcaccctcgaatccaccgtcgcctaatgccctcccgaatgctgctggctccaccactggcaatcaacacggatcagctgaggaggcaccgacgcctgatgcaccctcgaattccctggtgcagatgatctgcgactgattggtctatgggtttacagcactccgttctttttatttggctgcgcgtcatcttcgggactggtcatatgaaccgattggcatcaaagaatgatggtggtactgcaacagattgggaccttcctactaatgagataatcagcttgaggaaaaggataaagaacatagaatatattgtcagtgagacaaataaatcacctctgtcgaaacatagtagcagcagcacaaagaatgaaattgatgacaaggaaagcagcagcaccaagaacagcggcaatgtaaggagcaccaaacagaaggaaattgactacgtatacagaagcattgaaaagaaagttaaagttttcggtcgagacaaggtccatgaagatataaggtgcttcataatggaccggctaccgatgcaccaagctccgactccagtaaaccttattctgtgattggcatatatggaattacaggttctgggaagactactctggcacaatatgtttgtgagtatgagaagggtgaggtttcaatcctatcatgttcatccatgtgggaactacattcagtgccggtgaaatattttgtgatatgctggaccagatcacgcaacagcggccctctgatgccaacggtcctaaaagcctaaaaacagagttaaaagatctaacactacagcaaacgccaaaatatacagctactcttgttgactgtccaaattcaaaatacacagcttataagcaaggctgtatatgtttgctactaactcatacctataggcagctaagaccggtgttatgccaagtgacattgaagtgtacatagctgaccataagggaccagacccttccaaacctgaggagttgtgcagtcaggcttgcacagatcggctggcagaatatggtcaagaaatggtgaggcgccatgaaaaggactacgaccggagaaaagcaccaatcgatcccatggtggtgtatgctactggaggcagaaagagtcatgggcggtactccatgtttaatggagtgattgactccagagaggttagatctcagaggtcggggtcttcctccgaacgatcaggggctagaactcatcgccaatcagagcatgagttggaggttgcaagggtgcaagaggagataaggcaacgtgatgcattccaaaggcacaacatgagtactttgcctcattcttggcgcagcagcagaccgtgcttcaagcaactttccaacagcaggggataaacgtagtccttccacaatttcaacctccaccactgccaccaatatggggatcgggtacccaataccttctgcaagtcaaacggccgatgctggaactacatttgtaaatgcaatcttcggtccaccctctggaggcagcggccaaaactccaatcatctgagaggtggcttgtcacactcggatttaagggcaaactcgggcgcatctcaaatgtgtgctaggatcaagtctcacacatatgatggctcatggtacagaaatcaatgtcatatctttattaaataatcggagtttttttacaaaataactaaatacaatacaccatatggcgacgagatcctccaccaacaaagttgactgggagacgacggcatagatctctccgaactcatcgtaacatccttcatgctctttatcttgcagtacctgtctttgacctggtgtgattatagcaagggtgagctcccatacggtcatcgctcagcaagtgtgggaaataatgtgtatgagctcacttacggtgggagctcatgtgtagtgtaaggctgatcaacaaataatggttaaggctgagcattgcttttaataagttggtcaaaattttattagca

SEQ ID NO: 57331 - DNA, 5092 bp, Zea Mays
agaaaatacaaaaggaaaaaaaaaaatagtcgtcttcttcctcgtgaaggacggtctaggtgagattgtcctcttgtcgagatcctcacgtcccggtcctcaccaccggtggcgacggggtgtgacagttggtaccagagacggtgtatcctcggcgtggggggcgacggacggccaccagctcttctctgcgctagctatcggggtggcgacgacgattgttggcgcgtcgacggcggatccagcggtccggcgtggtgacctcattgatccggcgcgacctacctccttcagctaacggtggcgctccagcggcccttggctcgagttccgttttgttccgcgatggcttccctttcccccggcaactccttcatcgaggcggtgtcgacggcggtggttgcggcggatttggcggtgctgggctgacgggaggtctcgatttggcggtgctggtggcggcgactccatcaagttgcctgtgtgctccctcaactttcttcctcagatccccttcggcaggcggcgtgcccacgacgccactgtttgggatatctggtgacgagtgctctcagtcacggcactggtgacgggttccctttctctgagactccaaccactggcggcaacacgggatttggtgcgtgtgtgcggcagctacgggagattgtggagctcgagtggctctgcatcccgctcgtagcgctcagatcgtgattggctgctttcatcctctacaatcactagttgagcagattttgggtgagcgcggtgttaatttgttgatgctaaggcaagccagtaacctggcacacaacatgttcgatgatatgtcatttacagaggtggtctgggatgatgaaggggcactattcgatgaaatgcattgcacggatgtcatctgggatgaggagacacatcatggctttgactcacatggcctattgcagcaccatgctgaagcaatggataaccagatgcagggcaaggagaaattggctcaaagtggagattactatgatgagaggaaagtcaatattgaaccagacatcaacaacttgctcattcatgtcaatgaccatttctctatgttggtgattggtgcggattctaggcgaagtgatgttgtgtgggacgaggacatgttatctgacctcgatactcatggtggcttattacagttactggcatgttgtaaagatgatgagctcaaccaggacagagacactccttttctcttgggccttggtatggatcaggtggatgagatgctggccagcccgtccagccttggcatgaatgaggacttgccatctgtacctgagacacatggctcgttattgcagcaagtggcatgggacaggaagcactttgcttatgaaatgtgcacgcttattgctgagatggtcctggaagatgttctcaccgatgttggcaacctcgctttcagcattgattcaagcatgcagatcagtgatcaaccttccaaatatgcgctagtcatcgatgcttatctgctgaagacgcagtacaaaaaaccatacatttctataagccaatgggatccaggaatttggtgcaaaggtactatggcccatgagcagcaacagcttgagatatataggatgtttgagaaacaatgggattcagttatccttaaatggttcaggaatccttttgtgctgctgcaatcatgcaatggggaggatctgaatgaacaaggcacagtgcctgtaaatgacattttcgatgtattggctgctggccaggagttgaattttggcaacgtcaccttgatcatttatgggggatgccaaggagcaatgggtctgcaggttctttttgcagaattacacccttggcaccacaatgtctttacctccatagaattagcaatacagtcatggagaatcaatggtttcagtccaggaagctgcaagctcaacagacaatctatacttgttgctactaacttgcagttcaattataaagcttccaagtttgtatcctttactgatacttatcagatatacaagaacacatgcatttgtatcggagaattggaacctgctagttggagagatacttgttggctacctgagatctcacatgccaatgtgtccacacttgctagtgaggaaatagataacatgcttttccaggttggtgattttcatccaggagagagtgagcagcttgagctttacatgataacattgatacagtgggatctaggtccagtagaattttacaaatcaaactgtaggtgccctgctgcagaactgatagggtggtgctgattctagtttgttcatacaatctgtttatgttatgctgaaagctagtttcttctttatcatgaggtactacttggcccaacagtcatggaatttctgggatctttagtcaccaagatacaattcatggtcatgcggttgtttggggacaagcaaccatttgtgggggtggaaaggatatatggcaacacaggttaaagtcgtgttttaaaatggaaatgcatgctacagtcctgggtgtcaatgatgtattgcagcatatcagtgcttgttctctattcctgcagcttggtcgcagaaaactatatagggtggtgatgacttctgttctaaggcccagagatttgctgctgaagagctatacaacattcttgaccaagtcgatgaactattgttgcttcctgaccaaaagctcgggagaccatggtgtgacactgatctaatatgtgaaccgattctgtcttggagactcaatggtggcagcccaagcaaatgtttgttgcaactcaagacatacatagtcagacagtgggatccaggaatttctgggatctttagtcatcgagatacaattcaaggtcatgcggttgcttggggacaagcaacattttgtgagggtggaaatgtaacatccatgaatagcaacatgtccagggctttagctgacaagcgggccacccacccatgggacccaggtggaagaccagatgctgggtataagttccaagagtctgtatgggggaaggcaagaaagaaaatacaaaaaaatagtcgtcttcttcctcgtgaaggacggtctaggtgagattgtcctcttgtcgagatcctcacgtcccggtcctcaccacgggtggccacggggtgtgacatgatactaggagatgtaacggagcaaagaattctgagaggagccaaagatgaggataagggatactgaagatcctcgtcgagctggacaaggatctcaagtctgctctgtgcgatttggaagacgtcctggatgttattgaatatcgctgaatcgagaagaaagtcatcggtggtgacaaaaagttgatcagcactactatttgcatctgggcgctgcaagctattggcgattggatcacctactggaagcgtagctcgttcgggcaaaagctgttgcagtgcgcgcgcccagaaccagtatcagaagctcagggaccttggagagaagctgcagaagtgcgctcaggatctggatctgaagttttgggaccttgtagctaagctacagcagtgcgcccagaacctgaatcacatgttctgggactttcaagctaagttcttgcagtgcacccaaagcctgccactgtatatccatcagggagcagctgggcaaccaccaatgcggcaatgcctgattcacccgccgcaagatccactgcagaattcagggatgacattgaacaaggaccatcgacgcctgatgatgcaccctcgaatccaccgtcgcctaatgccctcccgaatgctgctggctccaccactggcaatcaacacggatcagctgaggaggcaccgacgcctgatgcaccctcgaattccctggtgcagatgatctgcgactgattggtctatgggtttacagcactccgttctttttatttggctgcgcgtcatcttcgggactggtcatatgaaccgattggcatcaaagattgggaccttcctactaatgagataatcagcttgaggaaaaggataaagaacatagaatatattgtcagtgagacaaataaatcacctctgtcgaaacatagtagcagcagcacaaagaatgaaattgatgacaaggaaagcagcagcaccaagaacagcggcaatgtaaggagcaccaaacagaaggaaattgactacgtatacagaagcattgaaaagaaagttaaagttttcggtcgagacaaggtccatgaagatataaggtgcttcataatggaccggctaccgatgcaccaagctccgactccagtaaaccttattctgtgattggcatatatggaattacaggttctgggaagactactctggcacaatatgtttgtgagtatgagaagggtgaggtttcaatcctatcatgttcatccatgtgggaactacattcagtgccggtgaaatattttgtgatatgctggaccagatcacgcaacagcggccctctgatgccaacggtcctaaaagcctaaaaacagagttaaaagatctaacactacagcaaacgccaaaatatacagctactcttgttgactgtccaaattcaaaatacacagcttataagcaaggctgtatatgtttgctactaactcatacctataggcagctaagaccggtgttatgccaagtgacattgaagtgtacatagctgaccataagggaccagacccttccaaacctgaggagttgtgcagtcaggcttgcacagatcggctgaatatggtcaagaaatggtgaggcgccatgaaaaggactacgaccggagaaaagcaccaatcgatcccatggtggtgtatgctactggaggcagaaagagtcatgggcggtactccatgtttaatggagtgattgactccagagaggttagatctcagaggtcggggtcttcctccgaacgatcaggggctagaactcatcgccaatcagagcatgagttggaggttgcaagggtgcaagaggagataaggcaacgtgatgcattccaaaggcacaacatgagtactttgcctcattcttggcgcagcagcagaccgtgcttcaagaatactcaggacatttga

SEQ ID NO: 57332 - DNA, 5237 bp, Zea Mays
agaaaatacaaaaggaaaaaaaaaaatagtcgtcttcttcctcgtgaaggacggtctaggtgagattgtcctcttgtcgagatcctcacgtcccggtcctcaccaccggtggcgacggggtgtgacagttggtaccagagacggtgtatcctcggcgtggggggcgacggacggccaccagctcttctctgcgctagctatcggggtggcgacgacgattgttggcgcgtcgacggcggatccagcggtccggcgtggtgacctcattgatccggcgcgacctacctccttcagctaacggtggcgctccagcggcccttggctcgagttccgttttgttccgcgatggcttccctttcccccggcaactccttcatcgaggcggtgtcgacggcggtggttgcggcggatttggcggtgctgggctgacgggaggtctcgatttggcggtgctggtggcggcgactccatcaagttgcctgtgtgctccctcaactttcttcctcagatccccttcggcaggcggcgtgcccacgacgccactgtttgggatatctggtgacgagtgctctcagtcacggcactggtgacgggttccctttctctgagactccaaccactggcggcaacacgggatttggtgcgtgtgtgcggcagctacgggagattgtggagctcgagtggctctgcatcccgctcgtagcgctcagatcgtgattggctgctttcatcctctacaatcactagttgagcagattttgggtgagcgcggtgttaatttgttgatgctaaggcaagccagtaacctggcacacaacatgttcgatgatatgtcatttacagaggtggtctgggatgatgaaggggcactattcgatgaaatgcattgcacggatgtcatctgggatgaggagacacatcatggctttgactcacatggcctattgcagcaccatgctgaagcaatggataaccagatgcagggcaaggagaaattggctcaaagtggagattactatgatgagaggaaagtcaatattgaaccagacatcaacaacttgctcattcatgtcaatgaccatttctctatgttggtgattggtgcggattctaggcgaagtgatgttgtgtgggacgaggacatgttatctgacctcgatactcatggtggcttattacagttactggcatgttgtaaagatgatgagctcaaccaggacagagacactccttttctcttgggccttggtatggatcaggtggatgagatgctggccagcccgtccagccttggcatgaatgaggacttgccatctgtacctgagacacatggctcgttattgcagcaagtggcatgggacaggaagcactttgcttatgaaatgtgcacgcttattgctgagatggtcctggaagatgttctcaccgatgttggcaacctcgctttcagcattgattcaagcatgcagatcagtgatcaaccttccaaatatgcgctagtcatcgatgcttatctgctgaagacgcagtacaaaaaaccatacatttctataagccaatgggatccaggaatttggtgcaaaggtactatggcccatgagcagcaacagcttgagatatataggatgtttgagaaacaatgggattcagttatccttaaatggttcaggaatccttttgtgctgctgcaatcatgcaatggggaggatctgaatgaacaaggcacagtgcctgtaaatgacattttcgatgtattggctgctggccaggagttgaattttggcaacgtcaccttgatcatttatgggggatgccaaggagcaatgggtctgcaggttctttttgcagaattacacccttggcaccacaatgtctttacctccatagaattagcaatacagtcatggagaatcaatggtttcagtccaggaagctgcaagctcaacagacaatctatacttgttgctactaacttgcagttcaattataaagcttccaagtttgtatcctttactgatacttatcagatatacaagaacacatgcatttgtatcggagaattggaacctgctagttggagagatacttgttggctacctgagatctcacatgccaatgtgtccacacttgctagtgaggaaatagataacatgcttttccaggttggtgattttcatccaggagagagtgagcagcttgagctttacatgataacattgatacagtgggatctaggtccagtagaattttacaaatcaaactgtaggtgccctgctgcagaactgatagggtggtgctgattctagtttgttcatacaatctgtttatgttatgctgaaagctagtttcttctttatcatgaggtactacttggcccaacagtcatggaatttctgggatctttagtcaccaagatacaattcatggtcatgcggttgtttggggacaagcaaccatttgtgggggtggaaaggatatatggcaacacaggttaaagtcgtgttttaaaatggaaatgcatgctacagtcctgggtgtcaatgatgtattgcagcatatcagtgcttgttctctattcctgcagcttggtcgcagaaaactatatagggtggtgatgacttctgttctaaggcccagagatttgctgctgaagagctatacaacattcttgaccaagtcgatgaactattgttgcttcctgaccaaaagctcgggagaccatggtgtgacactgatctaatatgtgaaccgattctgtcttggagactcaatggtggcagcccaagcaaatgtttgttgcaactcaagacatacatagtcagacagtgggatccaggaatttctgggatctttagtcatcgagatacaattcaaggtcatgcggttgcttggggacaagcaacattttgtgagggtggaaatgtaacatccatgaatagcaacatgtccagggctttagctgacaagcgggccacccacccatgggacccaggtggaagaccagatgctgggtataagttccaagagtctgtatgggggaaggcaagaaagaaaatacaaaaaaatagtcgtcttcttcctcgtgaaggacggtctaggtgagattgtcctcttgtcgagatcctcacgtcccggtcctcaccacgggtggccacggggtgtgacatgatactaggagatgtaacggagcaaagaattctgagaggagccaaagatgaggataagggatactgaagatcctcgtcgagctggacaaggatctcaagtctgctctgtgcgatttggaagacgtcctggatgttattgaatatcgctgaatcgagaagaaagtcatcggtggtgacaaaaagttgatcagcactactatttgcatctgggcgctgcaagctattggcgattggatcacctactggaagcgtagctcgttcgggcaaaagctgttgcagtgcgcgcgcccagaaccagtatcagaagctcagggaccttggagagaagctgcagaagtgcgctcaggatctggatctgaagttttgggaccttgtagctaagctacagcagtgcgcccagaacctgaatcacatgttctgggactttcaagctaagttcttgcagtgcacccaaagcctgccactgtatatccatcagggagcagctgggcaaccaccaatgcggcaatgcctgattcacccgccgcaagatccactgcagaattcagggatgacattgaacaaggaccatcgacgcctgatgatgcaccctcgaatccaccgtcgcctaatgccctcccgaatgctgctggctccaccactggcaatcaacacggatcagctgaggaggcaccgacgcctgatgcaccctcgaattccctggtgcagatgatctgcgactgattggtctatgggtttacagcactccgttctttttatttggctgcgcgtcatcttcgggactggtcatatgaaccgattggcatcaaagaatgatggtggtactgcaacagattgggaccttcctactaatgagataatcagcttgaggaaaaggataaagaacatagaatatattgtcagtgagacaaataaatcacctctgtcgaaacatagtagcagcagcacaaagaatgaaattgatgacaaggaaagcagcagcaccaagaacagcggcaatgtaaggagcaccaaacagaaggaaattgactacgtatacagaagcattgaaaagaaagttaaagttttcggtcgagacaaggtccatgaagatataaggtgcttcataatggaccggctaccgatgcaccaagctccgactccagtaaaccttattctgtgattggcatatatggaattacaggttctgggaagactactctggcacaatatgtttgtgagtatgagaagggtgaggtttcaatcctatcatgttcatccatgtgggaactacattcagtgccggtgaaatattttgtgatatgctggaccagatcacgcaacagcggccctctgatgccaacggtcctaaaagcctaaaaacagagttaaaagatctaacactacagcaaacgccaaaatatacagctactcttgttgactgtccaaattcaaaatacacagcttataagcaaggctgtatatgtttgctactaactcatacctataggcagctaagaccggtgttatgccaagtgacattgaagtgtacatagctgaccataagggaccagacccttccaaacctgaggagttgtgcagtcaggcttgcacagatcggctggcagaatatggtcaagaaatggtgaggcgccatgaaaaggactacgaccggagaaaagcaccaatcgatcccatggtggtgtatgctactggaggcagaaagagtcatgggcggtactccatgtttaatggagtgattgactccagagaggttagatctcagaggtcggggtcttcctccgaacgatcaggggctagaactcatcgccaatcagagcatgagttggaggttgcaagggtgcaagaggagataaggcaacgtgatgcattccaaaggcacaacatgagtactttgcctcattcttggcgcagcagcagaccgtgcttcaagcaactttccaacagcaggggataaacgtagtccttccacaatttcaacctccaccactgccaccaatatggggatcgggtacccaataccttctgcaagtcaatcaatggattctagcaaaacctgcttcaactagc

SEQ ID NO: 57333 - DNA, 5732 bp, Zea Mays
agaaaatacaaaaggaaaaaaaaaaatagtcgtcttcttcctcgtgaaggacggtctaggtgagattgtcctcttgtcgagatcctcacgtcccggtcctcaccaccggtggcgacggggtgtgacagttggtaccagagacggtgtatcctcggcgtggggggcgacggacggccaccagctcttctctgcgctagctatcggggtggcgacgacgattgttggcgcgtcgacggcggatccagcggtccggcgtggtgacctcattgatccggcgcgacctacctccttcagctaacggtggcgctccagcggcccttggctcgagttccgttttgttccgcgatggcttccctttcccccggcaactccttcatcgaggcggtgtcgacggcggtggttgcggcggatttggcggtgctgggctgacgggaggtctcgatttggcggtgctggtggcggcgactccatcaagttgcctgtgtgctccctcaactttcttcctcagatccccttcggcaggcggcgtgcccacgacgccactgtttgggatatctggtgacgagtgctctcagtcacggcactggtgacgggttccctttctctgagactccaaccactggcggcaacacgggatttggtgcgtgtgtgcggcagctacgggagattgtggagctcgagtggctctgcatcccgctcgtagcgctcagatcgtgattggctgctttcatcctctacaatcactagttgagcagattttgggtgagcgcggtgttaatttgttgatgctaaggcaagccagtaacctggcacacaacatgttcgatgatatgtcatttacagaggtggtctgggatgatgaaggggcactattcgatgaaatgcattgcacggatgtcatctgggatgaggagacacatcatggctttgactcacatggcctattgcagcaccatgctgaagcaatggataaccagatgcagggcaaggagaaattggctcaaagtggagattactatgatgagaggaaagtcaatattgaaccagacatcaacaacttgctcattcatgtcaatgaccatttctctatgttggtgattggtgcggattctaggcgaagtgatgttgtgtgggacgaggacatgttatctgacctcgatactcatggtggcttattacagttactggcatgttgtaaagatgatgagctcaaccaggacagagacactccttttctcttgggccttggtatggatcaggtggatgagatgctggccagcccgtccagccttggcatgaatgaggacttgccatctgtacctgagacacatggctcgttattgcagcaagtggcatgggacaggaagcactttgcttatgaaatgtgcacgcttattgctgagatggtcctggaagatgttctcaccgatgttggcaacctcgctttcagcattgattcaagcatgcagatcagtgatcaaccttccaaatatgcgctagtcatcgatgcttatctgctgaagacgcagtacaaaaaaccatacatttctataagccaatgggatccaggaatttggtgcaaaggtactatggcccatgagcagcaacagcttgagatatataggatgtttgagaaacaatgggattcagttatccttaaatggttcaggaatccttttgtgctgctgcaatcatgcaatggggaggatctgaatgaacaaggcacagtgcctgtaaatgacattttcgatgtattggctgctggccaggagttgaattttggcaacgtcaccttgatcatttatgggggatgccaaggagcaatgggtctgcaggttctttttgcagaattacacccttggcaccacaatgtctttacctccatagaattagcaatacagtcatggagaatcaatggtttcagtccaggaagctgcaagctcaacagacaatctatacttgttgctactaacttgcagttcaattataaagcttccaagtttgtatcctttactgatacttatcagatatacaagaacacatgcatttgtatcggagaattggaacctgctagttggagagatacttgttggctacctgagatctcacatgccaatgtgtccacacttgctagtgaggaaatagataacatgcttttccaggttggtgattttcatccaggagagagtgagcagcttgagctttacatgataacattgatacagtgggatctaggtccagtagaattttacaaatcaaactgtaggtgccctgctgcagaactgatagggtggtgctgattctagtttgttcatacaatctgtttatgttatgctgaaagctagtttcttctttatcatgaggtactacttggcccaacagtcatggaatttctgggatctttagtcaccaagatacaattcatggtcatgcggttgtttggggacaagcaaccatttgtgggggtggaaaggatatatggcaacacaggttaaagtcgtgttttaaaatggaaatgcatgctacagtcctgggtgtcaatgatgtattgcagcatatcagtgcttgttctctattcctgcagcttggtcgcagaaaactatatagggtggtgatgacttctgttctaaggcccagagatttgctgctgaagagctatacaacattcttgaccaagtcgatgaactattgttgcttcctgaccaaaagctcgggagaccatggtgtgacactgatctaatatgtgaaccgattctgtcttggagactcaatggtggcagcccaagcaaatgtttgttgcaactcaagacatacatagtcagacagtgggatccaggaatttctgggatctttagtcatcgagatacaattcaaggtcatgcggttgcttggggacaagcaacattttgtgagggtggaaatgtaacatccatgaatagcaacatgtccagggctttagctgacaagcgggccacccacccatgggacccaggtggaagaccagatgctgggtataagttccaagagtctgtatgggggaaggcaagaaagaaaatacaaaaaaatagtcgtcttcttcctcgtgaaggacggtctaggtgagattgtcctcttgtcgagatcctcacgtcccggtcctcaccacgggtggccacggggtgtgacatgatactaggagatgtaacggagcaaagaattctgagaggagccaaagatgaggataagggatactgaagatcctcgtcgagctggacaaggatctcaagtctgctctgtgcgatttggaagacgtcctggatgttattgaatatcgctgaatcgagaagaaagtcatcggtggtgacaaaaagttgatcagcactactatttgcatctgggcgctgcaagctattggcgattggatcacctactggaagcgtagctcgttcgggcaaaagctgttgcagtgcgcgcgcccagaaccagtatcagaagctcagggaccttggagagaagctgcagaagtgcgctcaggatctggatctgaagttttgggaccttgtagctaagctacagcagtgcgcccagaacctgaatcacatgttctgggactttcaagctaagttcttgcagtgcacccaaagcctgccactgtatatccatcagggagcagctgggcaaccaccaatgcggcaatgcctgattcacccgccgcaagatccactgcagaattcagggatgacattgaacaaggaccatcgacgcctgatgatgcaccctcgaatccaccgtcgcctaatgccctcccgaatgctgctggctccaccactggcaatcaacacggatcagctgaggaggcaccgacgcctgatgcaccctcgaattccctggtgcagatgatctgcgactgattggtctatgggtttacagcactccgttctttttatttggctgcgcgtcatcttcgggactggtcatatgaaccgattggcatcaaagaatgatggtggtactgcaacagattgggaccttcctactaatgagataatcagcttgaggaaaaggataaagaacatagaatatattgtcagtgagacaaataaatcacctctgtcgaaacatagtagcagcagcacaaagaatgaaattgatgacaaggaaagcagcagcaccaagaacagcggcaatgtaaggagcaccaaacagaaggaaattgactacgtatacagaagcattgaaaagaaagttaaagttttcggtcgagacaaggtccatgaagatataaggtgcttcataatggaccggctaccgatgcaccaagctccgactccagtaaaccttattctgtgattggcatatatggaattacaggttctgggaagactactctggcacaatatgtttgtgagtatgagaagggtgaggtttcaatcctatcatgttcatccatgtgggaactacattcagtgccggtgaaatattttgtgatatgctggaccagatcacgcaacagcggccctctgatgccaacggtcctaaaagcctaaaaacagagttaaaagatctaacactacagcaaacgccaaaatatacagctactcttgttgactgtccaaattcaaaatacacagcttataagcaaggctgtatatgtttgctactaactcatacctataggcagctaagaccggtgttatgccaagtgacattgaagtgtacatagctgaccataagggaccagacccttccaaacctgaggagttgtgcagtcaggcttgcacagatcggctgaatatggtcaagaaatggtgaggcgccatgaaaaggactacgaccggagaaaagcaccaatcgatcccatggtggtgtatgctactggaggcagaaagagtcatgggcggtactccatgtttaatggagtgattgactccagagaggttagatctcagaggtcggggtcttcctccgaacgatcaggggctagaactcatcgccaatcagagcatgagttggaggttgcaagggtgcaagaggagataaggcaacgtgatgcattccaaaggcacaacatgagtactttgcctcattcttggcgcagcagcagaccgtgcttcaagcaactttccaacagcaggggataaacgtagtccttccacaatttcaacctccaccactgccaccaatatggggatcgggtacccaataccttctgcaagtcaaacggccgatgctggaactacatttgtaaatgcaatcttcggtccaccctctggaggcagcggccaaaactccaatcatctgagaggtggcttgtcacactcggatttaagggcaaactcgggcgcatctcaaatgtgtgctaggatcaagtctcacacatatgatggctcatggtacagaaatcaatgtcatatctttattaaataatcggagtttttttacaaaataactaaatacaatacaccatatggcgacgagatcctccaccaacaaagttgactgggagacgacggcatagatctctccgaactcatcgtaacatccttcatgctctttatcttgcagtacctgtctttgacctggtgtgattatagcaagggtgagctcccatacggtcatcgctcagcaagtgtgggaaataatgtgtatgagctcacttacggtgggagctcatgtgtagtgtaaggctgatcaacaaataatggttaaggctgagcattgcttttaataagttggtcaaaattttattagca

SEQ ID NO: 57334 - DNA, 5370 bp, Zea Mays
agaaaatacaaaaggaaaaaaaaaaatagtcgtcttcttcctcgtgaaggacggtctaggtgagattgtcctcttgtcgagatcctcacgtcccggtcctcaccaccggtggcgacggggtgtgacagttggtaccagagacggtgtatcctcggcgtggggggcgacggacggccaccagctcttctctgcgctagctatcggggtggcgacgacgattgttggcgcgtcgacggcggatccagcggtccggcgtggtgacctcattgatccggcgcgacctacctccttcagctaacggtggcgctccagcggcccttggctcgagttccgttttgttccgcgatggcttccctttcccccggcaactccttcatcgaggcggtgtcgacggcggtggttgcggcggatttggcggtgctgggctgacgggaggtctcgatttggcggtgctggtggcggcgactccatcaagttgcctgtgtgctccctcaactttcttcctcagatccccttcggcaggcggcgtgcccacgacgccactgtttgggatatctggtgacgagtgctctcagtcacggcactggtgacgggttccctttctctgagactccaaccactggcggcaacacgggatttggtgcgtgtgtgcggcagctacgggagattgtggagctcgagtggctctgcatcccgctcgtagcgctcagatcgtgattggctgctttcatcctctacaatcactagttgagcagattttgggtgagcgcggtgttaatttgttgatgctaaggcaagccagtaacctggcacacaacatgttcgatgatatgtcatttacagaggtggtctgggatgatgaaggggcactattcgatgaaatgcattgcacggatgtcatctgggatgaggagacacatcatggctttgactcacatggcctattgcagcaccatgctgaagcaatggataaccagatgcagggcaaggagaaattggctcaaagtggagattactatgatgagaggaaagtcaatattgaaccagacatcaacaacttgctcattcatgtcaatgaccatttctctatgttggtgattggtgcggattctaggcgaagtgatgttgtgtgggacgaggacatgttatctgacctcgatactcatggtggcttattacagttactggcatgttgtaaagatgatgagctcaaccaggacagagacactccttttctcttgggccttggtatggatcaggtggatgagatgctggccagcccgtccagccttggcatgaatgaggacttgccatctgtacctgagacacatggctcgttattgcagcaagtggcatgggacaggaagcactttgcttatgaaatgtgcacgcttattgctgagatggtcctggaagatgttctcaccgatgttggcaacctcgctttcagcattgattcaagcatgcagatcagtgatcaaccttccaaatatgcgctagtcatcgatgcttatctgctgaagacgcagtacaaaaaaccatacatttctataagccaatgggatccaggaatttggtgcaaaggtactatggcccatgagcagcaacagcttgagatatataggatgtttgagaaacaatgggattcagttatccttaaatggttcaggaatccttttgtgctgctgcaatcatgcaatggggaggatctgaatgaacaaggcacagtgcctgtaaatgacattttcgatgtattggctgctggccaggagttgaattttggcaacgtcaccttgatcatttatgggggatgccaaggagcaatgggtctgcaggttctttttgcagaattacacccttggcaccacaatgtctttacctccatagaattagcaatacagtcatggagaatcaatggtttcagtccaggaagctgcaagctcaacagacaatctatacttgttgctactaacttgcagttcaattataaagcttccaagtttgtatcctttactgatacttatcagatatacaagaacacatgcatttgtatcggagaattggaacctgctagttggagagatacttgttggctacctgagatctcacatgccaatgtgtccacacttgctagtgaggaaatagataacatgcttttccaggttggtgattttcatccaggagagagtgagcagcttgagctttacatgataacattgatacagtgggatctaggtccagtagaattttacaaatcaaactgtaggtgccctgctgcagaactgatagggtggtgctgattctagtttgttcatacaatctgtttatgttatgctgaaagctagtttcttctttatcatgaggtactacttggcccaacagtcatggaatttctgggatctttagtcaccaagatacaattcatggtcatgcggttgtttggggacaagcaaccatttgtgggggtggaaaggatatatggcaacacaggttaaagtcgtgttttaaaatggaaatgcatgctacagtcctgggtgtcaatgatgtattgcagcatatcagtgcttgttctctattcctgcagcttggtcgcagaaaactatatagggtggtgatgacttctgttctaaggcccagagatttgctgctgaagagctatacaacattcttgaccaagtcgatgaactattgttgcttcctgaccaaaagctcgggagaccatggtgtgacactgatctaatatgtgaaccgattctgtcttggagactcaatggtggcagcccaagcaaatgtttgttgcaactcaagacatacatagtcagacagtgggatccaggaatttctgggatctttagtcatcgagatacaattcaaggtcatgcggttgcttggggacaagcaacattttgtgagggtggaaatgtaacatccatgaatagcaacatgtccagggctttagctgacaagcgggccacccacccatgggacccaggtggaagaccagatgctgggtataagttccaagagtctgtatgggggaaggcaagaaagaaaatacaaaaaaatagtcgtcttcttcctcgtgaaggacggtctaggtgagattgtcctcttgtcgagatcctcacgtcccggtcctcaccacgggtggccacggggtgtgacatgatactaggagatgtaacggagcaaagaattctgagaggagccaaagatgaggataagggatactgaagatcctcgtcgagctggacaaggatctcaagtctgctctgtgcgatttggaagacgtcctggatgttattgaatatcgctgaatcgagaagaaagtcatcggtggtgacaaaaagttgatcagcactactatttgcatctgggcgctgcaagctattggcgattggatcacctactggaagcgtagctcgttcgggcaaaagctgttgcagtgcgcgcgcccagaaccagtatcagaagctcagggaccttggagagaagctgcagaagtgcgctcaggatctggatctgaagttttgggaccttgtagctaagctacagcagtgcgcccagaacctgaatcacatgttctgggactttcaagctaagttcttgcagtgcacccaaagcctgccactgtatatccatcagggagcagctgggcaaccaccaatgcggcaatgcctgattcacccgccgcaagatccactgcagaattcagggatgacattgaacaaggaccatcgacgcctgatgatgcaccctcgaatccaccgtcgcctaatgccctcccgaatgctgctggctccaccactggcaatcaacacggatcagctgaggaggcaccgacgcctgatgcaccctcgaattccctggtgcagatgatctgcgactgattggtctatgggtttacagcactccgttctttttatttggctgcgcgtcatcttcgggactggtcatatgaaccgattggcatcaaagaatgatggtggtactgcaacagattgggaccttcctactaatgagataatcagcttgaggaaaaggataaagaacatagaatatattgtcagtgagacaaataaatcacctctgtcgaaacatagtagcagcagcacaaagaatgaaattgatgacaaggaaagcagcagcaccaagaacagcggcaatgtaaggagcaccaaacagaaggaaattgactacgtatacagaagcattgaaaagaaagttaaagttttcggtcgagacaaggtccatgaagatataaggtgcttcataatggaccggctaccgatgcaccaagctccgactccagtaaaccttattctgtgattggcatatatggaattacaggttctgggaagactactctggcacaatatgtttgtgagtatgagaagggcagctaagaccggtgttatgccaagtgacattgaagtgtacatagctgaccataagggaccagacccttccaaacctgaggagttgtgcagtcaggcttgcacagatcggctgaatatggtcaagaaatggtgaggcgccatgaaaaggactacgaccggagaaaagcaccaatcgatcccatggtggtgtatgctactggaggcagaaagagtcatgggcggtactccatgtttaatggagtgattgactccagagaggttagatctcagaggtcggggtcttcctccgaacgatcaggggctagaactcatcgccaatcagagcatgagttggaggttgcaagggtgcaagaggagataaggcaacgtgatgcattccaaaggcacaacatgagtactttgcctcattcttggcgcagcagcagaccgtgcttcaaacggccgatgctggaactacatttgtaaatgcaatcttcggtccaccctctggaggcagcggccaaaactccaatcatctgagaggtggcttgtcacactcggatttaagggcaaactcgggcgcatctcaaatgtgtgctaggatcaagtctcacacatatgatggctcatggtacagaaatcaatgtcatatctttattaaataatcggagtttttttacaaaataactaaatacaatacaccatatggcgacgagatcctccaccaacaaagttgactgggagacgacggcatagatctctccgaactcatcgtaacatccttcatgctctttatcttgcagtacctgtctttgacctggtgtgattatagcaagggtgagctcccatacggtcatcgctcagcaagtgtgggaaataatgtgtatgagctcacttacggtgggagctcatgtgtagtgtaaggctgatcaacaaataatggttaaggctgagcattgcttttaataagttggtcaaaattttattagca

SEQ ID NO: 57335 - DNA, 5804 bp, Zea Mays
agaaaatacaaaaggaaaaaaaaaaatagtcgtcttcttcctcgtgaaggacggtctaggtgagattgtcctcttgtcgagatcctcacgtcccggtcctcaccaccggtggcgacggggtgtgacagttggtaccagagacggtgtatcctcggcgtggggggcgacggacggccaccagctcttctctgcgctagctatcggggtggcgacgacgattgttggcgcgtcgacggcggatccagcggtccggcgtggtgacctcattgatccggcgcgacctacctccttcagctaacggtggcgctccagcggcccttggctcgagttccgttttgttccgcgatggcttccctttcccccggcaactccttcatcgaggcggtgtcgacggcggtggttgcggcggatttggcggtgctgggctgacgggaggtctcgatttggcggtgctggtggcggcgactccatcaagttgcctgtgtgctccctcaactttcttcctcagatccccttcggcaggcggcgtgcccacgacgccactgtttgggatatctggtgacgagtgctctcagtcacggcactggtgacgggttccctttctctgagactccaaccactggcggcaacacgggatttggtgcgtgtgtgcggcagctacgggagattgtggagctcgagtggctctgcatcccgctcgtagcgctcagatcgtgattggctgctttcatcctctacaatcactagttgagcagattttgggtgagcgcggtgttaatttgttgatgctaaggcaagccagtaacctggcacacaacatgttcgatgatatgtcatttacagaggtggtctgggatgatgaaggggcactattcgatgaaatgcattgcacggatgtcatctgggatgaggagacacatcatggctttgactcacatggcctattgcagcaccatgctgaagcaatggataaccagatgcagggcaaggagaaattggctcaaagtggagattactatgatgagaggaaagtcaatattgaaccagacatcaacaacttgctcattcatgtcaatgaccatttctctatgttggtgattggtgcggattctaggcgaagtgatgttgtgtgggacgaggacatgttatctgacctcgatactcatggtggcttattacagttactggcatgttgtaaagatgatgagctcaaccaggacagagacactccttttctcttgggccttggtatggatcaggtggatgagatgctggccagcccgtccagccttggcatgaatgaggacttgccatctgtacctgagacacatggctcgttattgcagcaagtggcatgggacaggaagcactttgcttatgaaatgtgcacgcttattgctgagatggtcctggaagatgttctcaccgatgttggcaacctcgctttcagcattgattcaagcatgcagatcagtgatcaaccttccaaatatgcgctagtcatcgatgcttatctgctgaagacgcagtacaaaaaaccatacatttctataagccaatgggatccaggaatttggtgcaaaggtactatggcccatgagcagcaacagcttgagatatataggatgtttgagaaacaatgggattcagttatccttaaatggttcaggaatccttttgtgctgctgcaatcatgcaatggggaggatctgaatgaacaaggcacagtgcctgtaaatgacattttcgatgtattggctgctggccaggagttgaattttggcaacgtcaccttgatcatttatgggggatgccaaggagcaatgggtctgcaggttctttttgcagaattacacccttggcaccacaatgtctttacctccatagaattagcaatacagtcatggagaatcaatggtttcagtccaggaagctgcaagctcaacagacaatctatacttgttgctactaacttgcagttcaattataaagcttccaagtttgtatcctttactgatacttatcagatatacaagaacacatgcatttgtatcggagaattggaacctgctagttggagagatacttgttggctacctgagatctcacatgccaatgtgtccacacttgctagtgaggaaatagataacatgcttttccaggttggtgattttcatccaggagagagtgagcagcttgagctttacatgataacattgatacagtgggatctaggtccagtagaattttacaaatcaaactgtaggtgccctgctgcagaactgatagggtggtgctgattctagtttgttcatacaatctgtttatgttatgctgaaagctagtttcttctttatcatgaggtactacttggcccaacagtcatggaatttctgggatctttagtcaccaagatacaattcatggtcatgcggttgtttggggacaagcaaccatttgtgggggtggaaaggatatatggcaacacaggttaaagtcgtgttttaaaatggaaatgcatgctacagtcctgggtgtcaatgatgtattgcagcatatcagtgcttgttctctattcctgcagcttggtcgcagaaaactatatagggtggtgatgacttctgttctaaggcccagagatttgctgctgaagagctatacaacattcttgaccaagtcgatgaactattgttgcttcctgaccaaaagctcgggagaccatggtgtgacactgatctaatatgtgaaccgattctgtcttggagactcaatggtggcagcccaagcaaatgtttgttgcaactcaagacatacatagtcagacagtgggatccaggaatttctgggatctttagtcatcgagatacaattcaaggtcatgcggttgcttggggacaagcaacattttgtgagggtggaaatgtaacatccatgaatagcaacatgtccagggctttagctgacaagcgggccacccacccatgggacccaggtggaagaccagatgctgggtataagttccaagagtctgtatgggggaaggcaagaaagaaaatacaaaaaaatagtcgtcttcttcctcgtgaaggacggtctaggtgagattgtcctcttgtcgagatcctcacgtcccggtcctcaccacgggtggccacggggtgtgacatgatactaggagatgtaacggagcaaagaattctgagaggagccaaagatgaggataagggatactgaagatcctcgtcgagctggacaaggatctcaagtctgctctgtgcgatttggaagacgtcctggatgttattgaatatcgctgaatcgagaagaaagtcatcggtggtgacaaaaagttgatcagcactactatttgcatctgggcgctgcaagctattggcgattggatcacctactggaagcgtagctcgttcgggcaaaagctgttgcagtgcgcgcgcccagaaccagtatcagaagctcagggaccttggagagaagctgcagaagtgcgctcaggatctggatctgaagttttgggaccttgtagctaagctacagcagtgcgcccagaacctgaatcacatgttctgggactttcaagctaagttcttgcagtgcacccaaagcctgccactgtatatccatcagggagcagctgggcaaccaccaatgcggcaatgcctgattcacccgccgcaagatccactgcagaattcagggatgacattgaacaaggaccatcgacgcctgatgatgcaccctcgaatccaccgtcgcctaatgccctcccgaatgctgctggctccaccactggcaatcaacacggatcagctgaggaggcaccgacgcctgatgcaccctcgaattccctggtgcagatgatctgcgactgattggtctatgggtttacagcactccgttctttttatttggctgcgcgtcatcttcgggactggtcatatgaaccgattggcatcaaagaatgatggtggtactgcaacagattgggaccttcctactaatgagataatcagcttgaggaaaaggataaagaacatagaatatattgtcagtgagacaaataaatcacctctgtcgaaacatagtagcagcagcacaaagaatgaaattgatgacaaggaaagcagcagcaccaagaacagcggcaatgtaaggagcaccaaacagaaggaaattgactacgtatacagaagcattgaaaagaaagttaaagttttcggtcgagacaaggtccatgaagatataaggtgcttcataatggaccggctaccgatgcaccaagctccgactccagtaaaccttattctgtgattggcatatatggaattacaggttctgggaagactactctggcacaatatgtttgtgagtatgagaagggtgaggtttcaatcctatcatgttcatccatgtgggaactacattcagtgccggtgaaatattttgtgatatgctggaccagatcacgcaacagcggccctctgatgccaacggtcctaaaagcctaaaaacagagttaaaagatctaacactacagcaaacgccaaaatatacagctactcttgttgactgtccaaattcaaaatacacagcttataagcaaggctgtatatgtttgctactaactcatacctataggcagctaagaccggtgttatgccaagtgacattgaagtgtacatagctgaccataagggaccagacccttccaaacctgaggagttgtgcagtcaggcttgcacagatcggctggcagaatatggtcaagaaatggtgaggcgccatgaaaaggactacgaccggagaaaagcaccaatcgatcccatggtggtgtatgctactggaggcagaaagagtcatgggcggtactccatgtttaatggagtgattgactccagagaggttagatctcagaggtcggggtcttcctccgaacgatcaggggctagaactcatcgccaatcagagcatgagttggaggttgcaagggtgcaagaggagataaggcaacgtgatgcattccaaaggcacaacatgagtactttgcctcattcttggcgcagcagcagaccgtgcttcaagcaactttccaacagcaggggataaacgtagtccttccacaatttcaacctccaccactgccaccaatatggggatcgggtacccaataccttctgcaagtcaaggatcggcggcacaagggccccagatttaccatactccacctgcatagatactagcacctggagaccaacggccgatgctggaactacatttgtaaatgcaatcttcggtccaccctctggaggcagcggccaaaactccaatcatctgagaggtggcttgtcacactcggatttaagggcaaactcgggcgcatctcaaatgtgtgctaggatcaagtctcacacatatgatggctcatggtacagaaatcaatgtcatatctttattaaataatcggagtttttttacaaaataactaaatacaatacaccatatggcgacgagatcctccaccaacaaagttgactgggagacgacggcatagatctctccgaactcatcgtaacatccttcatgctctttatcttgcagtacctgtctttgacctggtgtgattatagcaagggtgagctcccatacggtcatcgctcagcaagtgtgggaaataatgtgtatgagctcacttacggtgggagctcatgtgtagtgtaaggctgatcaacaaataatggttaaggctgagcattgcttttaataagttggtcaaaattttattagca

SEQ ID NO: 57336 - DNA, 5632 bp, Zea Mays
agaaaatacaaaaggaaaaaaaaaaatagtcgtcttcttcctcgtgaaggacggtctaggtgagattgtcctcttgtcgagatcctcacgtcccggtcctcaccaccggtggcgacggggtgtgacagttggtaccagagacggtgtatcctcggcgtggggggcgacggacggccaccagctcttctctgcgctagctatcggggtggcgacgacgattgttggcgcgtcgacggcggatccagcggtccggcgtggtgacctcattgatccggcgcgacctacctccttcagctaacggtggcgctccagcggcccttggctcgagttccgttttgttccgcgatggcttccctttcccccggcaactccttcatcgaggcggtgtcgacggcggtggttgcggcggatttggcggtgctgggctgacgggaggtctcgatttggcggtgctggtggcggcgactccatcaagttgcctgtgtgctccctcaactttcttcctcagatccccttcggcaggcggcgtgcccacgacgccactgtttgggatatctggtgacgagtgctctcagtcacggcactggtgacgggttccctttctctgagactccaaccactggcggcaacacgggatttggtgcgtgtgtgcggcagctacgggagattgtggagctcgagtggctctgcatcccgctcgtagcgctcagatcgtgattggctgctttcatcctctacaatcactagttgagcagattttgggtgagcgcggtgttaatttgttgatgctaaggcaagccagtaacctggcacacaacatgttcgatgatatgtcatttacagaggtggtctgggatgatgaaggggcactattcgatgaaatgcattgcacggatgtcatctgggatgaggagacacatcatggctttgactcacatggcctattgcagcaccatgctgaagcaatggataaccagatgcagggcaaggagaaattggctcaaagtggagattactatgatgagaggaaagtcaatattgaaccagacatcaacaacttgctcattcatgtcaatgaccatttctctatgttggtgattggtgcggattctaggcgaagtgatgttgtgtgggacgaggacatgttatctgacctcgatactcatggtggcttattacagttactggcatgttgtaaagatgatgagctcaaccaggacagagacactccttttctcttgggccttggtatggatcaggtggatgagatgctggccagcccgtccagccttggcatgaatgaggacttgccatctgtacctgagacacatggctcgttattgcagcaagtggcatgggacaggaagcactttgcttatgaaatgtgcacgcttattgctgagatggtcctggaagatgttctcaccgatgttggcaacctcgctttcagcattgattcaagcatgcagatcagtgatcaaccttccaaatatgcgctagtcatcgatgcttatctgctgaagacgcagtacaaaaaaccatacatttctataagccaatgggatccaggaatttggtgcaaaggtactatggcccatgagcagcaacagcttgagatatataggatgtttgagaaacaatgggattcagttatccttaaatggttcaggaatccttttgtgctgctgcaatcatgcaatggggaggatctgaatgaacaaggcacagtgcctgtaaatgacattttcgatgtattggctgctggccaggagttgaattttggcaacgtcaccttgatcatttatgggggatgccaaggagcaatgggtctgcaggttctttttgcagaattacacccttggcaccacaatgtctttacctccatagaattagcaatacagtcatggagaatcaatggtttcagtccaggaagctgcaagctcaacagacaatctatacttgttgctactaacttgcagttcaattataaagcttccaagtttgtatcctttactgatacttatcagatatacaagaacacatgcatttgtatcggagaattggaacctgctagttggagagatacttgttggctacctgagatctcacatgccaatgtgtccacacttgctagtgaggaaatagataacatgcttttccaggttggtgattttcatccaggagagagtgagcagcttgagctttacatgataacattgatacagtgggatctaggtccagtagaattttacaaatcaaactgtaggtgccctgctgcagaactgatagggtggtgctgattctagtttgttcatacaatctgtttatgttatgctgaaagctagtttcttctttatcatgaggtactacttggcccaacagtcatggaatttctgggatctttagtcaccaagatacaattcatggtcatgcggttgtttggggacaagcaaccatttgtgggggtggaaaggatatatggcaacacaggttaaagtcgtgttttaaaatggaaatgcatgctacagtcctgggtgtcaatgatgtattgcagcatatcagtgcttgttctctattcctgcagcttggtcgcagaaaactatatagggtggtgatgacttctgttctaaggcccagagatttgctgctgaagagctatacaacattcttgaccaagtcgatgaactattgttgcttcctgaccaaaagctcgggagaccatggtgtgacactgatctaatatgtgaaccgattctgtcttggagactcaatggtggcagcccaagcaaatgtttgttgcaactcaagacatacatagtcagacagtgggatccaggaatttctgggatctttagtcatcgagatacaattcaaggtcatgcggttgcttggggacaagcaacattttgtgagggtggaaatgtaacatccatgaatagcaacatgtccagggctttagctgacaagcgggccacccacccatgggacccaggtggaagaccagatgctgggtataagttccaagagtctgtatgggggaaggcaagaaagaaaatacaaaaaaatagtcgtcttcttcctcgtgaaggacggtctaggtgagattgtcctcttgtcgagatcctcacgtcccggtcctcaccacgggtggccacggggtgtgacatgatactaggagatgtaacggagcaaagaattctgagaggagccaaagatgaggataagggatactgaagatcctcgtcgagctggacaaggatctcaagtctgctctgtgcgatttggaagacgtcctggatgttattgaatatcgctgaatcgagaagaaagtcatcggtggtgacaaaaagttgatcagcactactatttgcatctgggcgctgcaagctattggcgattggatcacctactggaagcgtagctcgttcgggcaaaagctgttgcagtgcgcgcgcccagaaccagtatcagaagctcagggaccttggagagaagctgcagaagtgcgctcaggatctggatctgaagttttgggaccttgtagctaagctacagcagtgcgcccagaacctgaatcacatgttctgggactttcaagctaagttcttgcagtgcacccaaagcctgccactgtatatccatcagggagcagctgggcaaccaccaatgcggcaatgcctgattcacccgccgcaagatccactgcagaattcagggatgacattgaacaaggaccatcgacgcctgatgatgcaccctcgaatccaccgtcgcctaatgccctcccgaatgctgctggctccaccactggcaatcaacacggatcagctgaggaggcaccgacgcctgatgcaccctcgaattccctggtgcagatgatctgcgactgattggtctatgggtttacagcactccgttctttttatttggctgcgcgtcatcttcgggactggtcatatgaaccgattggcatcaaagaatgatggtggtactgcaacagattgggaccttcctactaatgagataatcagcttgaggaaaaggataaagaacatagaatatattgtcagtgagacaaataaatcacctctgtcgaaacatagtagcagcagcacaaagaatgaaattgatgacaaggaaagcagcagcaccaagaacagcggcaatgtaaggagcaccaaacagaaggaaattgactacgtatacagaagcattgaaaagaaagttaaagttttcggtcgagacaaggtccatgaagatataaggtgcttcataatggaccggctaccgatgcaccaagctccgactccagtaaaccttattctgtgattggcatatatggaattacaggttctgggaagactactctggcacaatatgtttgtgagtatgagaagggtgaggtttcaatcctatcatgttcatccatgtgggaactacattcagtgccggtgaaatattttgtgatatgctggaccagatcacgcaacagcggccctctgatgccaacggtcctaaaagcctaaaaacagagttaaaagatctaacactacagcaaacgccaaaatatacagctactcttgttgactgtccaaattcaaaatacacagcttataagcaaggctgtatatgtttgctactaactcatacctataggcagctaagaccggtgttatgccaagtgacattgaagtgtacatagctgaccataagggaccagacccttccaaacctgaggagttgtgcagtcaggcttgcacagatcggctggcagaatatggtcaagaaatggtgaggcgccatgaaaaggactacgaccggagaaaagcaccaatcgatcccatggtggtgtatgctactggaggcagaaagagtcatgggcggtactccatgtttaatggagtgattgactccagagaggttagatctcagaggtcggggtcttcctccgaacgatcaggggctagaactcatcgccaatcagagcatgagttggaggttgcaagggtgcaagaggagataaggcaacgtgatgcattccaaaggcacaacatgagtactttgcctcattcttggcgcagcagcagaccgtgcttcaaacggccgatgctggaactacatttgtaaatgcaatcttcggtccaccctctggaggcagcggccaaaactccaatcatctgagaggtggcttgtcacactcggatttaagggcaaactcgggcgcatctcaaatgtgtgctaggatcaagtctcacacatatgatggctcatggtacagaaatcaatgtcatatctttattaaataatcggagtttttttacaaaataactaaatacaatacaccatatggcgacgagatcctccaccaacaaagttgactgggagacgacggcatagatctctccgaactcatcgtaacatccttcatgctctttatcttgcagtacctgtctttgacctggtgtgattatagcaagggtgagctcccatacggtcatcgctcagcaagtgtgggaaataatgtgtatgagctcacttacggtgggagctcatgtgtagtgtaaggctgatcaacaaataatggttaaggctgagcattgcttttaataagttggtcaaaattttattagca

SEQ ID NO: 57337 - DNA, 5805 bp, Zea Mays
agaaaatacaaaaggaaaaaaaaaaatagtcgtcttcttcctcgtgaaggacggtctaggtgagattgtcctcttgtcgagatcctcacgtcccggtcctcaccaccggtggcgacggggtgtgacagttggtaccagagacggtgtatcctcggcgtggggggcgacggacggccaccagctcttctctgcgctagctatcggggtggcgacgacgattgttggcgcgtcgacggcggatccagcggtccggcgtggtgacctcattgatccggcgcgacctacctccttcagctaacggtggcgctccagcggcccttggctcgagttccgttttgttccgcgatggcttccctttcccccggcaactccttcatcgaggcggtgtcgacggcggtggttgcggcggatttggcggtgctgggctgacgggaggtctcgatttggcggtgctggtggcggcgactccatcaagttgcctgtgtgctccctcaactttcttcctcagatccccttcggcaggcggcgtgcccacgacgccactgtttgggatatctggtgacgagtgctctcagtcacggcactggtgacgggttccctttctctgagactccaaccactggcggcaacacgggatttggtgcgtgtgtgcggcagctacgggagattgtggagctcgagtggctctgcatcccgctcgtagcgctcagatcgtgattggctgctttcatcctctacaatcactagttgagcagattttgggtgagcgcggtgttaatttgttgatgctaaggcaagccagtaacctggcacacaacatgttcgatgatatgtcatttacagaggtggtctgggatgatgaaggggcactattcgatgaaatgcattgcacggatgtcatctgggatgaggagacacatcatggctttgactcacatggcctattgcagcaccatgctgaagcaatggataaccagatgcagggcaaggagaaattggctcaaagtggagattactatgatgagaggaaagtcaatattgaaccagacatcaacaacttgctcattcatgtcaatgaccatttctctatgttggtgattggtgcggattctaggcgaagtgatgttgtgtgggacgaggacatgttatctgacctcgatactcatggtggcttattacagttactggcatgttgtaaagatgatgagctcaaccaggacagagacactccttttctcttgggccttggtatggatcaggtggatgagatgctggccagcccgtccagccttggcatgaatgaggacttgccatctgtacctgagacacatggctcgttattgcagcaagtggcatgggacaggaagcactttgcttatgaaatgtgcacgcttattgctgagatggtcctggaagatgttctcaccgatgttggcaacctcgctttcagcattgattcaagcatgcagatcagtgatcaaccttccaaatatgcgctagtcatcgatgcttatctgctgaagacgcagtacaaaaaaccatacatttctataagccaatgggatccaggaatttggtgcaaaggtactatggcccatgagcagcaacagcttgagatatataggatgtttgagaaacaatgggattcagttatccttaaatggttcaggaatccttttgtgctgctgcaatcatgcaatggggaggatctgaatgaacaaggcacagtgcctgtaaatgacattttcgatgtattggctgctggccaggagttgaattttggcaacgtcaccttgatcatttatgggggatgccaaggagcaatgggtctgcaggttctttttgcagaattacacccttggcaccacaatgtctttacctccatagaattagcaatacagtcatggagaatcaatggtttcagtccaggaagctgcaagctcaacagacaatctatacttgttgctactaacttgcagttcaattataaagcttccaagtttgtatcctttactgatacttatcagatatacaagaacacatgcatttgtatcggagaattggaacctgctagttggagagatacttgttggctacctgagatctcacatgccaatgtgtccacacttgctagtgaggaaatagataacatgcttttccaggttggtgattttcatccaggagagagtgagcagcttgagctttacatgataacattgatacagtgggatctaggtccagtagaattttacaaatcaaactgtaggtgccctgctgcagaactgatagggtggtgctgattctagtttgttcatacaatctgtttatgttatgctgaaagctagtttcttctttatcatgaggtactacttggcccaacagtcatggaatttctgggatctttagtcaccaagatacaattcatggtcatgcggttgtttggggacaagcaaccatttgtgggggtggaaaggatatatggcaacacaggttaaagtcgtgttttaaaatggaaatgcatgctacagtcctgggtgtcaatgatgtattgcagcatatcagtgcttgttctctattcctgcagcttggtcgcagaaaactatatagggtggtgatgacttctgttctaaggcccagagatttgctgctgaagagctatacaacattcttgaccaagtcgatgaactattgttgcttcctgaccaaaagctcgggagaccatggtgtgacactgatctaatatgtgaaccgattctgtcttggagactcaatggtggcagcccaagcaaatgtttgttgcaactcaagacatacatagtcagacagtgggatccaggaatttctgggatctttagtcatcgagatacaattcaaggtcatgcggttgcttggggacaagcaacattttgtgagggtggaaatgtaacatccatgaatagcaacatgtccagggctttagctgacaagcgggccacccacccatgggacccaggtggaagaccagatgctgggtataagttccaagagtctgtatgggggaaggcaagaaagaaaatacaaaaaaatagtcgtcttcttcctcgtgaaggacggtctaggtgagattgtcctcttgtcgagatcctcacgtcccggtcctcaccacgggtggccacggggtgtgacatgatactaggagatgtaacggagcaaagaattctgagaggagccaaagatgaggataagggatactgaagatcctcgtcgagctggacaaggatctcaagtctgctctgtgcgatttggaagacgtcctggatgttattgaatatcgctgaatcgagaagaaagtcatcggtggtgacaaaaagttgatcagcactactatttgcatctgggcgctgcaagctattggcgattggatcacctactggaagcgtagctcgttcgggcaaaagctgttgcagtgcgcgcgcccagaaccagtatcagaagctcagggaccttggagagaagctgcagaagtgcgctcaggatctggatctgaagttttgggaccttgtagctaagctacagcagtgcgcccagaacctgaatcacatgttctgggactttcaagctaagttcttgcagtgcacccaaagcctgccactgtatatccatcagggagcagctgggcaaccaccaatgcggcaatgcctgattcacccgccgcaagatccactgcagaattcagggatgacattgaacaaggaccatcgacgcctgatgatgcaccctcgaatccaccgtcgcctaatgccctcccgaatgctgctggctccaccactggcaatcaacacggatcagctgaggaggcaccgacgcctgatgcaccctcgaattccctggtgcagatgatctgcgactgattggtctatgggtttacagcactccgttctttttatttggctgcgcgtcatcttcgggactggtcatatgaaccgattggcatcaaagaatgatggtggtactgcaacagattgggaccttcctactaatgagataatcagcttgaggaaaaggataaagaacatagaatatattgtcagtgagacaaataaatcacctctgtcgaaacatagtagcagcagcacaaagaatgaaattgatgacaaggaaagcagcagcaccaagaacagcggcaatgtaaggagcaccaaacagaaggaaattgactacgtatacagaagcattgaaaagaaagttaaagttttcggtcgagacaaggtccatgaagatataaggtgcttcataatggaccggctaccgatgcaccaagctccgactccagtaaaccttattctgtgattggcatatatggaattacaggttctgggaagactactctggcacaatatgtttgtgagtatgagaagggtgaggtttcaatcctatcatgttcatccatgtgggaactacattcagtgccggtgaaatattttgtgatatgctggaccagatcacgcaacagcggccctctgatgccaacggtcctaaaagcctaaaaacagagttaaaagatctaacactacagcaaacgccaaaatatacagctactcttgttgactgtccaaattcaaaatacacagcttataagcaaggctgtatatgtttgctactaactcatacctataggcagctaagaccggtgttatgccaagtgacattgaagtgtacatagctgaccataagggaccagacccttccaaacctgaggagttgtgcagtcaggcttgcacagatcggctgaatatggtcaagaaatggtgaggcgccatgaaaaggactacgaccggagaaaagcaccaatcgatcccatggtggtgtatgctactggaggcagaaagagtcatgggcggtactccatgtttaatggagtgattgactccagagaggttagatctcagaggtcggggtcttcctccgaacgatcaggggctagaactcatcgccaatcagagcatgagttggaggttgcaagggtgcaagaggagataaggcaacgtgatgcattccaaaggcacaacatgagtactttgcctcattcttggcgcagcagcagaccgtgcttcaagcaactttccaacagcaggggataaacgtagtccttccacaatttcaacctccaccactgccaccaatatggggatcgggtacccaataccttctgcaagtcaaggatcggcggcacaagggccccagatttaccatactccacctgcatagatactagcacctggagaccagttctacggccgatgctggaactacatttgtaaatgcaatcttcggtccaccctctggaggcagcggccaaaactccaatcatctgagaggtggcttgtcacactcggatttaagggcaaactcgggcgcatctcaaatgtgtgctaggatcaagtctcacacatatgatggctcatggtacagaaatcaatgtcatatctttattaaataatcggagtttttttacaaaataactaaatacaatacaccatatggcgacgagatcctccaccaacaaagttgactgggagacgacggcatagatctctccgaactcatcgtaacatccttcatgctctttatcttgcagtacctgtctttgacctggtgtgattatagcaagggtgagctcccatacggtcatcgctcagcaagtgtgggaaataatgtgtatgagctcacttacggtgggagctcatgtgtagtgtaaggctgatcaacaaataatggttaaggctgagcattgcttttaataagttggtcaaaattttattagca

SEQ ID NO: 57338 - DNA, 5437 bp, Zea Mays
aaaaaaaaaaatagtcgtcttcttcctcgtgaaggacggtctaggtgagattgtcctcttgtcgagatcctcacgtcccggtcctcaccaccggtggcgacggggtgtgacagttggtaccagagacggtgtatcctcggcgtggggggcgacggacggccaccagctcttctctgcgctagctatcggggtggcgacgacgattgttggcgcgtcgacggcggatccagcggtccggcgtggtgacctcattgatccggcgcgacctacctccttcagctaacggtggcgctccagcggcccttggctcgagttccgttttgttccgcgatggcttccctttcccccggcaactccttcatcgaggcggtgtcgacggcggtggttgcggcggatttggcggtgctgggctgacgggaggtctcgatttggcggtgctggtggcggcgactccatcaagttgcctgtgtgctccctcaactttcttcctcagatccccttcggcaggcggcgtgcccacgacgccactgtttgggatatctggtgacgagtgctctcagtcacggcactggtgacgggttccctttctctgagactccaaccactggcggcaacacgggatttggtgcgtgtgtgcggcagctacgggagattgtggagctcgagtggctctgcatcccgctcgtagcgctcagatcgtgattggctgctttcatcctctacaatcactagttgagcagattttgggtgagcgcggtgttaatttgttgatgctaaggcaagccagtaacctggcacacaacatgttcgatgatatgtcatttacagaggtggtctgggatgatgaaggggcactattcgatgaaatgcattgcacggatgtcatctgggatgaggagacacatcatggctttgactcacatggcctattgcagcaccatgctgaagcaatggataaccagatgcagggcaaggagaaattggctcaaagtggagattactatgatgagaggaaagtcaatattgaaccagacatcaacaacttgctcattcatgtcaatgaccatttctctatgttggtgattggtgcggattctaggcgaagtgatgttgtgtgggacgaggacatgttatctgacctcgatactcatggtggcttattacagttactggcatgttgtaaagatgatgagctcaaccaggacagagacactccttttctcttgggccttggtatggatcaggtggatgagatgctggccagcccgtccagccttggcatgaatgaggacttgccatctgtacctgagacacatggctcgttattgcagcaagtggcatgggacaggaagcactttgcttatgaaatgtgcacgcttattgctgagatggtcctggaagatgttctcaccgatgttggcaacctcgctttcagcattgattcaagcatgcagatcagtgatcaaccttccaaatatgcgctagtcatcgatgcttatctgctgaagacgcagtacaaaaaaccatacatttctataagccaatgggatccaggaatttggtgcaaaggtactatggcccatgagcagcaacagcttgagatatataggatgtttgagaaacaatgggattcagttatccttaaatggttcaggaatccttttgtgctgctgcaatcatgcaatggggaggatctgaatgaacaaggcacagtgcctgtaaatgacattttcgatgtattggctgctggccaggagttgaattttggcaacgtcaccttgatcatttatgggggatgccaaggagcaatgggtctgcaggttctttttgcagaattacacccttggcaccacaatgtctttacctccatagaattagcaatacagtcatggagaatcaatggtttcagtccaggaagctgcaagctcaacagacaatctatacttgttgctactaacttgcagttcaattataaagcttccaagtttgtatcctttactgatacttatcagatatacaagaacacatgcatttgtatcggagaattggaacctgctagttggagagatacttgttggctacctgagatctcacatgccaatgtgtccacacttgctagtgaggaaatagataacatgcttttccaggttggtgattttcatccaggagagagtgagcagcttgagctttacatgataacattgatacagtgggatctaggtccagtagaattttacaaatcaaactgtaggtgccctgctgcagaactgatagggtggtgctgattctagtttgttcatacaatctgtttatgttatgctgaaagctagtttcttctttatcatgaggtactacttggcccaacagtcatggaatttctgggatctttagtcaccaagatacaattcatggtcatgcggttgtttggggacaagcaaccatttgtgggggtggaaaggatatatggcaacacaggttaaagtcgtgttttaaaatggaaatgcatgctacagtcctgggtgtcaatgatgtattgcagcatatcagtgcttgttctctattcctgcagcttggtcgcagaaaactatatagggtggtgatgacttctgttctaaggcccagagatttgctgctgaagagctatacaacattcttgaccaagtcgatgaactattgttgcttcctgaccaaaagctcgggagaccatggtgtgacactgatctaatatgtgaaccgattctgtcttggagactcaatggtggcagcccaagcaaatgtttgttgcaactcaagacatacatagtcagacagtgggatccaggaatttctgggatctttagtcatcgagatacaattcaaggtcatgcggttgcttggggacaagcaacattttgtgagggtggaaatgtaacatccatgaatagcaacatgtccagggctttagctgacaagcgggccacccacccatgggacccaggtggaagaccagatgctgggtataagttccaagagtctctattggcgattggatcacctactggaagcgtagctcgttcgggcaaaagctgttgcagtgcgcgcgcccagaaccagtatcagaagctcagggaccttggagagaagctgcagaagtgcgctcaggatctggatctgaagttttgggaccttgtagctaagctacagcagtgcgcccagaacctgaatcacatgttctgggactttcaagctaagttcttgcagtgcacccaaagcctgccactgtatatccatcagggagcagctgggcaaccaccaatgcggcaatgcctgattcacccgccgcaagatccactgcagaattcagggatgacattgaacaaggaccatcgacgcctgatgatgcaccctcgaatccaccgtcgcctaatgccctcccgaatgctgctggctccaccactggcaatcaacacggatcagctgaggaggcaccgacgcctgatgcaccctcgaattccctggtgcagatgatctgcgactgattggtctatgggtttacagcactccgttctttttatttggctgcgcgtcatcttcgggactggtcatatgaaccgattggcatcaaagaatgatggtggtactgcaacagattgggaccttcctactaatgagataatcagcttgaggaaaaggataaagaacatagaatatattgtcagtgagacaaataaatcacctctgtcgaaacatagtagcagcagcacaaagaatgaaattgatgacaaggaaagcagcagcaccaagaacagcggcaatgtaaggagcaccaaacagaaggaaattgactacgtatacagaagcattgaaaagaaagttaaagttttcggtcgagacaaggtccatgaagatataaggtgcttcataatggaccggctaccgatgcaccaagctccgactccagtaaaccttattctgtgattggcatatatggaattacaggttctgggaagactactctggcacaatatgtttgtgagtatgagaagggtgaggtttcaatcctatcatgttcatccatgtgggaactacattcagtgccggtgaaatattttgtgatatgctggaccagatcacgcaacagcggccctctgatgccaacggtcctaaaagcctaaaaacagagttaaaagatctaacactacagcaaacgccaaaatatacagctactcttgttgactgtccaaattcaaaatacacagcttataagcaaggctgtatatgtttgctactaactcatacctataggcagctaagaccggtgttatgccaagtgacattgaagtgtacatagctgaccataagggaccagacccttccaaacctgaggagttgtgcagtcaggcttgcacagatcggctggcagaatatggtcaagaaatggtgaggcgccatgaaaaggactacgaccggagaaaagcaccaatcgatcccatggtggtgtatgctactggaggcagaaagagtcatgggcggtactccatgtttaatggagtgattgactccagagaggttagatctcagaggtcggggtcttcctccgaacgatcaggggctagaactcatcgccaatcagagcatgagttggaggttgcaagggtgcaagaggagataaggcaacgtgatgcattccaaaggcacaacatgagtactttgcctcattcttggcgcagcagcagaccgtgcttcaagcaactttccaacagcaggggataaacgtagtccttccacaatttcaacctccaccactgccaccaatatggggatcgggtacccaataccttctgcaagtcaaggatcggcggcacaagggccccagatttaccatactccacctgcatagatactagcacctggagaccagttctacggccgatgctggaactacatttgtaaatgcaatcttcggtccaccctctggaggcagcggccaaaactccaatcatctgagaggtggcttgtcacactcggatttaagggcaaactcgggcgcatctcaaatgtgtgctaggatcaagtctcacacatatgatggctcatggtacagaaatcaatgtcatatctttattaaataatcggagtttttttacaaaataactaaatacaatacaccatatggcgacgagatcctccaccaacaaagttgactgggagacgacggcatagatctctccgaactcatcgtaacatccttcatgctctttatcttgcagtacctgtctttgacctggtgtgattatagcaagggtgagctcccatacggtcatcgctcagcaagtgtgggaaataatgtgtatgagctcacttacggtgggagctcatgtgtagtgtaaggctgatcaacaaataatggttaaggctgagcattgcttttaataagttggtcaaaattttattagca

SEQ ID NO: 57339 - DNA, 5389 bp, Zea Mays
gtgagattgtcctcttgtcgagatcctcacgtcccggtcctcaccaccggtggcgacggggtgtgacagttggtaccagagacggtgtatcctcggcgtggggggcgacggacggccaccagctcttctctgcgctagctatcggggtggcgacgacgattgttggcgcgtcgacggcggatccagcggtccggcgtggtgacctcattgatccggcgcgacctacctccttcagctaacggtggcgctccagcggcccttggctcgagttccgttttgttccgcgatggcttccctttcccccggcaactccttcatcgaggcggtgtcgacggcggtggttgcggcggatttggcggtgctgggctgacgggaggtctcgatttggcggtgctggtggcggcgactccatcaagttgcctgtgtgctccctcaactttcttcctcagatccccttcggcaggcggcgtgcccacgacgccactgtttgggatatctggtgacgagtgctctcagtcacggcactggtgacgggttccctttctctgagactccaaccactggcggcaacacgggatttggtgcgtgtgtgcggcagctacgggagattgtggagctcgagtggctctgcatcccgctcgtagcgctcagatcgtgattggctgctttcatcctctacaatcactagttgagcagattttgggtgagcgcggtgttaatttgttgatgctaaggcaagccagtaacctggcacacaacatgttcgatgatatgtcatttacagaggtggtctgggatgatgaaggggcactattcgatgaaatgcattgcacggatgtcatctgggatgaggagacacatcatggctttgactcacatggcctattgcagcaccatgctgaagcaatggataaccagatgcagggcaaggagaaattggctcaaagtggagattactatgatgagaggaaagtcaatattgaaccagacatcaacaacttgctcattcatgtcaatgaccatttctctatgttggtgattggtgcggattctaggcgaagtgatgttgtgtgggacgaggacatgttatctgacctcgatactcatggtggcttattacagttactggcatgttgtaaagatgatgagctcaaccaggacagagacactccttttctcttgggccttggtatggatcaggtggatgagatgctggccagcccgtccagccttggcatgaatgaggacttgccatctgtacctgagacacatggctcgttattgcagcaagtggcatgggacaggaagcactttgcttatgaaatgtgcacgcttattgctgagatggtcctggaagatgttctcaccgatgttggcaacctcgctttcagcattgattcaagcatgcagatcagtgatcaaccttccaaatatgcgctagtcatcgatgcttatctgctgaagacgcagtacaaaaaaccatacatttctataagccaatgggatccaggaatttggtgcaaaggtactatggcccatgagcagcaacagcttgagatatataggatgtttgagaaacaatgggattcagttatccttaaatggttcaggaatccttttgtgctgctgcaatcatgcaatggggaggatctgaatgaacaaggcacagtgcctgtaaatgacattttcgatgtattggctgctggccaggagttgaattttggcaacgtcaccttgatcatttatgggggatgccaaggagcaatgggtctgcaggttctttttgcagaattacacccttggcaccacaatgtctttacctccatagaattagcaatacagtcatggagaatcaatggtttcagtccaggaagctgcaagctcaacagacaatctatacttgttgctactaacttgcagttcaattataaagcttccaagtttgtatcctttactgatacttatcagatatacaagaacacatgcatttgtatcggagaattggaacctgctagttggagagatacttgttggctacctgagatctcacatgccaatgtgtccacacttgctagtgaggaaatagataacatgcttttccaggttggtgattttcatccaggagagagtgagcagcttgagctttacatgataacattgatacagtgggatctaggtccagtagaattttacaaatcaaactgtaggtgccctgctgcagaactgatagggtggtgctgattctagtttgttcatacaatctgtttatgttatgctgaaagctagtttcttctttatcatgaggtactacttggcccaacagtcatggaatttctgggatctttagtcaccaagatacaattcatggtcatgcggttgtttggggacaagcaaccatttgtgggggtggaaaggatatatggcaacacaggttaaagtcgtgttttaaaatggaaatgcatgctacagtcctgggtgtcaatgatgtattgcagcatatcagtgcttgttctctattcctgcagcttggtcgcagaaaactatatagggtggtgatgacttctgttctaaggcccagagatttgctgctgaagagctatacaacattcttgaccaagtcgatgaactattgttgcttcctgaccaaaagctcgggagaccatggtgtgacactgatctaatatgtgaaccgattctgtcttggagactcaatggtggcagcccaagcaaatgtttgttgcaactcaagacatacatagtcagacagtgggatccaggaatttctgggatctttagtcatcgagatacaattcaaggtcatgcggttgcttggggacaagcaacattttgtgagggtggaaatgtaacatccatgaatagcaacatgtccagggctttagctgacaagcgggccacccacccatgggacccaggtggaagaccagatgctgggtataagttccaagagtctctattggcgattggatcacctactggaagcgtagctcgttcgggcaaaagctgttgcagtgcgcgcgcccagaaccagtatcagaagctcagggaccttggagagaagctgcagaagtgcgctcaggatctggatctgaagttttgggaccttgtagctaagctacagcagtgcgcccagaacctgaatcacatgttctgggactttcaagctaagttcttgcagtgcacccaaagcctgccactgtatatccatcagggagcagctgggcaaccaccaatgcggcaatgcctgattcacccgccgcaagatccactgcagaattcagggatgacattgaacaaggaccatcgacgcctgatgatgcaccctcgaatccaccgtcgcctaatgccctcccgaatgctgctggctccaccactggcaatcaacacggatcagctgaggaggcaccgacgcctgatgcaccctcgaattccctggtgcagatgatctgcgactgattggtctatgggtttacagcactccgttctttttatttggctgcgcgtcatcttcgggactggtcatatgaaccgattggcatcaaagaatgatggtggtactgcaacagattgggaccttcctactaatgagataatcagcttgaggaaaaggataaagaacatagaatatattgtcagtgagacaaataaatcacctctgtcgaaacatagtagcagcagcacaaagaatgaaattgatgacaaggaaagcagcagcaccaagaacagcggcaatgtaaggagcaccaaacagaaggaaattgactacgtatacagaagcattgaaaagaaagttaaagttttcggtcgagacaaggtccatgaagatataaggtgcttcataatggaccggctaccgatgcaccaagctccgactccagtaaaccttattctgtgattggcatatatggaattacaggttctgggaagactactctggcacaatatgtttgtgagtatgagaagggtgaggtttcaatcctatcatgttcatccatgtgggaactacattcagtgccggtgaaatattttgtgatatgctggaccagatcacgcaacagcggccctctgatgccaacggtcctaaaagcctaaaaacagagttaaaagatctaacactacagcaaacgccaaaatatacagctactcttgttgactgtccaaattcaaaatacacagcttataagcaaggctgtatatgtttgctactaactcatacctataggcagctaagaccggtgttatgccaagtgacattgaagtgtacatagctgaccataagggaccagacccttccaaacctgaggagttgtgcagtcaggcttgcacagatcggctgaatatggtcaagaaatggtgaggcgccatgaaaaggactacgaccggagaaaagcaccaatcgatcccatggtggtgtatgctactggaggcagaaagagtcatgggcggtactccatgtttaatggagtgattgactccagagaggttagatctcagaggtcggggtcttcctccgaacgatcaggggctagaactcatcgccaatcagagcatgagttggaggttgcaagggtgcaagaggagataaggcaacgtgatgcattccaaaggcacaacatgagtactttgcctcattcttggcgcagcagcagaccgtgcttcaagcaactttccaacagcaggggataaacgtagtccttccacaatttcaacctccaccactgccaccaatatggggatcgggtacccaataccttctgcaagtcaaggatcggcggcacaagggccccagatttaccatactccacctgcatagatactagcacctggagaccagttctacggccgatgctggaactacatttgtaaatgcaatcttcggtccaccctctggaggcagcggccaaaactccaatcatctgagaggtggcttgtcacactcggatttaagggcaaactcgggcgcatctcaaatgtgtgctaggatcaagtctcacacatatgatggctcatggtacagaaatcaatgtcatatctttattaaataatcggagtttttttacaaaataactaaatacaatacaccatatggcgacgagatcctccaccaacaaagttgactgggagacgacggcatagatctctccgaactcatcgtaacatccttcatgctctttatcttgcagtacctgtctttgacctggtgtgattatagcaagggtgagctcccatacggtcatcgctcagcaagtgtgggaaataatgtgtatgagctcacttacggtgggagctcatgtgtagtgtaaggctgatcaacaaataatggttaaggctgagcattgcttttaataagttggtcaaaattttattagca

SEQ ID NO: 57340 - DNA, 5151 bp, Zea Mays
ccttcatcgaggcggtgtcgacggcggtggttgcggcggatttggcggtgctgggctgacgggaggtctcgatttggcggtgctggtggcggcgactccatcaagttgcctgtgtgctccctcaactttcttcctcagatccccttcggcaggcggcgtgcccacgacgccactgtttgggatatctggtgacgagtgctctcagtcacggcactggtgacgggttccctttctctgagactccaaccactggcggcaacacgggatttggtgcgtgtgtgcggcagctacgggagattgtggagctcgagtggctctgcatcccgctcgtagcgctcagatcgtgattggctgctttcatcctctacaatcactagttgagcagattttgggtgagcgcggtgttaatttgttgatgctaaggcaagccagtaacctggcacacaacatgttcgatgatatgtcatttacagaggtggtctgggatgatgaaggggcactattcgatgaaatgcattgcacggatgtcatctgggatgaggagacacatcatggctttgactcacatggcctattgcagcaccatgctgaagcaatggataaccagatgcagggcaaggagaaattggctcaaagtggagattactatgatgagaggaaagtcaatattgaaccagacatcaacaacttgctcattcatgtcaatgaccatttctctatgttggtgattggtgcggattctaggcgaagtgatgttgtgtgggacgaggacatgttatctgacctcgatactcatggtggcttattacagttactggcatgttgtaaagatgatgagctcaaccaggacagagacactccttttctcttgggccttggtatggatcaggtggatgagatgctggccagcccgtccagccttggcatgaatgaggacttgccatctgtacctgagacacatggctcgttattgcagcaagtggcatgggacaggaagcactttgcttatgaaatgtgcacgcttattgctgagatggtcctggaagatgttctcaccgatgttggcaacctcgctttcagcattgattcaagcatgcagatcagtgatcaaccttccaaatatgcgctagtcatcgatgcttatctgctgaagacgcagtacaaaaaaccatacatttctataagccaatgggatccaggaatttggtgcaaaggtactatggcccatgagcagcaacagcttgagatatataggatgtttgagaaacaatgggattcagttatccttaaatggttcaggaatccttttgtgctgctgcaatcatgcaatggggaggatctgaatgaacaaggcacagtgcctgtaaatgacattttcgatgtattggctgctggccaggagttgaattttggcaacgtcaccttgatcatttatgggggatgccaaggagcaatgggtctgcaggttctttttgcagaattacacccttggcaccacaatgtctttacctccatagaattagcaatacagtcatggagaatcaatggtttcagtccaggaagctgcaagctcaacagacaatctatacttgttgctactaacttgcagttcaattataaagcttccaagtttgtatcctttactgatacttatcagatatacaagaacacatgcatttgtatcggagaattggaacctgctagttggagagatacttgttggctacctgagatctcacatgccaatgtgtccacacttgctagtgaggaaatagataacatgcttttccaggttggtgattttcatccaggagagagtgagcagcttgagctttacatgataacattgatacagtgggatctaggtccagtagaattttacaaatcaaactgtaggtgccctgctgcagaactgatagggtggtgctgattctagtttgttcatacaatctgtttatgttatgctgaaagctagtttcttctttatcatgaggtactacttggcccaacagtcatggaatttctgggatctttagtcaccaagatacaattcatggtcatgcggttgtttggggacaagcaaccatttgtgggggtggaaaggatatatggcaacacaggttaaagtcgtgttttaaaatggaaatgcatgctacagtcctgggtgtcaatgatgtattgcagcatatcagtgcttgttctctattcctgcagcttggtcgcagaaaactatatagggtggtgatgacttctgttctaaggcccagagatttgctgctgaagagctatacaacattcttgaccaagtcgatgaactattgttgcttcctgaccaaaagctcgggagaccatggtgtgacactgatctaatatgtgaaccgattctgtcttggagactcaatggtggcagcccaagcaaatgtttgttgcaactcaagacatacatagtcagacagtgggatccaggaatttctgggatctttagtcatcgagatacaattcaaggtcatgcggttgcttggggacaagcaacattttgtgagggtggaaatgtaacatccatgaatagcaacatgtccagggctttagctgacaagcgggccacccacccatgggacccaggtggaagaccagatgctgggtataagttccaagagtctctattggcgattggatcacctactggaagcgtagctcgttcgggcaaaagctgttgcagtgcgcgcgcccagaaccagtatcagaagctcagggaccttggagagaagctgcagaagtgcgctcaggatctggatctgaagttttgggaccttgtagctaagctacagcagtgcgcccagaacctgaatcacatgttctgggactttcaagctaagttcttgcagtgcacccaaagcctgccactgtatatccatcagggagcagctgggcaaccaccaatgcggcaatgcctgattcacccgccgcaagatccactgcagaattcagggatgacattgaacaaggaccatcgacgcctgatgatgcaccctcgaatccaccgtcgcctaatgccctcccgaatgctgctggctccaccactggcaatcaacacggatcagctgaggaggcaccgacgcctgatgcaccctcgaattccctggtgcagatgatctgcgactgattggtctatgggtttacagcactccgttctttttatttggctgcgcgtcatcttcgggactggtcatatgaaccgattggcatcaaagattgggaccttcctactaatgagataatcagcttgaggaaaaggataaagaacatagaatatattgtcagtgagacaaataaatcacctctgtcgaaacatagtagcagcagcacaaagaatgaaattgatgacaaggaaagcagcagcaccaagaacagcggcaatgtaaggagcaccaaacagaaggaaattgactacgtatacagaagcattgaaaagaaagttaaagttttcggtcgagacaaggtccatgaagatataaggtgcttcataatggaccggctaccgatgcaccaagctccgactccagtaaaccttattctgtgattggcatatatggaattacaggttctgggaagactactctggcacaatatgtttgtgagtatgagaagggtgaggtttcaatcctatcatgttcatccatgtgggaactacattcagtgccggtgaaatattttgtgatatgctggaccagatcacgcaacagcggccctctgatgccaacggtcctaaaagcctaaaaacagagttaaaagatctaacactacagcaaacgccaaaatatacagctactcttgttgactgtccaaattcaaaatacacagcttataagcaaggctgtatatgtttgctactaactcatacctataggcagctaagaccggtgttatgccaagtgacattgaagtgtacatagctgaccataagggaccagacccttccaaacctgaggagttgtgcagtcaggcttgcacagatcggctggcagaatatggtcaagaaatggtgaggcgccatgaaaaggactacgaccggagaaaagcaccaatcgatcccatggtggtgtatgctactggaggcagaaagagtcatgggcggtactccatgtttaatggagtgattgactccagagaggttagatctcagaggtcggggtcttcctccgaacgatcaggggctagaactcatcgccaatcagagcatgagttggaggttgcaagggtgcaagaggagataaggcaacgtgatgcattccaaaggcacaacatgagtactttgcctcattcttggcgcagcagcagaccgtgcttcaagcaactttccaacagcaggggataaacgtagtccttccacaatttcaacctccaccactgccaccaatatggggatcgggtacccaataccttctgcaagtcaaggatcggcggcacaagggccccagatttaccatactccacctgcatagatactagcacctggagaccagttctgttaagttctcgttatattcctgacaattcttactcatattttcatctcaatgactaatttttcactaattccatatttttctgcatttagacggccgatgctggaactacatttgtaaatgcaatcttcggtccaccctctggaggcagcggccaaaactccaatcatctgagaggtggcttgtcacactcggatttaagggcaaactcgggcgcatctcaaatgtgtgctaggatcaagtctcacacatatgatggctcatggtacagaaatcaatgtcatatctttattaaataatcggagtttttttacaaaataactaaatacaatacaccatatggcgacgagatcctccaccaacaaagttgactgggagacgacggcatagatctctccgaactcatcgtaacatccttcatgctctttatcttgcagtacctgtctttgacctggtgtgattatagcaagggtgagctcccatacggtcatcgctcagcaagtgtgggaaataatgtgtatgagctcacttacggtgggagctcatgtgtagtgtaaggctgatcaacaaataatggttaaggctgagcattgcttttaataagttggtcaaaattttattagca

SEQ ID NO: 57341 - DNA, 1466 bp, Zea Mays
cagcggtagagcctaccgtctgtaaccggaaggtcccgggttcgaaccccagcctctgcatattatgcgggtaaggcttggcgcttaaagatacccttccccagaccccgcacagtgcgggaagcctacggcactgggtacaaatgtagataatttagatttttgttttcaataatagcaggttggaaaatttagatttaaattacgtgggttctttttgtgccttgtgttagtctttcctataacaatgatggaagtgagtacattaaaatcatatatagaagtaccttaagattttatccataatggcagatgtagtgatgtataatgatggtggtactgcaacagattgggaccttcctactaatgagataatcagcttgaggaaaaggataaagaacatagaatatattgtcagtgagacaaataaatcacctctgtcgaaacatagtagcagcagcacaaagaatgaaattgatgacaaggaaagcagcagcaccaagaacagcggcaatgtaaggagcaccaaacagaaggaaattgactacgtatacagaagcattgaaaagaaagttaaagttttcggtcgagacaaggtccatgaagatataaggtgcttcataatggaccggctaccgatgcaccaagctccgactccagtaaaccttattctgtgattggcatatatggaattacaggttctgggaagactactctggcacaatatgtttgtgagtatgagaagggtgaggtttcaatcctatcatgttcatccatgtgggaactacattcagtgccggtgaaatattttgtgatatgctggaccagatcacgcaacagcggccctctgatgccaacggtcctaaaagcctaaaaacagagttaaaagatctaacactacagcaaacgccaaaatatacagctactcttgttgactgtccaaattcaaaatacacagcttataagcaaggctgtatatgtttgctactaactcatacctataggcagctaagaccggtgttatgccaagtgacattgaagtgtacatagctgaccataagggaccagacccttccaaacctgaggagttgtgcagtcaggcttgcacagatcggctggcagaatatggtcaagaaatggtgaggcgccatgaaaaggactacgaccggagaaaagcaccaatcgatcccatggtggtgtatgctactggaggcagaaagagtcatgggcggtactccatgtttaatggagtgattgactccagagaggttagatctcagaggtcggggtcttcctccgaacgatcaggggctagaactcatcgccaatcagagcatgagttggaggttgcaagggtgcaagaggagataaggcaacgtgatgcattccaaaggcacaacatgagtactttgcctcattcttggcgcagcagcagaccgtgcttcaagaatactcaggacatttga

SEQ ID NO: 57342 - DNA, 2244 bp, Zea Mays
cagcggtagagcctaccgtctgtaaccggaaggtcccgggttcgaaccccagcctctgcatattatgcgggtaaggcttggcgcttaaagatacccttccccagaccccgcacagtgcgggaagcctacggcactgggtacaaatgtagataatttagatttttgttttcaataatagcaggttggaaaatttagatttaaattacgtgggttctttttgtgccttgtgttagtctttcctataacaatgatggaagtgagtacattaaaatcatatatagaagtaccttaagattttatccataatggcagatgtagtgatgtataatgatggtggtactgcaacagattgggaccttcctactaatgagataatcagcttgaggaaaaggataaagaacatagaatatattgtcagtgagacaaataaatcacctctgtcgaaacatagtagcagcagcacaaagaatgaaattgatgacaaggaaagcagcagcaccaagaacagcggcaatgtaaggagcaccaaacagaaggaaattgactacgtatacagaagcattgaaaagaaagttaaagttttcggtcgagacaaggtccatgaagatataaggtgcttcataatggaccggctaccgatgcaccaagctccgactccagtaaaccttattctgtgattggcatatatggaattacaggttctgggaagactactctggcacaatatgtttgtgagtatgagaagggtgaggtttcaatcctatcatgttcatccatgtgggaactacattcagtgccggtgaaatattttgtgatatgctggaccagatcacgcaacagcggccctctgatgccaacggtcctaaaagcctaaaaacagagttaaaagatctaacactacagcaaacgccaaaatatacagctactcttgttgactgtccaaattcaaaatacacagcttataagcaaggctgtatatgtttgctactaactcatacctataggcagctaagaccggtgttatgccaagtgacattgaagtgtacatagctgaccataagggaccagacccttccaaacctgaggagttgtgcagtcaggcttgcacagatcggctgaatatggtcaagaaatggtgaggcgccatgaaaaggactacgaccggagaaaagcaccaatcgatcccatggtggtgtatgctactggaggcagaaagagtcatgggcggtactccatgtttaatggagtgattgactccagagaggttagatctcagaggtcggggtcttcctccgaacgatcaggggctagaactcatcgccaatcagagcatgagttggaggttgcaagggtgcaagaggagataaggcaacgtgatgcattccaaaggcacaacatgagtactttgcctcattcttggcgcagcagcagaccgtgcttcaagcaactttccaacagcaggggataaacgtagtccttccacaatttcaacctccaccactgccaccaatatggggatcgggtacccaataccttctgcaagtcaaggatcggcggcacaagggccccagatttaccatactccacctgcatagatactagcacctggagaccagttctgttaagttctcgttatattcctgacaattcttactcatattttcatctcaatgactaatttttcactaattccatatttttctgcatttagacggccgatgctggaactacatttgtaaatgcaatcttcggtccaccctctggaggcagcggccaaaactccaatcatctgagaggtggcttgtcacactcggatttaagggcaaactcgggcgcatctcaaatgtgtgctaggatcaagtctcacacatatgatggctcatggtacagaaatcaatgtcatatctttattaaataatcggagtttttttacaaaataactaaatacaatacaccatatggcgacgagatcctccaccaacaaagttgactgggagacgacggcatagatctctccgaactcatcgtaacatccttcatgctctttatcttgcagtacctgtctttgacctggtgtgattatagcaagggtgagctcccatacggtcatcgctcagcaagtgtgggaaataatgtgtatgagctcacttacggtgggagctcatgtgtagtgtaaggctgatcaacaaataatggttaaggctgagcattgcttttaataagttggtcaaaattttattagca

SEQ ID NO: 57343 - DNA, 2084 bp, Zea Mays
cagcggtagagcctaccgtctgtaaccggaaggtcccgggttcgaaccccagcctctgcatattatgcgggtaaggcttggcgcttaaagatacccttccccagaccccgcacagtgcgggaagcctacggcactgggtacaaatgtagataatttagatttttgttttcaataatagcaggttggaaaatttagatttaaattacgtgggttctttttgtgccttgtgttagtctttcctataacaatgatggaagtgagtacattaaaatcatatatagaagtaccttaagattttatccataatggcagatgtagtgatgtataatgatggtggtactgcaacagattgggaccttcctactaatgagataatcagcttgaggaaaaggataaagaacatagaatatattgtcagtgagacaaataaatcacctctgtcgaaacatagtagcagcagcacaaagaatgaaattgatgacaaggaaagcagcagcaccaagaacagcggcaatgtaaggagcaccaaacagaaggaaattgactacgtatacagaagcattgaaaagaaagttaaagttttcggtcgagacaaggtccatgaagatataaggtgcttcataatggaccggctaccgatgcaccaagctccgactccagtaaaccttattctgtgattggcatatatggaattacaggttctgggaagactactctggcacaatatgtttgtgagtatgagaagggtgaggtttcaatcctatcatgttcatccatgtgggaactacattcagtgccggtgaaatattttgtgatatgctggaccagatcacgcaacagcggccctctgatgccaacggtcctaaaagcctaaaaacagagttaaaagatctaacactacagcaaacgccaaaatatacagctactcttgttgactgtccaaattcaaaatacacagcttataagcaaggctgtatatgtttgctactaactcatacctataggcagctaagaccggtgttatgccaagtgacattgaagtgtacatagctgaccataagggaccagacccttccaaacctgaggagttgtgcagtcaggcttgcacagatcggctggcagaatatggtcaagaaatggtgaggcgccatgaaaaggactacgaccggagaaaagcaccaatcgatcccatggtggtgtatgctactggaggcagaaagagtcatgggcggtactccatgtttaatggagtgattgactccagagaggttagatctcagaggtcggggtcttcctccgaacgatcaggggctagaactcatcgccaatcagagcatgagttggaggttgcaagggtgcaagaggagataaggcaacgtgatgcattccaaaggcacaacatgagtactttgcctcattcttggcgcagcagcagaccgtgcttcaagcaactttccaacagcaggggataaacgtagtccttccacaatttcaacctccaccactgccaccaatatggggatcgggtacccaataccttctgcaagtcaaacggccgatgctggaactacatttgtaaatgcaatcttcggtccaccctctggaggcagcggccaaaactccaatcatctgagaggtggcttgtcacactcggatttaagggcaaactcgggcgcatctcaaatgtgtgctaggatcaagtctcacacatatgatggctcatggtacagaaatcaatgtcatatctttattaaataatcggagtttttttacaaaataactaaatacaatacaccatatggcgacgagatcctccaccaacaaagttgactgggagacgacggcatagatctctccgaactcatcgtaacatccttcatgctctttatcttgcagtacctgtctttgacctggtgtgattatagcaagggtgagctcccatacggtcatcgctcagcaagtgtgggaaataatgtgtatgagctcacttacggtgggagctcatgtgtagtgtaaggctgatcaacaaataatggttaaggctgagcattgcttttaataagttggtcaaaattttattagca

SEQ ID NO: 57344 - DNA, 1985 bp, Zea Mays
cagcggtagagcctaccgtctgtaaccggaaggtcccgggttcgaaccccagcctctgcatattatgcgggtaaggcttggcgcttaaagatacccttccccagaccccgcacagtgcgggaagcctacggcactgggtacaaatgtagataatttagatttttgttttcaataatagcaggttggaaaatttagatttaaattacgtgggttctttttgtgccttgtgttagtctttcctataacaatgatggaagtgagtacattaaaatcatatatagaagtaccttaagattttatccataatggcagatgtagtgatgtataatgatggtggtactgcaacagattgggaccttcctactaatgagataatcagcttgaggaaaaggataaagaacatagaatatattgtcagtgagacaaataaatcacctctgtcgaaacatagtagcagcagcacaaagaatgaaattgatgacaaggaaagcagcagcaccaagaacagcggcaatgtaaggagcaccaaacagaaggaaattgactacgtatacagaagcattgaaaagaaagttaaagttttcggtcgagacaaggtccatgaagatataaggtgcttcataatggaccggctaccgatgcaccaagctccgactccagtaaaccttattctgtgattggcatatatggaattacaggttctgggaagactactctggcacaatatgtttgtgagtatgagaagggtgaggtttcaatcctatcatgttcatccatgtgggaactacattcagtgccggtgaaatattttgtgatatgctggaccagatcacgcaacagcggccctctgatgccaacggtcctaaaagcctaaaaacagagttaaaagatctaacactacagcaaacgccaaaatatacagctactcttgttgactgtccaaattcaaaatacacagcttataagcaaggctgtatatgtttgctactaactcatacctataggcagctaagaccggtgttatgccaagtgacattgaagtgtacatagctgaccataagggaccagacccttccaaacctgaggagttgtgcagtcaggcttgcacagatcggctggcagaatatggtcaagaaatggtgaggcgccatgaaaaggactacgaccggagaaaagcaccaatcgatcccatggtggtgtatgctactggaggcagaaagagtcatgggcggtactccatgtttaatggagtgattgactccagagaggttagatctcagaggtcggggtcttcctccgaacgatcaggggctagaactcatcgccaatcagagcatgagttggaggttgcaagggtgcaagaggagataaggcaacgtgatgcattccaaaggcacaacatgagtactttgcctcattcttggcgcagcagcagaccgtgcttcaagcaactttccaacagcaggggataaacgtagtccttccacaatttcaacctccaccactgccaccaatatggggatcgggtacccaataccttctgcaagtcaaggatcggcggcacaagggccccagatttaccatactccacctgcatagatactagcacctggagaccagttctacggccgatgctggaactacatttgtaaatgcaatcttcggtccaccctctggaggcagcggccaaaactccaatcatctgagaggtggcttgtcacactcggatttaagggcaaactcgggcgcatctcaaatgtgtgctaggatcaagtctcacacatatgatggctcatgtacctgtctttgacctggtgtgattatagcaagggtgagctcccatacggtcatcgctcagcaagtgtgggaaataatgtgtatgagctcacttacggtgggagctcatgtgtagtgtaaggctgatcaacaaataatggttaaggctgagcattgcttttaataagttggtcaaaattttattagca

SEQ ID NO: 57345 - DNA, 398 bp, Zea Mays
tagatcctgagcgcgatgtcgcccgagacgcgtaggggtagagagaagaggacgacgctgctgctcgttactgttggaaagggctgctgcatatggataggagcatcatgaactaatggtgaacatcatttgcaaattttacttgaccaaggatcattctatacaacggaggaagatcacgagaagtaaaagtgttgtctaagatgtacattctttggctgtggagtctgtagactatacatatacacccattgttctggcgaggctgtgtacactgtacatcaaatgaattttacgatacttcttgttgcgttttacgctacaattatctcaaatcacttgttgtattgtacactacattttttgcctcgcatggaaacttaactactggatccgta

SEQ ID NO: 57346 - DNA, 388 bp, Zea Mays
ctgagcgcgatgtcgcccgagacgcgggtagagagaagaggacgacgctgctgctcgttactgttggaaagggctgctgcatatggataggagcatcatgaactaatggtgaacatcatttgcaaattttacttgaccaaggatcattctatacaacggaggaagatcacgagaagtaaaagtgttgtctaagatgtacattctttggctgtggagtctgtagactatacatatacacccattgttctggcgaggctgtgtacactgtacatcaaatgaattttacgatacttcttgttgcgttttacgctacaattatctcaaatcacttgttgtattgtacactacattttttgcctcgcatggaaacttaactactggatccgta

SEQ ID NO: 57347 - DNA, 391 bp, Zea Mays
gtgagaagagcccctgtttctctagtaggggtagagagaagaggacgacgctgctgctcgttactgttggaaagggctgctgcatatggataggagcatcatgaactaatggtgaacatcatttgcaaattttacttgaccaaggatcattctatacaacggaggaagatcacgagaagtaaaagtgttgtctaagatgtacattctttggctgtggagtctgtagactatacatatacacccattgttctggcgaggctgtgtacactgtacatcaaatgaattttacgatacttcttgttgcgttttacgctacaattatctcaaatcacttgttgtattgtacactacattttttgcctcgcatggaaacttaactactggatccgta

SEQ ID NO: 57348 - DNA, 2253 bp, Zea Mays
ctcaaccgtaaaccctaatcgtatccagccacggagccaccattccccttcaacaacaggtagccaccccctcgcccaccacatcttcaccgcaatccacgattgagtcggacgcactctgccatgacgaaacgggagaggaaggatccaggtcgcatgacaagcttgggatccctgaccaagcagccgaatctatcatgggttccgcccgggtatagaggattctgcaaagcaaagaagtgcaattggaggatccatgcatcacaattgcctgatggtaaaacttggcaggtaaagaagatgtcaaagaggcactactgcaggagcagaagcaagatggagaagaattgcatggccaatcagtattgggttagagacaaggtagtgccgatgcttagggaaaatcctaacctaggtgctggagctctggtgaaaaagctacaagagaaatatctcatccaggtttcatattgtgttgcatggaaaggaaaggagctagcacttgatgagctgatgggcaaatgggaagacagctttgaccatatctatgctttcaaggctgcaatagagaaggagtctcctggtagtgtagtggagatacaaacagagaaggttggggaaaagatcagattctgcaaaatgtttgttgcattcaaggcttgtattgatggttttttgcaagggtgcaggccctatttaggcattgactcaactgtgctcacaggtaggtggaaaggccaacttgcttctgcagttgcaatagatggccacaattggatgtttcctgtggcacttgggctgtttgaatctgaaagtaaggatagttggaaatggttcatggagaagttgcagacagctataggatcaccccatggtctagtaatatccacagatgcaggaaaaggcatagacagtgcattaaccaatgccttcaacaatggtgttgagcaccgagaatgtgtgagacatctatttaagaattttcagaaaaggtttcatggtgaagtgtttgaaagaaacctttggccagcagcaagagcatataggaggacagtccatgataagcactataatatcatgaaaatagcatcacctgcagccattaagtggttggaagacactcacaaacatttgtgggccagatgttatttttctacagcaagcaagtgtgactatgtaaccaataatattgctgaaacgtttaactgttggattaaagatgagaagtctttaccaccagtggagctaattgatagaatcaggcaaaagattttggagaagttttttgtgaggaagaaccttgcagataagttgactggcacaattttaccatctgtcatgaaacaacttcatgatgctggcagaggtttggttggttatgtggttcacaagggtcctgatcatacagctgaagtgtctggtgttcataaggatttgactccatggagacacactattgatctggtaaatagggagtgcagctgcaagaaatggcagctaactggtttgccttgcactcatgcattgagcgttataggttgtttcaggaacctgaaattggaagattatgttgactcctactactctgtggaaaaattcaagactgcttatgttgggaagatacctactttgacagataagactgagtgggagcaaccagaggtaggttacaaggtatggcctcccatactaaagagagctgctggtagccaaggacaagaaggttcattggagtagaatgagggtcggggaaaaagaggcacaaatgcaagagatgtggtcagtttggtcaccaaatgaggacatgtaatgaaccagtatatgactcagatgcaccaccaccaactgctccaaagcctaagagggtgagacagaagaaaaagaaggtggtggtggtagaagatgatcctctgtcattgcctgcaccatcaagtccagtgtagaagaaaaagaaccagaggggaaccaagagcaagtagtgttacttatgttactcattatactacgttctgtaatgtgccatgaagtggtactatgttctgttagtcatgtttcttatgtaagacatgtgcaatttgttttctgttgaacatgtgtaatgtgtcctctgttggacatgtgcaatatgtcattgaactacgttctataatatctaagtttcatggagtttcatctacttcgatcaactcaagtattgaacatgcttggattaccatttcaatcaaggtcagtcacaaaggtacacccattaca

SEQ ID NO: 57349 - DNA, 3162 bp, Zea Mays
ctcaaccgtaaaccctaatcgtatccagccacggagccaccattccccttcaacaacaggtagccaccccctcgcccaccacatcttcaccgcaatccacgattgagtcggacgcactctgccatgacgaaacgggagaggaaggatccaggtcgcatgacaagcttgggatccctgaccaagcagccgaatctatcatgggttccgcccggcatggaccgtagctccgcttgcagaatcgctattcgggttggtgcttattgggagcaacatagatacgagtaccacatttctagagatgttttgctgattcgggacagggatttgatttgttttatggatctggtagctgatttgcgagcagagattgccttagaaactgcgcgaaagctatcactccattattgggacaagattgaagctagatacaaggaggtagattgcgatgcaacattacttcatgccctttccatgtattgggagtttaggagactcaagctagctgctactgtgttggacgagccatgcattgaaagtcaacatagtgcagtaacatatacacaacagaatgagatgccaatttcccttgtttctaatgctaatgagaatgaggtagcagttccttccagctctattcatgtagaaaaagaacaatttgctgctgggacctctgatcaggttgcttctaacctgattcatgctgcgaactcagaaggtgctgctaacttagaaggtgctgctaactcagaaggtgctgctaactcagaaggtgttgctaactcagaggatgttgctaactcagagggaggtaatgcatggggacaatatgatgaagatgagtatgttggcgcagacgatgagaaggcaacctacaaggagctattttctgatatagaagagagtggatcagagtacatccctgactctgatgatgaagaccacgatgattgtgttgtagatgacaatggagatcctctgtttgtcacaacaactgacttagagaaccctaatattgcagtaggtgttagatttgaggatgggcctactttcaaaaaggctattaggcagtgggctatcttacatgaggttgaaattggggctcactatagtgaatcttctaggtatagaggattctgcaaagcaaagaagtgcaattggaggatccatgcatcacaattgcctgatggtaaaacttggcaggtaaagaagatgtcaaagaggcactactgcaggagcagaagcaagatggagaagaattgcatggccaatcagtattgggttagagacaaggtagtgccgatgcttagggaaaatcctaacctaggtgctggagctctggtgaaaaagctacaagagaaatatctcatccaggtttcatattgtgttgcatggaaaggaaaggagctagcacttgatgagctgatgggcaaatgggaagacagctttgaccatatctatgctttcaaggctgcaatagagaaggagtctcctggtagtgtagtggagatacaaacagagaaggttggggaaaagatcagattctgcaaaatgtttgttgcattcaaggcttgtattgatggttttttgcaagggtgcaggccctatttaggcattgactcaactgtgctcacaggtaggtggaaaggccaacttgcttctgcagttgcaatagatggccacaattggatgtttcctgtggcacttgggctgtttgaatctgaaagtaaggatagttggaaatggttcatggagaagttgcagacagctataggatcaccccatggtctagtaatatccacagatgcaggaaaaggcatagacagtgcattaaccaatgccttcaacaatggtgttgagcaccgagaatgtgtgagacatctatttaagaattttcagaaaaggtttcatggtgaagtgtttgaaagaaacctttggccagcagcaagagcatataggaggacagtccatgataagcactataatatcatgaaaatagcatcacctgcagccattaagtggttggaagacactcacaaacatttgtgggccagatgttatttttctacagcaagcaagtgtgactatgtaaccaataatattgctgaaacgtttaactgttggattaaagatgagaagtctttaccaccagtggagctaattgatagaatcaggcaaaagattttggagaagttttttgtgaggaagaaccttgcagataagttgactggcacaattttaccatctgtcatgaaacaacttcatgatgctggcagaggtttggttggttatgtggttcacaagggtcctgatcatacagctgaagtgtctggtgttcataaggatttgactccatggagacacactattgatctggtaaatagggagtgcagctgcaagaaatggcagctaactggtttgccttgcactcatgcattgagcgttataggttgtttcaggaacctgaaattggaagattatgttgactcctactactctgtggaaaaattcaagactgcttatgttgggaagatacctactttgacagataagactgagtgggagcaaccagaggtaggttacaaggtatggcctcccatactaaagagagctgctggtagccaaggacaagaaggttcattggagtagaatgagggtcggggaaaaagaggcacaaatgcaagagatgtggtcagtttggtcaccaaatgaggacatgtaatgaaccagtatatgactcagatgcaccaccaccaactgctccaaagcctaagagggtgagacagaagaaaaagaaggtggtggtggtagaagatgatcctctgtcattgcctgcaccatcaagtccagtgtagaagaaaaagaaccagaggggaaccaagagcaagtagtgttacttatgttactcattatactacgttctgtaatgtgccatgaagtggtactatgttctgttagtcatgtttcttatgtaagacatgtgcaatttgttttctgttgaacatgtgtaatgtgtcctctgttggacatgtgcaatatgtcattgaactacgttctataatatctaagtttcatggagtttcatctacttcgatcaactcaagtattgaacatgcttggattaccatttcaatcaaggtcagtcacaaaggtacacccattaca

SEQ ID NO: 57350 - DNA, 2218 bp, Zea Mays
cacggagccaccattccccttcaacaacaggtagccaccccctcgcccaccacatcttcaccgcaatccacgattgagtcggacgcactctgccatgacgaaacgggagaggaaggatccaggtcgcatgacaagcttgggatccctgaccaagcagccgaatctatcatgggttccgcccggaggattctgcaaagcaaagaagtgcaattggaggatccatgcatcacaattgcctgatggtaaaacttggcaggtaaagaagatgtcaaagaggcactactgcaggagcagaagcaagatggagaagaattgcatggccaatcagtattgggttagagacaaggtagtgccgatgcttagggaaaatcctaacctaggtgctggagctctggtgaaaaagctacaagagaaatatctcatccaggtttcatattgtgttgcatggaaaggaaaggagctagcacttgatgagctgatgggcaaatgggaagacagctttgaccatatctatgctttcaaggctgcaatagagaaggagtctcctggtagtgtagtggagatacaaacagagaaggttggggaaaagatcagattctgcaaaatgtttgttgcattcaaggcttgtattgatggttttttgcaagggtgcaggccctatttaggcattgactcaactgtgctcacaggtaggtggaaaggccaacttgcttctgcagttgcaatagatggccacaattggatgtttcctgtggcacttgggctgtttgaatctgaaagtaaggatagttggaaatggttcatggagaagttgcagacagctataggatcaccccatggtctagtaatatccacagatgcaggaaaaggcatagacagtgcattaaccaatgccttcaacaatggtgttgagcaccgagaatgtgtgagacatctatttaagaattttcagaaaaggtttcatggtgaagtgtttgaaagaaacctttggccagcagcaagagcatataggaggacagtccatgataagcactataatatcatgaaaatagcatcacctgcagccattaagtggttggaagacactcacaaacatttgtgggccagatgttatttttctacagcaagcaagtgtgactatgtaaccaataatattgctgaaacgtttaactgttggattaaagatgagaagtctttaccaccagtggagctaattgatagaatcaggcaaaagattttggagaagttttttgtgaggaagaaccttgcagataagttgactggcacaattttaccatctgtcatgaaacaacttcatgatgctggcagaggtttggttggttatgtggttcacaagggtcctgatcatacagctgaagtgtctggtgttcataaggatttgactccatggagacacactattgatctggtaaatagggagtgcagctgcaagaaatggcagctaactggtttgccttgcactcatgcattgagcgttataggttgtttcaggaacctgaaattggaagattatgttgactcctactactctgtggaaaaattcaagactgcttatgttgggaagatacctactttgacagataagactgagtgggagcaaccagaggtaggttacaaggtatggcctcccatactaaagagagctgctggtagccaaggacaagaaggttcattggagtagaatgagggtcggggaaaaagaggcacaaatgcaagagatgtggtcagtttggtcaccaaatgaggacatgtaatgaaccagtatatgactcagatgcaccaccaccaactgctccaaagcctaagagggtgagacagaagaaaaagaaggtggtggtggtagaagatgatcctctgtcattgcctgcaccatcaagtccagtgtagaagaaaaagaaccagaggggaaccaagagcaagtagtgttacttatgttactcattatactacgttctgtaatgtgccatgaagtggtactatgttctgttagtcatgtttcttatgtaagacatgtgcaatttgttttctgttgaacatgtgtaatgtgtcctctgttggacatgtgcaatatgtcattgaactacgttctataatatctaagtttcatggagtttcatctacttcgatcaactcaagtattgaacatgcttggattaccatttcaatcaaggtcagtcacaaaggtacacccattaca

SEQ ID NO: 57351 - DNA, 2143 bp, Zea Mays
cggagccaccattccccttcaacaacaggtagccaccccctcgcccaccacatcttcaccgcaatccacgattgagtcggacgcactctgccatgacgaaacgggagaggaaggatccaggtcgcatgacaagcttgggatccctgaccaagcagccgaatctatcatgggttccgcccgggtaaagaagatgtcaaagaggcactactgcaggagcagaagcaagatggagaagaattgcatggccaatcagtattgggttagagacaaggtagtgccgatgcttagggaaaatcctaacctaggtgctggagctctggtgaaaaagctacaagagaaatatctcatccaggtttcatattgtgttgcatggaaaggaaaggagctagcacttgatgagctgatgggcaaatgggaagacagctttgaccatatctatgctttcaaggctgcaatagagaaggagtctcctggtagtgtagtggagatacaaacagagaaggttggggaaaagatcagattctgcaaaatgtttgttgcattcaaggcttgtattgatggttttttgcaagggtgcaggccctatttaggcattgactcaactgtgctcacaggtaggtggaaaggccaacttgcttctgcagttgcaatagatggccacaattggatgtttcctgtggcacttgggctgtttgaatctgaaagtaaggatagttggaaatggttcatggagaagttgcagacagctataggatcaccccatggtctagtaatatccacagatgcaggaaaaggcatagacagtgcattaaccaatgccttcaacaatggtgttgagcaccgagaatgtgtgagacatctatttaagaattttcagaaaaggtttcatggtgaagtgtttgaaagaaacctttggccagcagcaagagcatataggaggacagtccatgataagcactataatatcatgaaaatagcatcacctgcagccattaagtggttggaagacactcacaaacatttgtgggccagatgttatttttctacagcaagcaagtgtgactatgtaaccaataatattgctgaaacgtttaactgttggattaaagatgagaagtctttaccaccagtggagctaattgatagaatcaggcaaaagattttggagaagttttttgtgaggaagaaccttgcagataagttgactggcacaattttaccatctgtcatgaaacaacttcatgatgctggcagaggtttggttggttatgtggttcacaagggtcctgatcatacagctgaagtgtctggtgttcataaggatttgactccatggagacacactattgatctggtaaatagggagtgcagctgcaagaaatggcagctaactggtttgccttgcactcatgcattgagcgttataggttgtttcaggaacctgaaattggaagattatgttgactcctactactctgtggaaaaattcaagactgcttatgttgggaagatacctactttgacagataagactgagtgggagcaaccagaggtaggttacaaggtatggcctcccatactaaagagagctgctggtagccaaggacaagaaggttcattggagtagaatgagggtcggggaaaaagaggcacaaatgcaagagatgtggtcagtttggtcaccaaatgaggacatgtaatgaaccagtatatgactcagatgcaccaccaccaactgctccaaagcctaagagggtgagacagaagaaaaagaaggtggtggtggtagaagatgatcctctgtcattgcctgcaccatcaagtccagtgtagaagaaaaagaaccagaggggaaccaagagcaagtagtgttacttatgttactcattatactacgttctgtaatgtgccatgaagtggtactatgttctgttagtcatgtttcttatgtaagacatgtgcaatttgttttctgttgaacatgtgtaatgtgtcctctgttggacatgtgcaatatgtcattgaactacgttctataatatctaagtttcatggagtttcatctacttcgatcaactcaagtattgaacatgcttggattaccatttcaatcaaggtcagtcacaaaggtacacccattaca

SEQ ID NO: 57352 - DNA, 2985 bp, Zea Mays
cattccccttcaacaacaggtagccaccccctcgcccaccacatcttcaccgcaatccacgattgagtcggacgcactctgccatgacgaaacgggagaggaaggatccaggtcgcatgacaagcttgggatccctgaccaagcagccgaatctatcatgggttccgcccggctgatttgcgagcagagattgccttagaaactgcgcgaaagctatcactccattattgggacaagattgaagctagatacaaggaggtagattgcgatgcaacattacttcatgccctttccatgtattgggagtttaggagactcaagctagctgctactgtgttggacgagccatgcattgaaagtcaacatagtgcagtaacatatacacaacagaatgagatgccaatttcccttgtttctaatgctaatgagaatgaggtagcagttccttccagctctattcatgtagaaaaagaacaatttgctgctgggacctctgatcaggttgcttctaacctgattcatgctgcgaactcagaaggtgctgctaacttagaaggtgctgctaactcagaaggtgctgctaactcagaaggtgttgctaactcagaggatgttgctaactcagagggaggtaatgcatggggacaatatgatgaagatgagtatgttggcgcagacgatgagaaggcaacctacaaggagctattttctgatatagaagagagtggatcagagtacatccctgactctgatgatgaagaccacgatgattgtgttgtagatgacaatggagatcctctgtttgtcacaacaactgacttagagaaccctaatattgcagtaggtgttagatttgaggatgggcctactttcaaaaaggctattaggcagtgggctatcttacatgaggttgaaattggggctcactatagtgaatcttctaggtatagaggattctgcaaagcaaagaagtgcaattggaggatccatgcatcacaattgcctgatggtaaaacttggcaggtaaagaagatgtcaaagaggcactactgcaggagcagaagcaagatggagaagaattgcatggccaatcagtattgggttagagacaaggtagtgccgatgcttagggaaaatcctaacctaggtgctggagctctggtgaaaaagctacaagagaaatatctcatccaggtttcatattgtgttgcatggaaaggaaaggagctagcacttgatgagctgatgggcaaatgggaagacagctttgaccatatctatgctttcaaggctgcaatagagaaggagtctcctggtagtgtagtggagatacaaacagagaaggttggggaaaagatcagattctgcaaaatgtttgttgcattcaaggcttgtattgatggttttttgcaagggtgcaggccctatttaggcattgactcaactgtgctcacaggtaggtggaaaggccaacttgcttctgcagttgcaatagatggccacaattggatgtttcctgtggcacttgggctgtttgaatctgaaagtaaggatagttggaaatggttcatggagaagttgcagacagctataggatcaccccatggtctagtaatatccacagatgcaggaaaaggcatagacagtgcattaaccaatgccttcaacaatggtgttgagcaccgagaatgtgtgagacatctatttaagaattttcagaaaaggtttcatggtgaagtgtttgaaagaaacctttggccagcagcaagagcatataggaggacagtccatgataagcactataatatcatgaaaatagcatcacctgcagccattaagtggttggaagacactcacaaacatttgtgggccagatgttatttttctacagcaagcaagtgtgactatgtaaccaataatattgctgaaacgtttaactgttggattaaagatgagaagtctttaccaccagtggagctaattgatagaatcaggcaaaagattttggagaagttttttgtgaggaagaaccttgcagataagttgactggcacaattttaccatctgtcatgaaacaacttcatgatgctggcagaggtttggttggttatgtggttcacaagggtcctgatcatacagctgaagtgtctggtgttcataaggatttgactccatggagacacactattgatctggtaaatagggagtgcagctgcaagaaatggcagctaactggtttgccttgcactcatgcattgagcgttataggttgtttcaggaacctgaaattggaagattatgttgactcctactactctgtggaaaaattcaagactgcttatgttgggaagatacctactttgacagataagactgagtgggagcaaccagaggtaggttacaaggtatggcctcccatactaaagagagctgctggtagccaaggacaagaaggttcattggagtagaatgagggtcggggaaaaagaggcacaaatgcaagagatgtggtcagtttggtcaccaaatgaggacatgtaatgaaccagtatatgactcagatgcaccaccaccaactgctccaaagcctaagagggtgagacagaagaaaaagaaggtggtggtggtagaagatgatcctctgtcattgcctgcaccatcaagtccagtgtagaagaaaaagaaccagaggggaaccaagagcaagtagtgttacttatgttactcattatactacgttctgtaatgtgccatgaagtggtactatgttctgttagtcatgtttcttatgtaagacatgtgcaatttgttttctgttgaacatgtgtaatgtgtcctctgttggacatgtgcaatatgtcattgaactacgttctataatatctaagtttcatggagtttcatctacttcgatcaactcaagtattgaacatgcttggattaccatttcaatcaaggtcagtcacaaaggtacacccattaca

SEQ ID NO: 57353 - DNA, 2431 bp, Zea Mays
ataaaatatttcttttagagtagaaatttagagttctgttagtgcggatagccttacgtcccgcgccaccagcacatccgacgcaatcagcgccccgccgggttggatcatccttcaatcatcccaaattttgcatgccccaatatggtcagtccgtccacaccccggcgttttcggcttgccaacagagcgcctgcactgcgcgctacatccccgaagcaacaacgccgcggtggatctggctccggccatggcaagcgtgaggcgcgggccaccggcatcagtcgggaaggagaaccagcggcccaagaaccttggccacgggaaggcgacgactgcgacgacgaccgccgagctgacgaagcccacggagccggagccagcgcccgtggggtagcgctaacgccacctccaccgccgctgaggctgtcgtcgctatagctccgcatggaggacgaggcggcggctgcgcaggcgcagacgcaggcgccgcccgtgttcgtcgtcaggcccaggagcagggagctgctcccgccgccgtcctccaactacgaggcgtgggatctctccgacagcgagtccgcaccggcctcctcctgggccacgctccccaacaggtacaccgtggcaccacgcagcgttggagcgcaaggtcaagcgagatcgcggcagccggggcgagcggcgtcggcgtcacgagccacgacgggccgagggatgcctgcgcgctatggccggggctattggcggtggccggcgatggattcggggtctagcggtgacccgattcgaggtgacgtcctagggactgccgccaacgctttgatttcttcctttcagcccaacccggcccaaagccgggagatcacggcactccgtccaaccctcgacgccaccgatccccctttccaccgcctctcatcctcgtcgccggtgaagatgattccgcagagccagagcagctccctgcagcaccttcaacacgtcgagaagcggatagtgcgggtgctggagcttgcgccataaatttgcatctcccagagttaatttatgcactctgtttccgaactaaatgatctgtccattctgcgtccttcagtacctggtacagagtttgaatgtgggagataataaactgaatgttgcaaaaacagtagaggaggtgccctgtgatgaagatagcagataaaggagttgatcttgttagaataaccgtccagggtaggaaggaagttgatgcctgcctctgagatcaagaatactctggttcagaagaagatgaagagcctcatcagtagaggaagatgcagaaaaataaatgctataggtaatggttatcgtaaggaggtactcactgagaaagttcctttccagaactcaacgttctgcgtccactaataaacatttaatgctccagaataacattaaaacacgagccacgggtgaaaccctcagggccctcgcactgatgcagtcagcgcgcactgccacgagttcatgatcgttatgaaggtaaccaacccactgcctgccctcatatcgtcaggctgtgggttcctgttgttaccagttatgcgccacaatcctcactaatcccatgctggagagacttttggaaaatcaacatctgttttagaatgctgtgtgcagaattttgctgtccaatgttactttgtttccatcaaattaactgtaaatatatgtatatgctctcaattggtttttatttgaagcagtatacatgccactaataattcatgataactcactgcttaattatgttttggttggagtaggaaattcaaatgattttgtgtgaggaaatcaaaagtgcttgtgaatatcgtccatttgaaaaatgtgattacagcgcaaggattgctaatgagatatgttgcaagaagctggagtatgtaattgagaagttggataccatgcaacagaaccttgaacagagcactgatgatgtttagcgagctggctacatattaatcgtctagggcgtggacgacttgccgaggcagattcaaaggggggtgcgtggtgctccatctgtgggattccccaaaggcccggcttcagctgcatcatgtacatagttcgtagggcatcttttgtaactatgaccgtcagcgccgcataggttgcaccgtttttttgtcttgcctgcctctgactcatccatagcattcttgatagatgctgacgatggcctctacctttcttagtagctgggtcaggctcatacagtttaggattattctcctgagtgaacggttccagtattccgatcgaccccatgtatctcctgccaccaagttcttaaggctgtttcctttgagaagtatggtgaaacaaatgcccttgcctgtagaccacactatccgcatgcagcaatcacatgcgagcatggtagatgcagcaggtttgg

SEQ ID NO: 57354 - DNA, 2179 bp, Zea Mays
caatcagcgccccgccgggttggatcatccttcaatcatcccaaattttgcatgccccaatatggtcagtccgtccacaccccggcgttttcggcttgccaacagagcgcctgcactgcgcgctacatccccgaagcaacaacgccgcggtggatctggctccggccatggcaagcgtgaggcgcgggccaccggcatcagtcgggaaggagaaccagcggcccaagaaccttggccacgggaaggcgacgactgcgacgacgaccgccgagctgacgaagcccacggagccggagccagcgcccgtggggtagcgctaacgccacctccaccgccgctgaggctgtcgtcgctatagctccgcatggaggacgaggcggcggctgcgcaggcgcagacgcaggcgccgcccgtgttcgtcgtcaggcccaggagcagggagctgctcccgccgccgtcctccaactacgaggcgtgggatctctccgacagcgagtccgcaccggcctcctcctgggccacgctccccaacaggtacaccgtggcaccacgcagcgttggagcgcaaggtcaagcgagatcgcggcagccggggcgagcggcgtcggcgtcacgagccacgacgggccgagggatgcctgcgcgctatggccggggctattggcggtggccggcgatggattcggggtctagcggtgacccgattcgaggtgacgtcctagggactgccgccaacgctttgatttcttcctttcagcccaacccggcccaaagccgggagatcacggcactccgtccaaccctcgacgccaccgatccccctttccaccgcctctcatcctcgtcgccggtgaagatgattccgcagagccagagcagctccctgcagcaccttcaacacgtcgagaaggtgccctgtgatgaagatagcagataaaggagttgatcttgttagaataaccgtccagggtaggaaggaagttgatgcctgcctctgagatcaagaatactctggttcagaagaagatgaagagcctcatcagtagaggaagatgcagaaaaataaatgctataggtaatggttatcgtaaggaggtactcactgagaaagttcctttccagaactcaacgttctgcgtccactaataaacatttaatgctccagaataacattaaaacacgagccacgggtgaaaccctcagggccctcgcactgatgcagtcagcgcgcactgccacgagttcatgatcgttatgaaggtaaccaacccactgcctgccctcatatcgtcaggctgtgggttcctgttgttaccagttatgcgccacaatcctcactaatcccatgctggagagacttttggaaaatcaacatctgttttagaatgctgtgtgcagaattttgctgtccaatgttactttgtttccatcaaattaactgtaaatatatgtatatgctctcaattggtttttatttgaagcagtatacatgccactaataattcatgataactcactgcttaattatgttttggttggagtaggaaattcaaatgattttgtgtgaggaaatcaaaagtgcttgtgaatatcgtccatttgaaaaatgtgattacagcgcaaggattgctaatgagatatgttgcaagaagctggagtatgtaattgagaagttggataccatgcaacagaaccttgaacagagcactgatgatgtttagcgagctggctacatattaatcgtctagggcgtggacgacttgccgaggcagattcaaaggggggtgcgtggtgctccatctgtgggattccccaaaggcccggcttcagctgcatcatgtacatagttcgtagggcatcttttgtaactatgaccgtcagcgccgcataggttgcaccgtttttttgtcttgcctgcctctgactcatccatagcattcttgatagatgctgacgatggcctctacctttcttagtagctgggtcaggctcatacagtttaggattattctcctgagtgaacggttccagtattccgatcgaccccatgtatctcctgccaccaagttcttaaggctgtttcctttgagaagtatggtgaaacaaatgcccttgcctgtagaccacactatccgcatgcagcaatcacatgcgagcatggtagatgcagcaggtttgg

SEQ ID NO: 57355 - DNA, 1954 bp, Zea Mays
atggtcagtccgtccacaccccggcgttttcggcttgccaacagagcgcctgcactgcgcgctacatccccgaagcaacaacgccgcggtggatctggctccggccatggcaagcgtgaggcgcgggccaccggcatcagtcgggaaggagaaccagcggcccaagaaccttggccacgggaaggcgacgactgcgacgacgaccgccgagctgacgaagcccacggagccggagccagcgcccgtggggtagcgctaacgccacctccaccgccgctgaggctgtcgtcgctatagctccgcatggaggacgaggcggcggctgcgcaggcgcagacgcaggcgccgcccgtgttcgtcgtcaggcccaggagcagggagctgctcccgccgccgtcctccaactacgaggcgtgggatctctccgacagcgagtccgcaccggcctcctcctgggccacgctccccaacaggtacaccgtggcaccacgcagcgttggagcgcaaggtcaagcgagatcgcggcagccggggcgagcggcgtcggcgtcacgagccacgacgggccgagggatgcctgcgcgctatggccggggctattggcggtggccggcgatggattcggggtctagcggtgacccgattcgaggtgacgtcctagggactgccgccaacgctttgatttcttcctttcagcccaacccggcccaaagccgggagatcacggcactccgtccaaccctcgacgccaccgatccccctttccaccgcctctcatcctcgtcgccggtgaagatgattccgcagagccagagcagctccctgcagcaccttcaacacgtcgagaaggtgccctgtgatgaagatagcagataaaggagttgatcttgttagaataaccgtccagggtaggaaggaagttgatgcctgcctctgagatcaagaatactctggttcagaagaagtaaggtgccattttcttcacattcactgaggttcacatgcatgtgtcctcactgcagttaaaatcaacgatgagaagtgcactttttctcaggatgaagagcctcatcagtagaggaagatgcagaaaaataaatgctatagaataacattaaaacacgagccacgggtgaaaccctcagggccctcgcactgatgcagtcagcgcgcactgccacgagttcatgatcgttatgaaggtaaccaacccactgcctgccctcatatcgtcaggctgtgggttcctgttgttaccagttatgcgccacaatcctcactaatcccatgctggagagacttttggaaaatcaacatctgttttagaatgctgtgtgcagaattttgctgtccaatgttactttgtttccatcaaattaactgtaaatatatgtatatgctctcaattggtttttatttgaagcagtatacatgccactaataattcatgataactcactgcttaattatgttttggttggagtaggaaattcaaatgattttgtgtgaggaaatcaaaagtgcttgtgaatatcgtccatttgaaaaatgtgattacagcgcaaggattgctaatgagatatgttgcaagaagctggagtatgtaattgagaagttggataccatgcaacagaaccttgaacagagcactgatgatgtttagcgagctggctacatattagcagccgccggtgtcataggtgggccttgtggtgcatactgtggtggcatcgtcccccactatggtgccaaaggtggcagagcacggtttgggacaaagttccacgaggagtggtcccatggtcccgcttgggcatacgaggtaggtggtccatagcctaagggcgtgtttgcgaccttggcccggtggcctggctgcgctcctgggatgcaacgtccgtgtttgcgttgcctggcttgctcgggagctcggtcctgcgcgtgcaaaagcggc

SEQ ID NO: 57356 - DNA, 1870 bp, Zea Mays
gtcagtccgtccacaccccggcgttttcggcttgccaacagagcgcctgcactgcgcgctacatccccgaagcaacaacgccgcggtggatctggctccggccatggcaagcgtgaggcgcgggccaccggcatcagtcgggaaggagaaccagcggcccaagaaccttggccacgggaaggcgacgactgcgacgacgaccgccgagctgacgaagcccacggagccggagccagcgcccgtggggtagcgctaacgccacctccaccgccgctgaggctgtcgtcgctatagctccgcatggaggacgaggcggcggctgcgcaggcgcagacgcaggcgccgcccgtgttcgtcgtcaggcccaggagcagggagctgctcccgccgccgtcctccaactacgaggcgtgggatctctccgacagcgagtccgcaccggcctcctcctgggccacgctccccaacaggtacaccgtggcaccacgcagcgttggagcgcaaggtcaagcgagatcgcggcagccggggcgagcggcgtcggcgtcacgagccacgacgggccgagggatgcctgcgcgctatggccggggctattggcggtggccggcgatggattcggggtctagcggtgacccgattcgaggtgacgtcctagggactgccgccaacgctttgatttcttcctttcagcccaacccggcccaaagccgggagatcacggcactccgtccaaccctcgacgccaccgatccccctttccaccgcctctcatcctcgtcgccggtgaagatgattccgcagagccagagcagctccctgcagcaccttcaacacgtcgagaaggtgccctgtgatgaagatagcagataaaggagttgatcttgttagaataaccgtccagggatgaagagcctcatcagtagaggaagatgcagaaaaataaatgctatagaataacattaaaacacgagccacgggtgaaaccctcagggccctcgcactgatgcagtcagcgcgcactgccacgagttcatgatcgttatgaaggtaaccaacccactgcctgccctcatatcgtcaggctgtgggttcctgttgttaccagttatgcgccacaatcctcactaatcccatgctggagagacttttggaaaatcaacatctgttttagaatgctgtgtgcagaattttgctgtccaatgttactttgtttccatcaaattaactgtaaatatatgtatatgctctcaattggtttttatttgaagcagtatacatgccactaataattcatgataactcactgcttaattatgttttggttggagtaggaaattcaaatgattttgtgtgaggaaatcaaaagtgcttgtgaatatcgtccatttgaaaaatgtgattacagcgcaaggattgctaatgagatatgttgcaagaagctggagtatgtaattgagaagttggataccatgcaacagaaccttgaacagagcactgatgatgtttagcgagctggctacatattagtaagtgtacctttttttgcaataaagtgtaaactacttagcgaataagaggatactttatgatgacagtatccactcaatcaagtgattgtgtcaatactttgccgtagcgttagcatgattttagagcttaggataagaaataaagtttcaaattttttgctctcccttgttatctcaatcacttttgccacgattcttaacgtgtattcacttcattgccttttagatttatggtatcattagcacgggcaccttactagtagttcataatccacagcatcgagaaacaaatcaggtttcacactgcatgatacatggtgagggagtaatgcatgaac

SEQ ID NO: 57357 - DNA, 1553 bp, Zea Mays
tagtgcagggtcctaagcaataatcatacgttgtaaactattcaagtcatcgagtaaacaatatatgaaagcacatactcatagtaatcgtgcagaaactgcatagataatcaacgaatcatggaaagtaaaacagagcgaagagcatgctagattgagcttttctactcaaacttaacaaagacaccaacaattgaacatgcatgctgctaactgaattgtgacggcacaaaatactgataacagaacatagttttcaggcgggtcacacaaactgattatattagtcttgtaccccactagagaaaaggtgttccttaatagtctagttccctaaaaagaaaaggggtactataatgtacctctagtttcaaattacaagttgtttggattgggatgcttgggttggtgatgcatcgatgtagttgatcgggttcgtattggttcaactggcctgtgtccacttatggggtaataatattcatttcatcagaaaacaataccaccacaatatatatcacatattttcatactccacgctagaagcctatgataggggaatattaagaacaagttgtgatttgcactaaactgcttgttgattagaacaagttgtgatttgctcgcacaggcttgataatttgcatggatgctgattcacctttcaagtactgatgcattttgaaccctttcatatagcagttttagttaagtacttattcaaatgaaatgcagtgcttatgcatgaatattttcactccctttacctaaacttatggccctttatgttgtatcaggaattttcttcatgatgttgggcattgtaatgttcatccctgggttctactacacaaggattgcctactatgcatacaaaggttacaagggcttatctttttcgaacatcccaccgatctgaaggagtgtgttgcctgcctgctggttatgaagtggtgtcgctggtttaatgcaaatctgccattccatcctccccagcgctttgatgcaaacttgcgcggacggcgtgggcacgtggaatccgacttgtaactgggtgcgtgcactgatcagtgaaactataacgtttacaaaaggaattacctcagcactgattccttccttggacagtatctctgcaccctgaagcaaacttagcatgagaatgcaccaaaataacagcccactatgatgaaaaattaagacagacaagtgacatgagcactactaaaaccatctatcacctaaatatccctcttaggacaaaaatcaaaattacagttttcgaacggacaaccttgtagatcagtttaacaactaacaaaagtgcaaaggaaggcgaaccgagatcgcatttttttaaaaaataacaaaagtctgataaatcaactctcgaaatccaacgcctacagctgcatctcctcatcagctaggctgagatttacaaccgatttgaaatccaatcagcgaactggacatcaaaatcagagcctataaattcaatgaattcgcctaaaacctttaaaacaagtggacgaaatcttggaataactaaa

SEQ ID NO: 57358 - DNA, 392 bp, Zea Mays
catcaatcggtcgatcgaggggccttgaagaagatgttgatgcatagacctcaacacgagttcccccatgccctccggcctgcacacgtcctccgagttgtggggggcaaagcctccctgtgctccattttagtgcgggcgcaacctccctgcgcggcggtgggttgcggccgcggtatccaggcgtccgttccggcgagcctcgaggcggggagcggcgtttgcgggtgggatcggacgactcacatcggcgtttgcggcggcagaatcgaggtagggacaacaggggacggagttcgggggcagctgaaatcgggggagccggggaggggagggaggctggggcgacggtttcggggagccatgagcaggactggtgtgcgggatcaggg

SEQ ID NO: 57359 - DNA, 1055 bp, Zea Mays
aaaaaaagagacgaacatctgtagccgcagtctacctctccgatccctacgtaaccgaacagcctcgcgtgtggcgccaccccgcaggctgtgcacacgacacgatcagtgcgcagcgaactgcgcatggcggtgcacccaatccacctgttcccgtgacaagcagcactcaagacacacacgcgcgcgaacacgaacagggacacgagacagcggcggccatggcgagaggcggcggcgatcggagtcgggaggatgaccccttctccgacggcggcaccaccggaaccgactcggacgagtcctctccgcgtggggtgggggcccgcggccccggctccacctccaacccgatcctgacacgcctcgcggtgtcgcggaacccgagcccgctggctgcggccaccgcggccccaggggtctgcctcctccgcttcgcctgggagtccgccgcgggctccctcgtcggcgccgccgttggctacggtgcggacttgggacgatggggttggactccgtgcggcttaggtaaaggtttggttacgatgaaggggattaaaggctcatttgctgatgctgcgtcatctgctaagatatttgctgttcttgctggtgttcaaagtttagtagcctgctctttgagaaaactacgtggaaaagatgatggaatcaatgcaggagtcgcaggctgttgcactggccttgctctgagctttccaggtgcaccacaaactctgattcagagctgcctgacctttgggactttctcttacatcattgagaagctaaacaagcagcaacctgcgctggcgctcccacctgcgacaggtgtgatggatccgaaggctggacaaagcgttcttcctcccttcacacttcctcctctggatgccatggacgaattttgtagtgttttggtagtgttgatgattctaccttgacatatccaacacaaggcgagcagcttgtcctttgttcaactgattggatcttcggagttttacccacagaccatgccccgtaacaaggaagaacatgcaccttgattcttcaga

SEQ ID NO: 57360 - DNA, 990 bp, Zea Mays
accgaacagcctcgcgtgtggcgccaccccgcaggctgtgcacacgacacgatcagtgcgcagcgaactgcgcatggcggtgcacccaatccacctgttcccgtgacaagcagcactcaagacacacacgcgcgcgaacacgaacagggacacgagacagcggcggccatggcgagaggcggcggcgatcggagtcgggaggatgaccccttctccgacggcggcaccaccggaaccgactcggacgagtcctctccgcgtggggtgggggcccgcggccccggctccacctccaacccgatcctgacacgcctcgcggtgtcgcggaacccgagcccgctggctgcggccaccgcggccccaggggtctgcctcctccgcttcgcctgggagtccgccgcgggctccctcgtcggcgccgccgttggctacggtgcggacttgggacgatggggttggactccgtgcggcttaggtaaaggtttggttacgatgaaggggattaaaggctcatttgctgatgctgcgtcatctgctaagatatttgctgttcttgctggtgttcaaagtttagtagcctgctctttgagaaaactacgtggaaaagatgatggagtcgcaggctgttgcactggccttgctctgagctttccaggtgcaccacaaactctgattcagagctgcctgacctttgggactttctcttacatcattgagaagctaaacaagcagcaacctgcgctggcgctcccacctgcgacaggtgtgatggatccgaaggctggacaaagcgttcttcctcccttcacacttcctcctctggatgccatggacgaattttgtagtgttttggtagtgttgatgattctaccttgacatatccaacacaaggcgagcagcttgtcctttgttcaactgattggatcttcggagttttacccacagaccatgccccgtaacaaggaagaacatgcaccttgattcttcaga

SEQ ID NO: 57361 - DNA, 4720 bp, Zea Mays
ctagtttagagttgaaattggacttgacctgcttcaagtgtttcatcaatttattgcatcctactaaaaacaaggttaaccttaagctcaaacccaactttggtgtatgtagctcatgtccaaatttccattggtttaaaagtggtgcacttaaacttgattgcaaacagggtttttaatcttccctggctcccaacaacataacacaccatatttgagttgaatttttgacctagtaaaatgcattctagggatatcaagcaagatgatgcggatgcgtatgatgtcatgccaaagttttagttctcgtaacactaggggtgttacactaccagagatggtctgtgatgacatgccctcgctctctgccctctgctttgcgcgcttggttggatgctcacttgattcctactgaccacggggatggtgatcgactgatcgttaacatcacttgattcctctatttttatattgattcctactgaagatggacaatataaaaacctaaaatggaccaattctttctttgagggctacagccctactctggtgtaacttatacttgttctagcacttggccctctgatctggtgaataagttatgcagaagaaaatttatgttttattttatatttaactgtactttgttgcagcttgtaggtactgatcagagggccaggtgctatccacgaacgatagtgtaatgtctaggaacgatagctgatttggaaaacctgcaaagtctattcacaacagtgatatataatggtcacctattatgaagaaatagtgaatgggagaagggttgagttttggagccggtgcatgcaaatcatataccaggtttatgctataatgttttccttatgaagaattaaatatttgtgtgtttgcacagcgaggtcatattttcatattgattttctgtacctgggactttggagaggggaacacgttccaaaaccggagcgtttcatcactagcaccagtaactatggtctgttggtatcagcagtgagaacaaatatgccaggtatgtgtgtctgtgagtgtgcgtgtaacagaactcagaaacagatcaccaaaactcacctagccatcaggggaaatagctaagtacaatactctgtatgtatgccatgtcaaagtggcaagctgcaaataccaaaggagacttgaactaacacaagcaagtatagcataatatttcagaataataatcattcatcatacatgtatgaatcttgaacgttttttttcaatttttctaatttagcatttgcgaccatttgcccagtgagtgtataatgtaatttaattcaacaaataatcactaatataacatgaaaattaatagttttttgttcggtttctctgtacacattacgccattgttgccccagttcatactattttctatcttctctttaccttctcactatcatatcatccgattgcaattagacaatcaaacctaatcatttaatctatattgtctaaaatacatgttgcaagcatggcatgaagtagtatcacattctatagagttacaggttcaattcatcattgctgaggatatgcatcagtatttatgaactcgacattaatatatatttagcctttattactgtatctgaggtctggtctgtttccatgaaggtctgaacaagtgaacatgaattcgttgggttccttaagtaccctgttttggtcattattttttccttttcgatgaaattgtcggtacaacaggctgtggccaacagttaagcatttgtgtcatcgcgatttatcaggtggaacgtgacaaggatgggtgtggctggattacaacgggattgaagtcgattggcaggagatgatgctactcagcaattgttcccttactgtaactgcttacaaaggtattgatatggtgagatattgttacttttgaatacctcactgtgttacttctgaaagccaagtgaggaggaatctataccttattgtgttcccttttttctttgtattttatttggtttttgcaagttgtgcaattgtggtgtcgcatttttttagttaacggaagaaatcttgcatctaattgtgcatacgtggactctcaattgtccttgatgatccggatggtgtttctgttactatattacaactaaaaaagttaaatcaagtttactccaatttaattctaatctttatatttccatagttatgtgatgtagtgtctatctaactttaagatcttctaatatggtttatcctagactctgaaccatgagatatgtatatgtttttcttaatcgtgtgcaacgtttccttttgtttggccaatgctgaggcccaacactgtgtactatgttgtggatctcgaggggataatatgattatatgtcgttgcaacacacaaacattgcactattaaaatatatgagagaaattaaactcctcccgtgtgtctcatacaaaaaaaatcatctgttataggtcgttgcctcactgattaagtttttgtttcctttatttgcttgagttgatcagtctacagtttgtcctttgcctaatattttggttccacagttgttttgtgcatccaaaagcagtacatcgatttttaggattgctgcatgcatcctaacataaccactgtgaaaagtagtccacttgtttattggtaactggtttgctacttttgattaccctacaaagggataaaattgattatgatgattataagtgtatgggattgtagataatgttgataagaaaagatgagggataccacatacttgttttttagtgttggtcttttccttttgcatgatcatctaactatgttagtcgtctactgctcgtgggagccggcgaggtgcttgctagactcggtggaagtggagtttagttacgatgccgatatcagcctcgtgtccgtcgacctgctcatgccggactaggagttgtactgatggaggatggagattatggtgtaggccgtgacacgcgtgcgcaggagtcggtgtcggtgcttttctttggactgattaattctgagctggacgaccattgacatttgtgatgtgtacgagatgtattgtggcgtctcgttgtataattggtactgggagtatgttttgctatgtccgtatttatatatcatgtgtgctatgaatgttgtataatactagataataagaccaactccagcagcttacccatatccatattcaaactatacaaacaatacaatctacagtgcaaaaggtgtttttgtgaccatatgggtgaactattgtacattgcacctatatgatcactaaaaaacactgttttgcatcgttttatattgtagattgcattatttatagagtgttgtttgaatatgggtatgagtataggtaagctggtggagatgatctaaaggatgatctccttcaataggaatctcttttctaaataataaatgtttttaataggaatctcttattcatttcgatcttgtattattaactttggagttgcctatttcgattaatagtgacaatgagccaaattttggttgttcgaaatggtagacttcgatatttattatgattgttatgttgatgcttgatagcatcactaaataatgacatgtgcgtgcacaagtgccctctgttgcaacgcacgggcatatacctagtattggtcatatgcttcttgttgtattatgtggtgataatacataattagtgtgtgcttccgatgatatgaatcaattggtatctattgtgtttgtcctgtaatagattttcatgtggttctggtgctttaaattggtatcttaatggtgaatagtggtaggttgatattcctgtggtatatccatttaattggtttttaactctgattctgtgcatttgtgtgttatacgcatcacggtttaattattgacacaatgtatcccatgggtgctaaggtgtagttatgcttcgaattagcctaagtatgtgcaatttggcatataaggccaaagttaagattttaatgtaagcacatatttagggggaacattctataaacttagaattcaaaatttgtgctttaaatcttattcttgtgtaagctttaattgtgttgtcatcgatcccaaaaggggggagattgaaagctctcttgtgggttttggtgtttagatgacaacccaattaaaggaccaacaagtgtgctaagtgttgaacaggtgcttaatgcaaagctaacaaggttcaacacaagtgaacggtataatggacatcacaggtaagatggacagactctatgtgtgtaactcagagacaaccgatcaagccaaggatggaggcaagaagagcttcgaggtaccgagtgcacgggagaaggtcaaggagacgaggaacccaaagccaggggtgaagaagaagacttgcaaagtcaaggttgatcgagttaagaagagttatggtgcatcaaggatcactacataaggacatgacttacaaccaatgaggtaacatctacagttatgtggtgtaagtcataaggctcaagatcaagctcgggaagtgaacaagggggttggagctcagatatgttaatctagatcaagtcaagttgacttgatggtttagagtccaacatcgacctcaaacatgccaaattgggtaaaacgatgaaaaaggttaagtatgtaaggtttgagtgttcaaccattttgcatacacctctt

SEQ ID NO: 57362 - DNA, 4567 bp, Zea Mays
ttgaaattggacttgacctgcttcaagtgtttcatcaatttattgcatcctactaaaaacaaggttaaccttaagctcaaacccaactttggtgtatgtagctcatgtccaaatttccattggtttaaaagtggtgcacttaaacttgattgcaaacagggtttttaatcttccctggctcccaacaacataacacaccatatttgagttgaatttttgacctagtaaaatgcattctagggatatcaagcaagatgatgcggatgcgtatgatgtcatgccaaagttttagttctcgtaacactaggggtgttacactaccagagatggtctgtgatgacatgccctcgctctctgccctctgctttgcgcgcttggttggatgctcacttgattcctactgaccacggggatggtgatcgactgatcgttaacatcacttgattcctctatttttatattgattcctactgaagatggacaatataaaaacctaaaatggaccaattctttctttgagggctacagccctactctggtgtaacttatacttgttctagcacttggccctctgatctggtgaataagttatgcagaagaaaatttatgttttattttatatttaactgtactttgttgcagcttgtaggtactgatcagagggccaggtgctatccacgaacgatagtgtaatgtctaggaacgatagctgatttggaaaacctgcaaagtctattcacaacagcgaggtcatattttcatattgattttctgtacctgggactttggagaggggaacacgttccaaaaccggagcgtttcatcactagcaccagtaactatggtctgttggtatcagcagtgagaacaaatatgccaggtatgtgtgtctgtgagtgtgcgtgtaacagaactcagaaacagatcaccaaaactcacctagccatcaggggaaatagctaagtacaatactctgtatgtatgccatgtcaaagtggcaagctgcaaataccaaaggagacttgaactaacacaagcaagtatagcataatatttcagaataataatcattcatcatacatgtatgaatcttgaacgttttttttcaatttttctaatttagcatttgcgaccatttgcccagtgagtgtataatgtaatttaattcaacaaataatcactaatataacatgaaaattaatagttttttgttcggtttctctgtacacattacgccattgttgccccagttcatactattttctatcttctctttaccttctcactatcatatcatccgattgcaattagacaatcaaacctaatcatttaatctatattgtctaaaatacatgttgcaagcatggcatgaagtagtatcacattctatagagttacaggttcaattcatcattgctgaggatatgcatcagtatttatgaactcgacattaatatatatttagcctttattactgtatctgaggtctggtctgtttccatgaaggtctgaacaagtgaacatgaattcgttgggttccttaagtaccctgttttggtcattattttttccttttcgatgaaattgtcggtacaacaggctgtggccaacagttaagcatttgtgtcatcgcgatttatcaggtggaacgtgacaaggatgggtgtggctggattacaacgggattgaagtcgattggcaggagatgatgctactcagcaattgttcccttactgtaactgcttacaaaggtattgatatggtgagatattgttacttttgaatacctcactgtgttacttctgaaagccaagtgaggaggaatctataccttattgtgttcccttttttctttgtattttatttggtttttgcaagttgtgcaattgtggtgtcgcatttttttagttaacggaagaaatcttgcatctaattgtgcatacgtggactctcaattgtccttgatgatccggatggtgtttctgttactatattacaactaaaaaagttaaatcaagtttactccaatttaattctaatctttatatttccatagttatgtgatgtagtgtctatctaactttaagatcttctaatatggtttatcctagactctgaaccatgagatatgtatatgtttttcttaatcgtgtgcaacgtttccttttgtttggccaatgctgaggcccaacactgtgtactatgttgtggatctcgaggggataatatgattatatgtcgttgcaacacacaaacattgcactattaaaatatatgagagaaattaaactcctcccgtgtgtctcatacaaaaaaaatcatctgttataggtcgttgcctcactgattaagtttttgtttcctttatttgcttgagttgatcagtctacagtttgtcctttgcctaatattttggttccacagttgttttgtgcatccaaaagcagtacatcgatttttaggattgctgcatgcatcctaacataaccactgtgaaaagtagtccacttgtttattggtaactggtttgctacttttgattaccctacaaagggataaaattgattatgatgattataagtgtatgggattgtagataatgttgataagaaaagatgagggataccacatacttgttttttagtgttggtcttttccttttgcatgatcatctaactatgttagtcgtctactgctcgtgggagccggcgaggtgcttgctagactcggtggaagtggagtttagttacgatgccgatatcagcctcgtgtccgtcgacctgctcatgccggactaggagttgtactgatggaggatggagattatggtgtaggccgtgacacgcgtgcgcaggagtcggtgtcggtgcttttctttggactgattaattctgagctggacgaccattgacatttgtgatgtgtacgagatgtattgtggcgtctcgttgtataattggtactgggagtatgttttgctatgtccgtatttatatatcatgtgtgctatgaatgttgtataatactagataataagaccaactccagcagcttacccatatccatattcaaactatacaaacaatacaatctacagtgcaaaaggtgtttttgtgaccatatgggtgaactattgtacattgcacctatatgatcactaaaaaacactgttttgcatcgttttatattgtagattgcattatttatagagtgttgtttgaatatgggtatgagtataggtaagctggtggagatgatctaaaggatgatctccttcaataggaatctcttttctaaataataaatgtttttaataggaatctcttattcatttcgatcttgtattattaactttggagttgcctatttcgattaatagtgacaatgagccaaattttggttgttcgaaatggtagacttcgatatttattatgattgttatgttgatgcttgatagcatcactaaataatgacatgtgcgtgcacaagtgccctctgttgcaacgcacgggcatatacctagtattggtcatatgcttcttgttgtattatgtggtgataatacataattagtgtgtgcttccgatgatatgaatcaattggtatctattgtgtttgtcctgtaatagattttcatgtggttctggtgctttaaattggtatcttaatggtgaatagtggtaggttgatattcctgtggtatatccatttaattggtttttaactctgattctgtgcatttgtgtgttatacgcatcacggtttaattattgacacaatgtatcccatgggtgctaaggtgtagttatgcttcgaattagcctaagtatgtgcaatttggcatataaggccaaagttaagattttaatgtaagcacatatttagggggaacattctataaacttagaattcaaaatttgtgctttaaatcttattcttgtgtaagctttaattgtgttgtcatcgatcccaaaaggggggagattgaaagctctcttgtgggttttggtgtttagatgacaacccaattaaaggaccaacaagtgtgctaagtgttgaacaggtgcttaatgcaaagctaacaaggttcaacacaagtgaacggtataatggacatcacaggtaagatggacagactctatgtgtgtaactcagagacaaccgatcaagccaaggatggaggcaagaagagcttcgaggtaccgagtgcacgggagaaggtcaaggagacgaggaacccaaagccaggggtgaagaagaagacttgcaaagtcaaggttgatcgagttaagaagagttatggtgcatcaaggatcactacataaggacatgacttacaaccaatgaggtaacatctacagttatgtggtgtaagtcataaggctcaagatcaagctcgggaagtgaacaagggggttggagctcagatatgttaatctagatcaagtcaagttgacttgatggtttagagtccaacatcgacctcaaacatgccaaattgggtaaaacgatgaaaaaggttaagtatgtaaggtttgagtgttcaaccattttgcatacacctctt

SEQ ID NO: 57363 - DNA, 2153 bp, Zea Mays
accactcaccacagtctccagtctccactgcatctaaaaaaaaacgtaaaacccccaccacgccgtagcggagagaagagaagagaggagcgcgcgatcgatgtcgggctccggcgatcgtcgcggcggcggtcctccggatagtggctgggaaaccatggggaagaagtcgaagaaacccgggcaagccggggggagacagtgggcaccatggagttccacaaatgtgacacctaacacagcaaggccagcatggggtggcagtggttcctcgcacccttctggaaccagctgggctcaagctccagatcatggtgctgctaccagaggcaatcctagaccgccatcacaaacatcgcgccctgttctggctccacctctggcaaatggttggcagtggcaatccaggcctcgcccatctggatctgaagtcaagaaggatgatgctcctccatctggttctgtccctgaggtggagaatgttgatggcaacaatacatcagatgatgatgatgatgatgacgatgatttgagtgatgatatcagtgatgactatgattctgacgcaagtgagaaaagttttgagactcgaaaaacgaacaagtggttcaaagagttctttgaagtattgaatacattgagtttggaacaaattaatgaacaaactcggcaatggcattgcccggcatgcaaaaatggacctggggcgattgactggtacaaagggctgcagcctttagtgagtcatgctagaacaaagggttctacaagggttaaacttcacagggaattggctgcattgctggaagaggagctttctcgcaggggaacttcagtgttaccagcgggtgaacaatttgggaaatggaaaggactgcaagaaagcactgatcgtgagatagtgtggccaccaatggttattgttatgaataccttcttggaaaaagatgaagatgataagtggaagggcatgggaaaccaagagctccttgattattttggagaatatgaagcaagtaaagcacgtcatgcctatggtccctctgggcaccgtgacaggaattcatggcacctacgcaaggttcgatttgtgcctggtgggaaaaggcaactatatggtttcttagcaaacaaagaggatatggaggcatttaacaagcattgccatggtaaaagccgtctgaagtatgagatgaggtcttacaatgagatggtggtgattcaaatgaaacagatgagtgaagacaaccaacaactgaattacctgaagaacaagatggttaagacagagcagcgatctaaagcagtagaagaatcattgggtgttgttacccagaagctacgtgagactattgaagaaaatatatttgttaggagtaaagcaaaagagaagcacatggagtacgaggaagagatgaagtcccaggaggaaatttttcatggtctaattgaggatattcacaaggccacagaggataaagaaaagcagtttgagaagttgttgcaggaagagcgctcaaaggccagacgctttgatgttgattctggaactatgaaagatcgtcagctaaggaaggaatatgtgcagaagttcattgattgccaagtcaaggatgtggcagagtttgaagttgagcgagatgagctgatcaaagtccacgaggacaagaagttgaagctcaagaaagaatacatggatctggagctggagctggagaaggagtttgacgcagccctgacgggcctgatggagaagcataagccagataccttcgaggcctccagctcgtaagggggcttcagcggctaagcgctttccttaggccccagctaagcttggagcagtctcgtacatgctcctgcttgcttatccatgaaataatgcctggacagtctgtagatgttgcgaaaacatggtgccccctgtggttgccgcgtgtgtagtaagtatctctcagtcgtagtgtggttgaagcatctgaactcttgagcggtttgcctgtgatggcatatgggtcaaactacaactggagtgtgatatctagtttatatggtccagcgctcttgttgactgcgggtggtggtttgccccggataatttactgattatgtctgctccgatcgtcaaagtgcctctttctgttttttttctt

SEQ ID NO: 57364 - DNA, 2165 bp, Zea Mays
accactcaccacagtctccagtctccactgcatctaaaaaaaaacgtaaaacccccaccacgccgtagcggagagaagagaagagaggagcgcgcgatcgatgtcgggctccggcgatcgtcgcggcggcggtcctccgggttcccatagtggctgggaaaccatggggaagaagtcgaagaaacccgggcaagccggggggagacagtgggcaccatggagttccacaaatgtgacacctaacacagcaaggccagcatggggtggcagtggttcctcgcacccttctggaaccagctgggctcaagctccagatcatggtgctgctaccagaggcaatcctagaccgccatcacaaacatcgcgccctgttctggctccacctctggcaaatggttggcagtggcaatccaggcctcgcccatctggatctgaagtcaagaaggatgatgctcctccatctggttctgtccctgaggtggagaatgttgatggcaacaatacatcagatgatgatgatgatgatgacgatgatttgagtgatgatatcagtgatgactatgattctgacgcaagtgagaaaagttttgagactcgaaaaacgaacaagtggttcaaagagttctttgaagtattgaatacattgagtttggaacaaattaatgaacaaactcggcaatggcattgcccggcatgcaaaaatggacctggggcgattgactggtacaaagggctgcagcctttagtgagtcatgctagaacaaagggttctacaagggttaaacttcacagggaattggctgcattgctggaagaggagctttctcgcaggggaacttcagtgttaccagcgggtgaacaatttgggaaatggaaaggactgcaagaaagcactgatcgtgagatagtgtggccaccaatggttattgttatgaataccttcttggaaaaagatgaagatgataagtggaagggcatgggaaaccaagagctccttgattattttggagaatatgaagcaagtaaagcacgtcatgcctatggtccctctgggcaccgtggtacagacaggaattcatggcacctacgcaaggttcgatttgtgcctggtgggaaaaggcaactatatggtttcttagcaaacaaagaggatatggaggcatttaacaagcattgccatggtaaaagccgtctgaagtatgagatgaggtcttacaatgagatggtggtgattcaaatgaaacagatgagtgaagacaaccaacaactgaattacctgaagaacaagatggttaagacagagcagcgatctaaagcagtagaagaatcattgggtgttgttacccagaagctacgtgagactattgaagaaaatatatttgttaggagtaaagcaaaagagaagcacatggagtacgaggaagagatgaagtcccaggaggaaatttttcatggtctaattgaggatattcacaaggccacagaggataaagaaaagcagtttgagaagttgttgcaggaagagcgctcaaaggccagacgctttgatgttgattctggaactatgaaagatcgtcagctaaggaaggaatatgtgcagaagttcattgattgccaagtcaaggatgtggcagagtttgaagttgagcgagatgagctgatcaaagtccacgaggacaagaagttgaagctcaagaaagaatacatggatctggagctggagctggagaaggagtttgacgcagccctgacgggcctgatggagaagcataagccagataccttcgaggcctccagctcgtaagggggcttcagcggctaagcgctttccttaggccccagctaagcttggagcagtctcgtacatgctcctgcttgcttatccatgaaataatgcctggacagtctgtagatgttgcgaaaacatggtgccccctgtggttgccgcgtgtgtagtaagtatctctcagtcgtagtgtggttgaagcatctgaactcttgagcggtttgcctgtgatggcatatgggtcaaactacaactggagtgtgatatctagtttatatggtccagcgctcttgttgactgcgggtggtggtttgccccggataatttactgattatgtctgctccgatcgtcaaagtgcctctttctgttttttttctt

SEQ ID NO: 57365 - DNA, 850 bp, Zea Mays
tggacgtcctcgcataacctccctacacatatcttcttcacctgacctctcttccttaccctccctcatagcagtcggctgccgtggtccggtgacctccccacgatgcctcccgggaagagatccacacagccctcacggaattccgaagaagaccctcttactgaatacgagaaaatgagggctgtgaatatgatgaagaacaatcaattgtttcaacggctaggccttggacaattaaaaacaatgatcaccgcaacaactacaaacaacaatcaaggcggtcctcaggaatcaggttctttatatgatggtgagaacgttgaggattctggtgaagaggatgttggcatgaaatcataccaaggagaaaaagtatgggcaggcaacttgaatcgttaagcagaggactgggaatcaatattccaatccaaatcactgaagggaacaaaaggccagagccacctattcaagctgctaagtttgcatcagagggtggaatcacattgaggcagcacattccaatatttaaccattggaaggaatacaagaagagagagaatgaacctataataagaaactacattggcaaagttactgctaatttcacggtggacagtgagagcaagacagtggaagatgcatgtctagacatgctaaagagtggacaacgccaaatgaggtatagactgaaacagaagtacttcaatgggatacctgctaatcaagtgaggactacatcacctattccaagcatgtctgacaacgactggagaaagttggtggagaagtggtctaccccaaatcacaaggtacttgcaatatccagacgttttctacatctttatgc

SEQ ID NO: 57366 - DNA, 1355 bp, Zea Mays
ggacgtcctcgcataacctccctacacatatcttcttcacctgacctctcttccttaccctccctcatagcagtcggctgccgtggtccggtgacctccccacgatgcctcccgggaagagatccacacagccctcacggaattccgaagaagaccctcttactgaatacgagaaaatgagggctgtgaatatgatgaagaacaatcaattgtttcaacggctaggccttggacaattaaaaacaatgatcaccgcaacaactacaaacaacaatcaaggcggtcctcaggaatcaggttctttatatgatggtgagaacgttgaggattctggtgaagaggatgttggcatggaattccaagctcgtaagggtgtccctacccacatctccaatgatggtgaacatatgtcaacaaaagtaacaagaggaaataaaagaattatggcacctgtgcaggaacggccagttagagtcactagacaaagagttgctgaagaaagttgtgtgaagaacaaacttaatcgtgaaaaagtacagtatcaacaatgcacaggctctcagtcctacattgcaaaggcttttatattgaagcaagaaaaatataaggacgcggaacctagtgcaatagatcttttcaaggagatgcattgtagcaaaaagaaaggttttagtgaaaatgttcagaaagctattgttgacatggaagaaatggtagcagcaccagttcaggatggacaacaaccaaaatctcctacagaagttgtttctaatgtgctaccaggctccagtgtgttcctacgcaatgttggtcttaagtctgcatcccagaaaagctccacaacgactgtttctgcaaaggttcaacaacttcaggatgaactcgagaccgagaagcaagaaaaagatggccttcgggaagaagtggaaaccttgaaggctcaagcacaagcatctcaggagactgttgatagtatgaagaggtcgatggaagaaaataacaacctccttcgtcaactattaagcttcaatcgaggccaagtgcctccatcataagtctggttgaccactataggacatgcagccttatggctgttatagtggctagttatagtagctctagatttgaagttataagatcatttttcaattctgcttaatttttaatactttgagttgaagttattggatttgttttggattttaagttaaaggatttgcagatatatgttttaaagttatattattctcttctagatgaaatatttgtgttgaacaaattcatatgatattttggttctgatgtgtaatattctatgacgatatgaatgcatatgatgtattccttgcgatgat

SEQ ID NO: 57367 - DNA, 2149 bp, Zea Mays
ctcgctcgctcgctctcatacccagctgacaacgaagaggtttagagagagagagctgagagaatggccgacagcaggagaagtgtagtgtacgatgctgaaggcggcgacgatcatgagaggcaagggacggcgtggacggcgacgtcgcacatcgtggcggcggtggtgggctccggcgtgctggcgctggcgtggacggtggcgcagctggggtgggtggtgggtcccctcgtgctggtgggcttctcttgcgtgacctactacacgtcggcgctgctcgcagactgctaccgctacccggaccccgtccacggcgccgtcaaccgcgagtacatcgacgccgtccgatgctacctggaccggaagaacgtggtgctgtgcgggtgcgcccagtacgtgaacctgtggggcactctcgtcggctacaccatcaccgccagcgcaagcatgatctagctagcttgctctgctgggtgcgtacgctttgcctgacgccagccgaaaccaagcgacagcggaaaggtggcgggatacgtggcttttcacccgaaaccaggagaatccgttgcaacgacccacgccagtctccatgctctatctgggctgttttgtttgccgacgcggcacgcatgaatgaacaccccagcttctccctactggccgggcacgtatccggcgtgagtgtagttcactctactccagttgatgtatgtattgttcgtctttttacagcgcgattaagcgcgtcaactgcttccaccgggacggctacggcgccgccggctgcaacccgtcggggagcacgtacatggtggtgttcgggctcttccagctcctgctgtcgcagctgcccagcctccacaacatcgcctggctgtccgtggtggccgtggccacctccctgggctactccttcatcagcctgggcctgtgctccgccaagtgggcctcgcacggcggccacgtgcgcggcacgctggcgggcgccgccgccgtggccggccgggccgacgacgacaagcaggcggccttcaacgtgctcctcgcgctcggcaacatcgccttctcctacaccttcgccgacgtgctcatcgagatccaggacacgctgcgctcgccgcccgccgaaaaccgcaccatgaagcgggcctccgcctacggcctcgccatcaccaccgtcttctacctcgcgctcggctgcaccggctacgccgccttcggcgaccacgcgccggggaacatcctcacgggcttcgccttctacgagcccttctggctcgtcgacgccgccaacgtctgcgtcgtcctgcacctcgtcggcgcctaccaggtcttcgcgcagcccatcttcgcgaggctcgagtcctgcgtcgcctgccgctggcccgacgccaagctcatcaacgccacctactacgtgcgcgtgccgccatgcctcctcctcctccgcacgtcgtcgtcctcgtcgccgccgcccaccctcgccgtcgcgccgctcaagctcgtcctgcgcaccatcgtcatcatgttcacaacgctcgtcgccatgctggtgcccttcttcaacgccgtgctgggcctcatcggcgcgctcggcttctggccgctctccgtctacttccccgtcagcatgcacatggcaaggctcaacatccgacgcggagagatccgctggtggatgctgcaggccatgagcttcgtctgcctcctcatctccgtcgcagccagcatcggatccgtgcacgacatcgtgcacaacctcaaggccgccgcgccattcaacactgcaaactgattaataaacatgcatttactagtatatatacggatcggatcggaggagtgatgggttaattagtttcttaattagctttggctactatatctatcagtatcagagtcagaggagcagagggccggccacatgcatggcctttttgtgtttcttgattatatatctggcaaatttgatctgtcgagcagattttcatgcatgcatgcatgctgctaattcggacgtacgttgaactagtaataatattattatttgtaatgtaaccccagcaatgcaatgcaatgcaagaagcaacaataatatttgccaaacctcgttctcattattatccgctagctgctagtagtgttg

SEQ ID NO: 57368 - DNA, 1840 bp, Zea Mays
ctcgctcgctcgctctcatacccagctgacaacgaagaggtttagagagagagagctgagagaatggccgacagcaggagaagtgtagtgtacgatgctgaaggcggcgacgatcatgagaggcaagggacggcgtggacggcgacgtcgcacatcgtggcggcggtggtgggctccggcgtgctggcgctggcgtggacggtggcgcagctggggtgggtggtgggtcccctcgtgctggtgggcttctcttgcgtgacctactacacgtcggcgctgctcgcagactgctaccgctacccggaccccgtccacggcgccgtcaaccgcgaaccggaagaacgtggtgctgtgcgggtgcgcccagtacgtgaacctgtggggcactctcgtcggctacaccatcaccgccagcgcaagcatgatcgcgattaagcgcgtcaactgcttccaccgggacggctacggcgccgccggctgcaacccgtcggggagcacgtacatggtggtgttcgggctcttccagctcctgctgtcgcagctgcccagcctccacaacatcgcctggctgtccgtggtggccgtggccacctccctgggctactccttcatcagcctgggcctgtgctccgccaagtgggcctcgcacggcggccacgtgcgcggcacgctggcgggcgccgccgccgtggccggccgggccgacgacgacaagcaggcggccttcaacgtgctcctcgcgctcggcaacatcgccttctcctacaccttcgccgacgtgctcatcgagatccaggacacgctgcgctcgccgcccgccgaaaaccgcaccatgaagcgggcctccgcctacggcctcgccatcaccaccgtcttctacctcgcgctcggctgcaccggctacgccgccttcggcgaccacgcgccggggaacatcctcacgggcttcgccttctacgagcccttctggctcgtcgacgccgccaacgtctgcgtcgtcctgcacctcgtcggcgcctaccaggtcttcgcgcagcccatcttcgcgaggctcgagtcctgcgtcgcctgccgctggcccgacgccaagctcatcaacgccacctactacgtgcgcgtgccgccatgcctcctcctcctccgcacgtcgtcgtcctcgtcgccgccgcccaccctcgccgtcgcgccgctcaagctcgtcctgcgcaccatcgtcatcatgttcacaacgctcgtcgccatgctggtgcccttcttcaacgccgtgctgggcctcatcggcgcgctcggcttctggccgctctccgtctacttccccgtcagcatgcacatggcaaggctcaacatccgacgcggagagatccgctggtggatgctgcaggccatgagcttcgtctgcctcctcatctccgtcgcagccagcatcggatccgtgcacgacatcgtgcacaacctcaaggccgccgcgccattcaacactgcaaactgattaataaacatgcatttactagtatatatacggatcggatcggaggagtgatgggttaattagtttcttaattagctttggctactatatctatcagtatcagagtcagaggagcagagggccggccacatgcatggcctttttgtgtttcttgattatatatctggcaaatttgatctgtcgagcagattttcatgcatgcatgcatgctgctaattcggacgtacgttgaactagtaataatattattatttgtaatgtaaccccagcaatgcaatgcaatgcaagaagcaacaataatatttgccaaacctcgttctcattattatccgctagctgctagtagtgttg

SEQ ID NO: 57369 - DNA, 3883 bp, Zea Mays
gtattttggcggcaacatcagggagtttcccgcgaaaaataattgtggctgtccttgccttggccgcttggcttccatctatctattcctccattttcactgcgttcggacccacattcgttcacttcccaatactggagtggatggtagaaaggagagagagaccacactatgtcgatcgcttggcttccatctacaaatcccgccgccggcccgctggcgatcgctgaggcggtccccatctcgatctcccttgtccagttcttttcgccggagtgcactatgtcggcactgccgccggcagaggaattggatgcgtcgcatcagaagaagcggcggaggaggaaaaagcacagggagcaggtggaggctatagcggcatcctcggagcctcctccacctccggcaagcccggagtccaagcccaagtcaacaattccagtcgctcccgaaaccctaacctcagcggcggtgagggagtctccccgacctctgggaaacccggaatctaagtccgagtcgccgctactagtcgctcccgaaaccctagcctcggcggtgatggcagcggcggcagtgaggctggttaaggagcgcgagaggaagaatcaggtggtgccaccggcatctccgttaatggaggagcccgtgtggaaggaggaaaagcagcgtaagaaaaggaaacacgtgggcgccgcactggtggttccatcgccgccgactcctgatgcggcccaaaacttgcggatggaagccaagatgatggctgagggggcgacggtgaggaagaagcagaggcggctgaaggcggggcaggagcaatccggcgagccaccattttcaattgatgtccatccacaaggaggggaagaagctactgatgatggtggcgttggcgtcatggtcactcagtgtgtcaagaggagcaaaagcaagaactcccgggttttgaagacgcagcagacactgccccaagcgaggctgcctcctcgaggccacccatcatctgggtcttctctactcactggaaaagagacctccaaggctgcctggacagcaacctcaaacaccaagcaaccatgcccagcctcagaatcaacctcagattcacaagaagaggcaaggatcgaagggaaagaaaagcctgagaagaagatgacaagggagatggcagtgagggagtctacccgacatttggcaatactggaatccatgtctgcttcctcagtcccagtcgctcccgaaaccccaacctcggcggcgatgacagcagcgacagtgatgcaggataaggagtgcaagagggagaatcaggaggcactgccggcagctccattaattgaggaccctgtgccgaaggtagaaaagaggcacaagaaaagaaaagtggcacaaatcacgcagatggaaaacaaggtgatgacagagggtgcgacggtaaggaagaaacataggcggcagaaggtgaagcaggagcaatctggccaaacaccatttctcaatgatgtctattcaaaggcaggggaagaagctgctgctggtggcgtcatgggcagtcagtgtgtcaagaggatcgaccgcagcaagaattccaaggttttgaagaagcagcagacactgccccaaggctttttccctcccatagccaatcccgatttcattgatcaggaccccaattattgttctccttttggtgcattttttgcccaattcgcctacaaacctgagcgccggcaagatgggaatggttcgccacttcctagtaccactggtcgcacagcgaggctgcctcctcgaggccacccgttatctgggtcttctctgcttactgcaaaagaggtctccaaggctgcccggacaacaaccttgaacaccaagcaaccatgcccagcctcagaatcaacctcagattcacaagaagaggcaaggatcgaagggaaagaaaagcctgagaagaagatgacaagggagatggcagcgagggagtctccccgacatttggcaatactggaatccatgtctgcttcctcagtcccagtcgctcccgaaaccctaacctcggcgatgacagcagcgacagtgatgcaggataaggagcgcaagagggagaatcaggaggcgctgccggcagctccattaattgaggaccctgtgccgaaggtagaaaagaggcacaagaaaaggaaggatagggaggctgcaatgattataccatcggtgcccactgctgctgtggcacaaatcacgcagatggaaaagaaggtgatgacagagggtgcgacggtaaggaagaaacataggcggcggaaggtggagcaggagcaatctggcgaaacaccatttctcaatgatgtctattcaagggcaggggaagaagctgctgctggtggcgtcatgggcagacagtgtgtcaagaggatcaaccgcagcaagaattccaaggttttgaagaagcagcagacactgccccaaggctttttccctcccatagctaatcccgatttcattgatcaggaccccaattattgttcaccttttggtgcattttttgcccaattcgcctacaaacctgagcgccggcaagatgggaatggttcgccacttcctagtaccactggtcgcacagcgaggctgcctcctcgaggccacccgtcatctgggtcttctctgcttactgcaaaagaggtctccaaggctgcccggacaacaaccttgaacaccaagcaagcatgcccagcctcagcatcaatctcaagttcacaagaaggtgtaagggtcaagggaaagaaaaaacctgaggagaaaacgacaatggagaaaaagccgaggaaaccaccgatattacttagtcctgccgagaagtggtcagataaataccgccgcctgccgctggatcagctggtgcccccaccacgctccccccataagctattgcaggagaagtatgcttctgacccctggaaggtcatcgtaatatgcatgctcctcaacttaacacagggaaaacaggtcaggaagaaagtgaagggcttcttcaagcgctatcctgatgctcagactgcatatacagctgatcccgaaaagatggcagagtatctagcacctcttggactgcagcgtgtgaaaacaaacagaattcagaaattctctaaggcttacgttggagaagaatggacctatatcactgagctttgtggtgttggcaagtatgctgctgatgcttacgcaatcttctgtgctggaagggcaaacgaagtggttccaaaagatcacaagttagtagattactggaattatgtctgttttgagttaccctcgattcagaaatcgcaggaggctggagtgacggagctgggaaaccttgtcgctaaggtgcaggaagttgctgtcagctgttgacatgggaaaacagtaacgcggtggcaagcgcttttggtgtttctgcttgcagcttaataatgttattcgctccgttctttttttatctgtcatgttttagttcaaaaatattcgaggactgaggtagtataatatatggggtatttatctagttattggggtagcctatgtttcaatgctggttttgagacaaaaattgaaggtaactagccaaaaggaagaaagaaaagtgctgattttgtgtgcatcctgcatgcccaagaatcctatctttaaagtcctgaatctatggaaaacttaaactcccaatgcatgcgtattgtattcaattaatatgcatgcatgtgtgtgtggaggtgtagcgcgcgtggctctaagaagtcaaatgatcaattgatttggtgatagtgcaatcaatgggactaaccaatgtggtgtttggtttaccatgtgtaatggtatcgcaatggaagttaaaaagcgg

SEQ ID NO: 57370 - DNA, 3193 bp, Zea Mays
gtattttggcggcaacatcagggagtttcccgcgaaaaataattgtggctgtccttgccttggccgcttggcttccatctatctattcctccattttcactgcgttcggacccacattcgttcacttcccaatactggagtggatggtagaaaggagagagagaccacactatgtcgatcgcttggcttccatctacaaatcccgccgccggcccgctggcgatcgctgaggcggtccccatctcgatctcccttgtccagttcttttcgccggagtgcactatgtcggcactgccgccggcagaggaattggatgcgtcgcatcagaagaagcggcggaggaggaaaaagcacagggagcaggtggaggctatagcggcatcctcggagcctcctccacctccggcaagcccggagtccaagcccaagtcaacaattccagtcgctcccgaaaccctaacctcagcggcggtgagggagtctccccgacctctgggaaacccggaatctaagtccgagtcgccgctactagtcgctcccgaaaccctagcctcggcggtgatggcagcggcggcagtgaggctggttaaggagcgcgagaggaagaatcaggtggtgccaccggcatctccgttaatggaggagcccgtgtggaaggaggaaaagcagcgtaagaaaaggaaacacgtgggcgccgcactggtggttccatcgccgccgactcctgatgcggcccaaaacttgcggatggaagccaagatgatggctgagggggcgacggtgaggaagaagcagaggcggctgaaggcggggcaggagcaatccggcgagccaccattttcaattgatgtccatccacaaggaggggaagaagctactgctgctgctggtggcgtcatgggcagtcagtgtgtcaagaggatcgaccgcagcaagaattccaaggttttgaagaagcagcagacactgccccaaggctttttccctcccatagccaatcccgatttcattgatcaggaccccaattattgttctccttttggtgcattttttgcccaattcgcctacaaacctgagcgccggcaagatgggaatggttcgccacttcctagtaccactggtcgcacagcgaggctgcctcctcgaggccacccgttatctgggtcttctctgcttactgcaaaagaggtctccaaggctgcccggacaacaaccttgaacaccaagcaaccatgcccagcctcagaatcaacctcagattcacaagaagaggcaaggatcgaagggaaagaaaagcctgagaagaagatgacaagggagatggcagcgagggagtctccccgacatttggcaatactggaatccatgtctgcttcctcagtcccagtcgctcccgaaaccctaacctcggcgatgacagcagcgacagtgatgcaggataaggagcgcaagagggagaatcaggaggcgctgccggcagctccattaattgaggaccctgtgccgaaggtagaaaagaggcacaagaaaaggaaggatagggaggctgcaatgattataccatcggtgcccactgctgctgtggcacaaatcacgcagatggaaaagaaggtgatgacagagggtgcgacggtaaggaagaaacataggcggcggaaggtggagcaggagcaatctggcgaaacaccatttctcaatgatgtctattcaagggcaggggaagaagctgctgctggtggcgtcatgggcagacagtgtgtcaagaggatcaaccgcagcaagaattccaaggttttgaagaagcagcagacactgccccaaggctttttccctcccatagctaatcccgatttcattgatcaggaccccaattattgttcaccttttggtgcattttttgcccaattcgcctacaaacctgagcgccggcaagatgggaatggttcgccacttcctagtaccactggtcgcacagcgaggctgcctcctcgaggccacccgtcatctgggtcttctctgcttactgcaaaagaggtctccaaggctgcccggacaacaaccttgaacaccaagcaagcatgcccagcctcagcatcaatctcaagttcacaagaaggtgtaagggtcaagggaaagaaaaaacctgaggagaaaacgacaatggagaaaaagccgaggaaaccaccgatattacttagtcctgccgagaagtggtcagataaataccgccgcctgccgctggatcagctggtgcccccaccacgctccccccataagctattgcaggagaagtatgcttctgacccctggaaggtcatcgtaatatgcatgctcctcaacttaacacagggaaaacaggtcaggaagaaagtgaagggcttcttcaagcgctatcctgatgctcagactgcatatacagctgatcccgaaaagatggcagagtatctagcacctcttggactgcagcgtgtgaaaacaaacagaattcagaaattctctaaggcttacgttggagaagaatggacctatatcactgagctttgtggtgttggcaaggcaaacgaagtggttccaaaagatcacaagttagtagattactggaattatgtctgttttgagttaccctcgattcagaaatcgcaggaggctggagtgacggagctgggaaaccttgtcgctaaggtgcaggaagttgctgtcagctgttgacatgggaaaacagtaacgcggtggcaagcgcttttggtgtttctgcttgcagcttaataatgttattcgctccgttctttttttatctgtcatgttttagttcaaaaatattcgaggactgaggtagtataatatatggggtatttatctagttattggggtagcctatgtttcaatgctggttttgagacaaaaattgaaggtaactagccaaaaggaagaaagaaaagtgctgattttgtgtgcatcctgcatgcccaagaatcctatctttaaagtcctgaatctatggaaaacttaaactcccaatgcatgcgtattgtattcaattaatatgcatgcatgtgtgtgtggaggtgtagcgcgcgtggctctaagaagtcaaatgatcaattgatttggtgatagtgcaatcaatgggactaaccaatgtggtgtttggtttaccatgtgtaatggtatcgcaatggaagttaaaaagcgg

SEQ ID NO: 57371 - DNA, 4020 bp, Zea Mays
gtattttggcggcaacatcagggagtttcccgcgaaaaataattgtggctgtccttgccttggccgcttggcttccatctatctattcctccattttcactgcgttcggacccacattcgttcacttcccaatactggagtggatggtagaaaggagagagagaccacactatgtcgatcgcttggcttccatctacaaatcccgccgccggcccgctggcgatcgctgaggcggtccccatctcgatctcccttgtccagttcttttcgccggagtgcactatgtcggcactgccgccggcagaggaattggatgcgtcgcatcagaagaagcggcggaggaggaaaaagcacagggagcaggtggaggctatagcggcatcctcggagcctcctccacctccggcaagcccggagtccaagcccaagtcaacaattccagtcgctcccgaaaccctaacctcagcggcggtgagggagtctccccgacctctgggaaacccggaatctaagtccgagtcgccgctactagtcgctcccgaaaccctagcctcggcggtgatggcagcggcggcagtgaggctggttaaggagcgcgagaggaagaatcaggtggtgccaccggcatctccgttaatggaggagcccgtgtggaaggaggaaaagcagcgtaagaaaaggaaacacgtgggcgccgcactggtggttccatcgccgccgactcctgatgcggcccaaaacttgcggatggaagccaagatgatggctgagggggcgacggtgaggaagaagcagaggcggctgaaggcggggcaggagcaatccggcgagccaccattttcaattgatgtccatccacaaggaggggaagaagctactgatgatggtggcgttggcgtcatggtcactcagtgtgtcaagaggagcaaaagcaagaactcccgggttttgaagacgcagcagacactgccccaaggttttttccctcccatggccaatcccaattccattgatcaggaccccaattattcctcaccttttggtgcattctttgcccaattcgcctacaaacctgctaatatcgctgatcgcccagcgaggctgcctcctcgaggccacccatcatctgggtcttctctactcactggaaaagagacctccaaggctgcctggacagcaacctcaaacaccaagcaaccatgcccagcctcagaatcaacctcagattcacaagaagaggcaaggatcgaagggaaagaaaagcctgagaagaagatgacaagggagatggcagtgagggagtctacccgacatttggcaatactggaatccatgtctgcttcctcagtcccagtcgctcccgaaaccccaacctcggcggcgatgacagcagcgacagtgatgcaggataaggagtgcaagagggagaatcaggaggcactgccggcagctccattaattgaggaccctgtgccgaaggtagaaaagaggcacaagaaaagaaaagtggcacaaatcacgcagatggaaaacaaggtgatgacagagggtgcgacggtaaggaagaaacataggcggcagaaggtgaagcaggagcaatctggccaaacaccatttctcaatgatgtctattcaaaggcaggggaagaagctgctgctggtggcgtcatgggcagtcagtgtgtcaagaggatcgaccgcagcaagaattccaaggttttgaagaagcagcagacactgccccaaggctttttccctcccatagccaatcccgatttcattgatcaggaccccaattattgttctccttttggtgcattttttgcccaattcgcctacaaacctgagcgccggcaagatgggaatggttcgccacttcctagtaccactggtcgcacagcgaggctgcctcctcgaggccacccgttatctgggtcttctctgcttactgcaaaagaggtctccaaggctgcccggacaacaaccttgaacaccaagcaaccatgcccagcctcagaatcaacctcagattcacaagaagaggcaaggatcgaagggaaagaaaagcctgagaagaagatgacaagggagatggcagcgagggagtctccccgacatttggcaatactggaatccatgtctgcttcctcagtcccagtcgctcccgaaaccctaacctcggcgatgacagcagcgacagtgatgcaggataaggagcgcaagagggagaatcaggaggcgctgccggcagctccattaattgaggaccctgtgccgaaggtagaaaagaggcacaagaaaaggaaggatagggaggctgcaatgattataccatcggtgcccactgctgctgtggcacaaatcacgcagatggaaaagaaggtgatgacagagggtgcgacggtaaggaagaaacataggcggcggaaggtggagcaggagcaatctggcgaaacaccatttctcaatgatgtctattcaagggcaggggaagaagctgctgctggtggcgtcatgggcagacagtgtgtcaagaggatcaaccgcagcaagaattccaaggttttgaagaagcagcagacactgccccaaggctttttccctcccatagctaatcccgatttcattgatcaggaccccaattattgttcaccttttggtgcattttttgcccaattcgcctacaaacctgagcgccggcaagatgggaatggttcgccacttcctagtaccactggtcgcacagcgaggctgcctcctcgaggccacccgtcatctgggtcttctctgcttactgcaaaagaggtctccaaggctgcccggacaacaaccttgaacaccaagcaagcatgcccagcctcagcatcaatctcaagttcacaagaaggtgtaagggtcaagggaaagaaaaaacctgaggagaaaacgacaatggagaaaaagccgaggaaaccaccgatattacttagtcctgccgagaagtggtcagataaataccgccgcctgccgctggatcagctggtgcccccaccacgctccccccataagctattgcaggagaagtatgcttctgacccctggaaggtcatcgtaatatgcatgctcctcaacttaacacagggaaaacaggtcaggaagaaagtgaagggcttcttcaagcgctatcctgatgctcagactgcatatacagctgatcccgaaaagatggcagagtatctagcacctcttggactgcagcgtgtgaaaacaaacagaattcagaaattctctaaggcttacgttggagaagaatggacctatatcactgagctttgtggtgttggcaagtatgctgctgatgcttacgcaatcttctgtgctggaagggcaaacgaagtggttccaaaagatcacaagttagtagattactggaattatgtctgttttgagttaccctcgattcagctgtgtgtctgttgcagaaatcgcaggaggctggagtgacggagctgggaaaccttgtcgctaaggtgcaggaagttgctgtcagctgttgacatgggaaaacagtaacgcggtggcaagcgcttttggtgtttctgcttgcagcttaataatgttattcgctccgttctttttttatctgtcatgttttagttcaaaaatattcgaggactgaggtagtataatatatggggtatttatctagttattggggtagcctatgtttcaatgctggttttgagacaaaaattgaaggtaactagccaaaaggaagaaagaaaagtgctgattttgtgtgcatcctgcatgcccaagaatcctatctttaaagtcctgaatctatggaaaacttaaactcccaatgcatgcgtattgtattcaattaatatgcatgcatgtgtgtgtggaggtgtagcgcgcgtggctctaagaagtcaaatgatcaattgatttggtgatagtgcaatcaatgggactaaccaatgtggtgtttggtttaccatgtgtaatggtatcgcaatggaagttaaaaagcgg

SEQ ID NO: 57372 - DNA, 1986 bp, Zea Mays
gcggcgatgacagcagcgacagtgatgcaaggatcgaagggaaagaaaagcctgagaagaagatgacaagggagatggcagcgagggagtctccccgacatttggcaatactggaatccatgtctgcttcctcagtcccagtcgctcccgaaaccctaacctcggcgatgacagcagcgacagtgatgcaggataaggagcgcaagagggagaatcaggaggcgctgccggcagctccattaattgaggaccctgtgccgaaggtagaaaagaggcacaagaaaaggaaggatagggaggctgcaatgattataccatcggtgcccactgctgctgtggcacaaatcacgcagatggaaaagaaggtgatgacagagggtgcgacggtaaggaagaaacataggcggcggaaggtggagcaggagcaatctggcgaaacaccatttctcaatgatgtctattcaagggcaggggaagaagctgctgctggtggcgtcatgggcagacagtgtgtcaagaggatcaaccgcagcaagaattccaaggttttgaagaagcagcagacactgccccaaggctttttccctcccatagctaatcccgatttcattgatcaggaccccaattattgttcaccttttggtgcattttttgcccaattcgcctacaaacctgagcgccggcaagatgggaatggttcgccacttcctagtaccactggtcgcacagcgaggctgcctcctcgaggccacccgtcatctgggtcttctctgcttactgcaaaagaggtctccaaggctgcccggacaacaaccttgaacaccaagcaagcatgcccagcctcagcatcaatctcaagttcacaagaaggtgtaagggtcaagggaaagaaaaaacctgaggagaaaacgacaatggagaaaaagccgaggaaaccaccgatattacttagtcctgccgagaagtggtcagataaataccgccgcctgccgctggatcagctggtgcccccaccacgctccccccataagctattgcaggagaagtatgcttctgacccctggaaggtcatcgtaatatgcatgctcctcaacttaacacagggaaaacaggtcaggaagaaagtgaagggcttcttcaagcgctatcctgatgctcagactgcatatacagctgatcccgaaaagatggcagagtatctagcacctcttggactgcagcgtgtgaaaacaaacagaattcagaaattctctaaggcttacgttggagaagaatggacctatatcactgagctttgtggtgttggcaagtatgctgctgatgcttacgcaatcttctgtgctggaagggcaaacgaagtggttccaaaagatcacaagttagtagattactggaattatgtctgttttgagttaccctcgattcagaaatcgcaggaggctggagtgacggagctgggaaaccttgtcgctaaggtgcaggaagttgctgtcagctgttgacatgggaaaacagtaacgcggtggcaagcgcttttggtgtttctgcttgcagcttaataatgttattcgctccgttctttttttatctgtcatgttttagttcaaaaatattcgaggactgaggtagtataatatatggggtatttatctagttattggggtagcctatgtttcaatgctggttttgagacaaaaattgaaggtaactagccaaaaggaagaaagaaaagtgctgattttgtgtgcatcctgcatgcccaagaatcctatctttaaagtcctgaatctatggaaaacttaaactcccaatgcatgcgtattgtattcaattaatatgcatgcatgtgtgtgtggaggtgtagcgcgcgtggctctaagaagtcaaatgatcaattgatttggtgatagtgcaatcaatgggactaaccaatgtggtgtttggtttaccatgtgtaatggtatcgcaatggaagttaaaaagcgg

SEQ ID NO: 57373 - DNA, 165 bp, Zea Mays
cccagatccaaatcatgcaggaataggcacccggcggttaccaggcatcgaatgtgatccatctccaagtttcgagggatcgaagatcaagcttcgacgaccaagtgatctggctcttcgagttccacgaagttgaagaccctgaacatctgtttggcgaaggca

SEQ ID NO: 57374 - DNA, 298 bp, Zea Mays
tccaaatcatgcaggaataggcacccggcggttaccaggcatcggttgtccacattgcaaccactgctcaggagaagatgaagcctactcaggagttccaagactacgacgagttctaggtgtgggttggcggaaacccccagtcagctgcctgtgaaggccctatctttactgcgttccgcttagcactttgatttacccgttgagttgatgactatgtggatgtctttgacatcgtgatgtaataagttaatactcttttatgttattattcgagcactatgcgatgatgttcttt

SEQ ID NO: 57375 - DNA, 1247 bp, Zea Mays
gacctcgcacgatccgtcatgcccccgctcgcacaatccatcgtgccttcccctccgtgcaaccgcccgacccgccaggaacccgcctctccttcccctccgcgctcaagccgaggaaatgcacccacaaatttggaagccgcggcaatggcgcccgatttggctatggcgtgcatgatctccatcggctgatttggaaaccgcgcaatctacgtcggcgatttggaaaccacgatctcggtaccgcaatcacaacaattgtcccccaaatatcgcgaccaccgacgtccagctgacttaggaacgaccaagcaggagcctactcctcatttgcccctgttcagaggtaaagacaattacttccctctacaatccaagtatatagagagatcgacgtcaaaaggaacctcgggctttgtattcaagtcggcgagatttccttatgtgaaaacgaagaaccaacagaaacgaatctaatggggcataatgctggtcgcacaccattaatagacatctcaaacacaagcgttacaggtgatcaaataggatcaaactcgcttggaccaatagacgatgctaatgaacgtaagaggcaaagggatagagaaagatatgccacgatgtccattgaacaaaagaatgagaaaaataggaagcatcgtgaagcacgtcaacgaaatacaggactacccctaaagtctgagtcatctagaggtcctattaaaaacactccattggctggtaattctatcgaacgaaagaggcaaagggatagagaaaggcgtgcaacaatgtcggttgaacaaaggaatgagtacaataacaagcgtcgtcaaatgcgacgacgaaataagggacaaaatgtgatgcccgatgtttcaggagatggcgacaacaaagtaaatgtggatctagatgatgatagcgactggctgcatcggaacgagacattccagacaaacaactatgtcgcaacgacagaccttctgtcaccaggcagtgtgcatgaatctgttggtgtcattggggaaccgagtatcggcgttagggagtataggcttgaacgccttaggttgtataatcagacaccaaagcgaaaagaggcaaagatagagtacatgagaaaacgtagagtgctacaggctgacactctgaatgttgcgtccatcgccatggaggacccaacatatacccctgaggttgtgcaccctgcaacggaaccttcaacagttaccacctgcgactag

SEQ ID NO: 57376 - DNA, 791 bp, Zea Mays
cgcacgatccgtcatgcccccgctcgcacaatccatcgtgccttcccctccgtgcaaccgcccgacccgccaggaacccgcctctccttcccctccgcgctcaagccgaggaaatgcacccacaaatttggaagccgcggcaatggcgcccgatttggctatggcgtgcatgatctccatcggctgatttggaaaccgcgcaatctacgtcggcgatttggaaaccacgatctcggtaccgcaatcacaacaattgtcccccaaatatcgcgaccaccgacgtccagctgacttaggaacgaccaagcaggagcctactcctcatttgcccctgttcagaggtaaagacaattacttccctctacaatccaagtatatagagagatcgacgtcaaaaggaacctcgggctttgtattcaagtcggcgagatggcgacaacaaagtaaatgtggatctagatgatgatagcgactggctgcatcggaacgagacattccagacaaacaactatgtcgcaacgacagaccttctgtcaccaggcagtgtgcatgaatctgttggtgtcattggggaaccgagtatcggcgttagggagtataggcttgaacgccttaggttgtataatcagacaccaaagcgaaaagaggcaaagatagagtacatgagaaaacgtagagtgctacaggctgacactctgaatgttgcgtccatcgccatggaggacccaacatatacccctgaggttgtgcaccctgcaacggaaccttcaacagttaccacctgcgactag

SEQ ID NO: 57377 - DNA, 261 bp, Zea Mays
tggaatcaccgtcgttcttgcaaacgtcgattgggtttgtttatggaccgagagatgatgatcgggctagtgatgtggtgccaaccacaagatgcagtcggtggacgacccaaggaaggattgacttaaccagtggatgctcgccaagcgagtgccacccagcaaacactgcctaagtgttaaattaaggcaagccccagttttatgcataaccgttatatatatgctattttactgcacttaatgtttgtaggcttgtac

SEQ ID NO: 57378 - DNA, 190 bp, Zea Mays
ccgggtgtttgctgttttgcgcagccccgtcgtcatcgtcgttcgccccggagaggaaccccgtgttggcgtggagaagaaggcaagccgctcgacgctcgtcgatgtttgtagcgatgcacaaattggaatcaccgtcgttcttgcaaacgtcgattgggtttgtttatggtgagccaatgcatgtcgc

SEQ ID NO: 57379 - DNA, 2104 bp, Zea Mays
ctaatcataaaaatcgaagacgtttgattcccgcaccacgagtccacggcacaaggaaatgaaacaatccacgcggaacgccgccgccgccattcccatggttttccatgctcggttgcgagccagcaattccatttcagtgtcctccctcgtctcgagaccttgccccatccagcccaacgctccgtccatcaactgaatagcttggcggtgtaaccctgtcgtgtgcgatgagctcctcgccgttgatcaccgccgcggcgtcggctgccgtggtggcgctggctgtcgccaaccgcgtgctctacaagctcgcgcttgtgcctctcaaggcgtaccctttcttcctcgcccagctcaccaccttcgggtacgttgccgtgtacttctcgatgctctacacgaggtaccgcactgggttggtgactagagacatgctggcgctccccaagcaccggttcgtcgctatcggtttgctggaggcacttggagtctttgctggcatgtctgctggagctatgctaccagggcctgcgattcctatactgtcccagtcattcttggtctggcagcttatcttctctgccctgcttttagggaggacatattcggccagacaagtcattggttgcttcctagtagtttctggtgtgattcttgctgttgcaagatgtaaagttaatttggccagcactcatgatcgcttcatcagcatttcacgctggtgcatctattctgaaggaagctgttttcattgatggtgcaaaacgtcttaaggttgatgcatcttttctccatggtgcttttatttgttcatcagtaaacattaatctatgaactcatggtctaatgttcataagacaaaatatttatgcaggggaagcggccagacatatttgtggtcaattcatttggatctggatttcaggctgtttttgtctttcttcttcttccattcctttctaatttgaggggaattaagtttgctgagcttcctgcttatttaaatggtggtgctgagtgcttcttaaatgtcgcagaaagtccaatcgactgcggaggagctccattcctgcctttgctgtttatagtggtgaatatggcattcaatgtctctctcctcaatttggtgaagatgtcatctgccattgtggcttcacttacagcaacatcagcaggtcctttattgttttttgacccttgattaccccgcctgcattttcatcttctttcttggtgttattgctggtgggtagaccgaatggaggaatataaccatacaatactaattatgcttgttttgaattttagtgccaatatcgatctatattctttcacttcctttgccctacatccctcatggcacggaattaagcacgtctttcatcattggtgccgtgatattgctgatgggcctgattctgtataaccttcctcaatcgtcactgaaacaattgaaggctgattgaaggtaaagtgacacactgccacatgccttgtaacagagagtttactgattgatattttatggtgaaattgatttccacactgaactatacgaagcatgtgactcattcagattttgtattatgaatgttatcgaaattaagattttctaaaacgcaagcaacatgtgtatgtagtagggacatttttaatacttaccctatagtctggaagtgtgatctaaatgcaagttcagtgagcttggtgcttagaacgatgctttgtgttcagtgattacattgtgctatgatgatgatgtgtgttcaattacgtgtaatccatagttattaaggcggtaaggtgaccaaccctctttttaccttttaggcgataaagcaccctagactgtcagggattaggttttagtggcggcgacggttcctcgaccgtgcgagcggcggcgatctcaggggcgagtgagggcaggggctccccccgaggcgcgtgatcggcggcggcaacgctcccccggatcgagcgacggcgatgccctcgaggcggatgagcagcgacgcaccctaggttcggtggtgacggtggttgcatgaagcgcggtaggcttcgacagtagcggtggcatccatgagagacatgggtg

SEQ ID NO: 57380 - DNA, 1833 bp, Zea Mays
ctaatcataaaaatcgaagacgtttgattcccgcaccacgagtccacggcacaaggaaatgaaacaatccacgcggaacgccgccgccgccattcccatggttttccatgctcggttgcgagccagcaattccatttcagtgtcctccctcgtctcgagaccttgccccatccagcccaacgctccgtccatcaactgaatagcttggcggtgtaaccctgtcgtgtgcgatgagctcctcgccgttgatcaccgccgcggcgtcggctgccgtggtggcgctggctgtcgccaaccgcgtgctctacaagctcgcgcttgtgcctctcaaggcgtaccctttcttcctcgcccagctcaccaccttcgggtacgttgccgtgtacttctcgatgctctacacgaggtaccgcactgggttggtgactagagacatgctggcgctccccaagcaccggttcgtcgctatcggtttgctggaggcacttggagtctttgctggcatgtctgctggagctatgctaccagggcctgcgattcctatactgtcccagggaggacatattcggccagacaagtcattggttgcttcctagtagtttctggtgtgattcttgctgttgcaagtggagcggatgatggccagcttctttcagatgtaaagttaatttggccagcactcatgatcgcttcatcagcatttcacgctggtgcatctattctgaaggaagctgttttcattgatggtgcaaaacgtcttaaggttgatgcatcttttctccatggtgcttttatttgttcatcagtaaacattaatctatgaactcatggtctaatgttcataagacaaaatatttatgcaggggaagcggccagacatatttgtggtcaattcatttggatctggatttcagactgcggaggagctccattcctgcctttgctgtttatagtggtgaatatggcattcaatgtctctctcctcaatttggtgaagatgtcatctgccattgtggcttcacttacagcaacatcagcagtgccaatatcgatctatattctttcacttcctttgccctacatccctcatggcacggaattaagcacgtctttcatcattggtgccgtgatattgctgatgggcctgattctgtataaccttcctcaatcgtcactgaaacaattgaaggctgattgaaggtaaagtgacacactgccacatgccttgtaacagagagtttactgattgatattttatggtgaaattgatttccacactgaactatacgaagcatgtgactcattcagattttgtattatgaatgttatcgaaattaagattttctaaaacgcaagcaacatgtgtatgtagtagggacatttttaatacttaccctatagtctggaagtgtgatctaaatgcaagttcagtgagcttggtgcttagaacgatgctttgtgttcagtgattacattgtgctatgatgatgatgtgtgttcaattacgtgtaatccatagttattaaggcggtaaggtgaccaaccctctttttaccttttaggcgataaagcaccctagactgtcagggattaggttttagtggcggcgacggttcctcgaccgtgcgagcggcggcgatctcaggggcgagtgagggcaggggctccccccgaggcgcgtgatcggcggcggcaacgctcccccggatcgagcgacggcgatgccctcgaggcggatgagcagcgacgcaccctaggttcggtggtgacggtggttgcatgaagcgcggtaggcttcgacagtagcggtggcatccatgagagacatgggtg

SEQ ID NO: 57381 - DNA, 1671 bp, Zea Mays
ctaatcataaaaatcgaagacgtttgattcccgcaccacgagtccacggcacaaggaaatgaaacaatccacgcggaacgccgccgccgccattcccatggttttccatgctcggttgcgagccagcaattccatttcagtgtcctccctcgtctcgagaccttgccccatccagcccaacgctccgtccatcaactgaatagcttggcggtgtaaccctgtcgtgtgcgatgagctcctcgccgttgatcaccgccgcggcgtcggctgccgtggtggcgctggctgtcgccaaccgcgtgctctacaagctcgcgcttgtgcctctcaaggcgtaccctttcttcctcgcccagctcaccaccttcgggtacgttgccgtgtacttctcgatgctctacacgaggtaccgcactgggttggtgactagagacatgctggcgctccccaagcaccggttcgtcgctatcggtttgctggaggcacttggagtctttgctggcatgtctgctggagctatgctaccagggcctgcgattcctatactgtcccagtcattcttggtctggcagcttatcttctctgccctgcttttagggaggacatattcggccagacaagtcattggttgcttcctagtagtttctggtgtgattcttgctgttgcaagtggagcggatgatggccagcttctttcagatgtaaagttaatttggccagcactcatgatcgcttcatcagcatttcacgctggtgcatctattctgaaggaagctgttttcattgatggtgcaaaacgtcttaaggggaagcggccagacatatttgtggtcaattcatttggatctggatttcaggctgtttttgtctttcttcttcttccattcctttctaatttgaggggaattaagtttgctgagcttcctgcttatttaaatggtggtgctgagtgcttcttaaatgtcgcagaaagtccaatcgactgcggaggagctccattcctgcctttgctgtttatagtggtgaatatggcattcaatgtctctctcctcaatttggtgaagatgtcatctgccattgtggcttcacttacagcaacatcagcaggtcctttattgttttttgacccttgattaccccgcctgcattttcatcttctttcttggtgttattgctggtgggtagaccgaatggaggaatataaccatacaatactaattatgcttgttttgaattttagtgccaatatcgatctatattctttcacttcctttgccctacatccctcatggcacggaattaagcacgtctttcatcattggtgccgtgatattgctgatgggcctgattctgtataaccttcctcaatcgtcactgaaacaattgaaggctgattgaaggcgataaagcaccctagactgtcagggattaggttttagtggcggcgacggttcctcgaccgtgcgagcggcggcgatctcaggggcgagtgagggcaggggctccccccgaggcgcgtgatcggcggcggcaacgctcccccggatcgagcgacggcgatgccctcgaggcggatgagcagcgacgcaccctaggttcggtggtgacggtggttgcatgaagcgcggtaggcttcgacagtagcggtggcatccatgagagacatgggtg

SEQ ID NO: 57382 - DNA, 1547 bp, Zea Mays
ctaatcataaaaatcgaagacgtttgattcccgcaccacgagtccacggcacaaggaaatgaaacaatccacgcggaacgccgccgccgccattcccatggttttccatgctcggttgcgagccagcaattccatttcagtgtcctccctcgtctcgagaccttgccccatccagcccaacgctccgtccatcaactgaatagcttggcggtgtaaccctgtcgtgtgcgatgagctcctcgccgttgatcaccgccgcggcgtcggctgccgtggtggcgctggctgtcgccaaccgcgtgctctacaagctcgcgcttgtgcctctcaaggcgtaccctttcttcctcgcccagctcaccaccttcgggtacgttgccgtgtacttctcgatgctctacacgaggtaccgcactgggttggtgactagagacatgctggcgctccccaagcaccggttcgtcgctatcggtttgctggaggcacttggagtctttgctggcatgtctgctggagctatgctaccagggcctgcgattcctatactgtcccagtcattcttggtctggcagcttatcttctctgccctgcttttagggaggacatattcggccagacaagtcattggttgcttcctagtagtttctggtgtgattcttgctgttgcaagtggagcggatgatggccagcttctttcagatgtaaagttaatttggccagcactcatgatcgcttcatcagcatttcacgctggtgcatctattctgaaggaagctgttttcattgatggtgcaaaacgtcttaaggggaagcggccagacatatttgtggtcaattcatttggatctggatttcagactgcggaggagctccattcctgcctttgctgtttatagtggtgaatatggcattcaatgtctctctcctcaatttggtgaagatgtcatctgccattgtggcttcacttacagcaacatcagcaggtcctttattgttttttgacccttgattaccccgcctgcattttcatcttctttcttggtgttattgctggtgggtagaccgaatggaggaatataaccatacaatactaattatgcttgttttgaattttagtgccaatatcgatctatattctttcacttcctttgccctacatccctcatggcacggaattaagcacgtctttcatcattggtgccgtgatattgctgatgggcctgattctgtataaccttcctcaatcgtcactgaaacaattgaaggctgattgaaggcgataaagcaccctagactgtcagggattaggttttagtggcggcgacggttcctcgaccgtgcgagcggcggcgatctcaggggcgagtgagggcaggggctccccccgaggcgcgtgatcggcggcggcaacgctcccccggatcgagcgacggcgatgccctcgaggcggatgagcagcgacgcaccctaggttcggtggtgacggtggttgcatgaagcgcggtaggcttcgacagtagcggtggcatccatgagagacatgggtg

SEQ ID NO: 57383 - DNA, 1728 bp, Zea Mays
ctaatcataaaaatcgaagacgtttgattcccgcaccacgagtccacggcacaaggaaatgaaacaatccacgcggaacgccgccgccgccattcccatggttttccatgctcggttgcgagccagcaattccatttcagtgtcctccctcgtctcgagaccttgccccatccagcccaacgctccgtccatcaactgaatagcttggcggtgtaaccctgtcgtgtgcgatgagctcctcgccgttgatcaccgccgcggcgtcggctgccgtggtggcgctggctgtcgccaaccgcgtgctctacaagctcgcgcttgtgcctctcaaggcgtaccctttcttcctcgcccagctcaccaccttcgggtacgttgccgtgtacttctcgatgctctacacgaggtaccgcactgggttggtgactagagacatgctggcgctccccaagcaccggttcgtcgctatcggtttgctggaggcacttggagtctttgctggcatgtctgctggagctatgctaccagggcctgcgattcctatactgtcccagggaggacatattcggccagacaagtcattggttgcttcctagtagtttctggtgtgattcttgctgttgcaagtggagcggatgatggccagcttctttcagatgtaaagttaatttggccagcactcatgatcgcttcatcagcatttcacgctggtgcatctattctgaaggaagctgttttcattgatggtgcaaaacgtcttaaggttgatgcatcttttctccatggtgcttttatttgttcatcagtaaacattaatctatgaactcatggtctaatgttcataagacaaaatatttatgcaggggaagcggccagacatatttgtggtcaattcatttggatctggatttcaggctgtttttgtctttcttcttcttccattcctttctaatttgaggggaattaagtttgctgagcttcctgcttatttaaatggtggtgctgagtgcttcttaaatgtcgcagaaagtccaatcgactgcggaggagctccattcctgcctttgctgtttatagtggtgaatatggcattcaatgtctctctcctcaatttggtgaagatgtcatctgccattgtggcttcacttacagcaacatcagcaggtcctttattgttttttgacccttgattaccccgcctgcattttcatcttctttcttggtgttattgctggtgggtagaccgaatggaggaatataaccatacaatactaattatgcttgttttgaattttagtgccaatatcgatctatattctttcacttcctttgccctacatccctcatggcacggaattaagcacgtctttcatcattggtgccgtgatattgctgatgggcctgattctgtataaccttcctcaatcgtcactgaaacaattgaaggctgattgaaggcgataaagcaccctagactgtcagggattaggttttagtggcggcgacggttcctcgaccgtgcgagcggcggcgatctcaggggcgagtgagggcaggggctccccccgaggcgcgtgatcggcggcggcaacgctcccccggatcgagcgacggcgatgccctcgaggcggatgagcagcgacgcaccctaggttcggtggtgacggtggttgcatgaagcgcggtaggcttcgacagtagcggtggcatccatgagagacatgggtg

SEQ ID NO: 57384 - DNA, 1857 bp, Zea Mays
ctaatcataaaaatcgaagacgtttgattcccgcaccacgagtccacggcacaaggaaatgaaacaatccacgcggaacgccgccgccgccattcccatggttttccatgctcggttgcgagccagcaattccatttcagtgtcctccctcgtctcgagaccttgccccatccagcccaacgctccgtccatcaactgaatagcttggcggtgtaaccctgtcgtgtgcgatgagctcctcgccgttgatcaccgccgcggcgtcggctgccgtggtggcgctggctgtcgccaaccgcgtgctctacaagctcgcgcttgtgcctctcaaggcgtaccctttcttcctcgcccagctcaccaccttcgggtacgttgccgtgtacttctcgatgctctacacgaggtaccgcactgggttggtgactagagacatgctggcgctccccaagcaccggttcgtcgctatcggtttgctggaggcacttggagtctttgctggcatgtctgctggagctatgctaccagggcctgcgattcctatactgtcccagggaggacatattcggccagacaagtcattggttgcttcctagtagtttctggtgtgattcttgctgttgcaagtggagcggatgatggccagcttctttcagatgtaaagttaatttggccagcactcatgatcgcttcatcagcatttcacgctggtgcatctattctgaaggaagctgttttcattgatggtgcaaaacgtcttaaggggaagcggccagacatatttgtggtcaattcatttggatctggatttcaggctgtttttgtctttcttcttcttccattcctttctaatttgaggggaattaagtttgctgagcttcctgcttatttaaatggtggtgctgagtgcttcttaaatgtcgcagaaagtccaatcgactgcggaggagctccattcctgcctttgctgtttatagtggtgaatatggcattcaatgtctctctcctcaatttggtgaagatgtcatctgccattgtggcttcacttacagcaacatcagcagtgccaatatcgatctatattctttcacttcctttgccctacatccctcatggcacggaattaagcacgtctttcatcattggtgccgtgatattgctgatgggcctgattctgtataaccttcctcaatcgtcactgaaacaattgaaggctgattgaaggtaaagtgacacactgccacatgccttgtaacagagagtttactgattgatattttatggtgaaattgatttccacactgaactatacgaagcatgtgactcattcagattttgtattatgaatgttatcgaaattaagattttctaaaacgcaagcaacatgtgtatgtagtagggacatttttaatacttaccctatagtctggaagtgtgatctaaatgcaagttcagtgagcttggtgcttagaacgatgctttgtgttcagtgattacattgtgctatgatgatgatgtgtgttcaattacgtgtaatccatagttattaaggcggtaaggtgaccaaccctctttttaccttttaggcgataaagcaccctagactgtcagggattaggttttagtggcggcgacggttcctcgaccgtgcgagcggcggcgatctcaggggcgagtgagggcaggggctccccccgaggcgcgtgatcggcggcggcaacgctcccccggatcgagcgacggcgatgccctcgaggcggatgagcagcgacgcaccctaggttcggtggtgacggtggttgcatgaagcgcggtaggcttcgacagtagcggtggcatccatgagagacatgggtg

SEQ ID NO: 57385 - DNA, 531 bp, Zea Mays
ccagcccccaggcgtccagcctacgcaagccacctccacgctccgaccttcgaccctgcgcctgtgtgagacctgcgtggcccacagcctcggccactgtcgcgcggagcccgcccccctatggtcaccggccgactcgtccaccatggtccgagtcagagcagtggcacggtggccgtctccacctgcctagcgccgcccaagtcgccgccccgcccccgccactccgccaggccacccatggcagcgcggctagtccctcgtcggctcgctcgcccctgcttgctcgtcccacggtcccagcttccctcccaggtagcagcagcgtgcggtgctctagcgtcgggtgcacaattgaggacttagatctattttggttcctattccaaacatcagtatacatagatggaaataaaaacaagtgaaagaagactgcccaaaaaagtatctctctttattatgcgcaactagggggactgaactgggaggttgcaatgaagcagtggtggctgattcagtgatccagtgttg

SEQ ID NO: 57386 - DNA, 367 bp, Zea Mays
atgacttgaagtctgaggctgaacattgtcgtgtggtgttcagccacgtaataatacttaaatatgagatacaataataatttgtttacacccattcatgtcaatcagtgcacaaaaagtaacctcgatgtattgtctactactactgctactactaattaggtacacatcataatcctctcaccaaacctctccatgaactttgccaccgaccaggtatatatcggtcggacccacctgccattctttgaaagtttcacaagatctcttctcaagcaaggccgcagcacaagcattgcttacgccgtgagcaaccagtccagtcagcatttgtcgacgtccctccacttgaggtactcgactccgg

SEQ ID NO: 57387 - DNA, 3146 bp, Zea Mays
ccaagatcctcttctccgctccgctcttggttggttctcccaaagtctccggccaccgcccattcccgaaattcccaagcacgcatcgagatctcttgaggcccctgctcctcgcctttgacgtgcacaacccccagtctcagatcacaccaccaccatggggagcataccgccgccgcatgctcctgccgccgcctcgccgccgccgcatcctctccggcgctcccgctcgccctcgcgctccgcctcggcctgccaccgccaccgccgtctcacccgctgctccccgccgccccctgccccgccgacgctcgcaggctcctccgatcgctccaccgcctccgccgcctcctcgggctctggcgccgcctcccatccggctccggctacgcttcctcgtccctgtcctccccgtccctcgccgcgttcgagtgggccccgcgcgccactctcgcggcgtcattcctcgccccctccgcgcacggggacgttggcgtctccaagtcccccttcgtgacgctttccatcgaggagtccggcgacacggtggcggtcgttggggaagtgtcggtctgcgtcaattttgtcgggaacaaccacattgtggtggaggcggtggtgggtgaagatgaggagtttgaaatggtgagcggttctccgccggaggagatctacgcgcactttgccaataggaggagccctggggcaggtaggaggaggaggggcaagcaggggaggaaaggaggcgggatggaggcagagcacttcgtgaggattgcggacactgagccgacgaaggcacggccactgcaagggctgtggaaggtgcttcttctgtacacctgttgtatacgatctcctagcactatgctgttttcaattggaaagttctattgtttgcatatttagctgcaacacgctgttgaacgccattgcagcattgctggtttgtgtaattacccataaactagatgcctggcactgcactcattcccatgaagatgcctcattcactcagggaaccttacagccttgggatgggatggaatagaggatcaaaatttaccctgcatcctctaaatgttgaagcggaaagtgccttccgggttgacagcttctcctttttgaagattttggttcacaattgttgtcacacactactagaaccattgttggagattgaactaaaaaccgtactcatctgtttgagttttattcactctctattacagaagaattagatgctcgtagcagatgtccactcaggttgagattttgcacattcagcacatatgcttagtgcttaccacgcatcagggtgacatgcgtaaagttgtgtgcttgctatggtgaactacatctagaatttcagggatcattgttttagttgggctcaattgaataccatttaggagaacatgaagctgcttctttagaattggctagatgctagctttggccttttaatatttatggtgcatttatatactgccttatgggttgtattttctctgacataatttcctgctggtgtttatgtagactttgaacccttaactgttatcagaactacctgtccatgtggcaattgggttaatgaaatgacaagttttctttgtcaagcaaagctgtatggtttggttcctgccattgcatagtcccttgcacagatcgattctcatagtgttatgtcattgttgattaagagccatgaactgaagtgtactacgcctttggccttactgtgagtcttgaccatgaaccggtgtcagcaggaagcatgctagtgctgaattgcattatgtgaatgggttcccaaaacaaccctaagatttgttttaatttcatcggatcttgatacttcagaagcttggaaaaatctcattcaatcatcccaaaacatttctagacacaaaaactactctatgactggttagtttcaaatgctatctgtatgtgtccaaataataatggttttctggattatttcgttactaaaagctggggaattatcagttaacttttccagattccgatattgctgtgttgttatcaactacattttttatgaggaaacaattgtgggaggctgaatataattagctgtgcctgtagctgcatattattagggtgaattagttgtggtttaactaatcacgatccttgtaccgaatcctacaatattttgcagttagtatcatcttgtttagcattttgcatcttacctctgatttggagaaggcagatgtcatcttgtttattcattttcatcgaaatgttataaatttttgtttttatctcatcaatgatgaatgaccatttaatttttaatattcatttatctgtttctttgaaaaattgttttcatgttgttgatcactaggcatgcacacaacagaatgacgttaccaattttgaattggaggactactatggtatatgcgaggataggactttggaattttaccttgtcacctatgatgacattggtggagtaacttgtcgacgatttagggatacacagagccaaaactctggctactctcctgttttttggacaacagatactacatttcttgaaccaccattctctgagcaagagctggttaattatgccagccgcgatcatatccaaggtgttacttccaatcatgcaggcgctgagaacagggttgtctcaaggatattacgcatcaattccagttatgatgtggttgatactcatctctcaactcccttggatgatgggaggagcgtggagggaaggatttggctatatgaggatggaaccttcggttttggatttgttggcagtaattcaattatagatctgaggcatgtctcctcggctggctgtattcttgatacttaacattagatgatctggatcttgctggcacataatttttgccagcgagccccttgtacagtacttggtgtgaggcatgttgcctccgatttgttgtactctcgatgataaggtcactgaatactggtcccttctggcacttagctgttgctagaatgcccttgtaaaccgaaccttggttcctttgggcatgtacttgttgacataataccgatgtatattacagtactatttgttcattgaattccaataaactgcaactgttacttccttgtga

SEQ ID NO: 57388 - DNA, 2491 bp, Zea Mays
ggttctcccaaagtctccggccaccgcccattcccgaaattcccaagcacgcatcgagatctcttgaggcccctgctcctcgcctttgacgtgcacaacccccagtctcagatcacaccaccaccatggggagcataccggcggcggcggcggggccgggcacggagctggaggacctgccggaggacgcgctgctgtgcatcctcgtcctcctcgcgccgcccgacgccgccgccgccgcatgctcctgccgccgcctcgccgccgccgcatcctctccggcgctcccgctcgccctcgcgctccgcctcggcctgccaccgccaccgccgtctcacccgctgctccccgccgccccctgccccgccgacgctcgcaggctcctccgatcgctccaccgcctccgccgcctcctcgggctctggcgccgcctcccatccggctccggctacgcttcctcgtccctgtcctccccgtccctcgccgcgttcgagtgggccccgcgcgccactctcgcggcgtcattcctcgccccctccgcgcacggggacgttggcgtctccaagtcccccttcgtgacgctttccatcgaggagtccggcgacacggtggcggtcgttggggaagtgtcggtctgcgtcaattttgtcgggaacaaccacattgtggtggaggcggtggtgggtgaagatgaggagtttgaaatggtgagcggttctccgccggaggagatctacgcgcactttgccaataggaggagccctggggcaggtaggaggaggaggggcaagcaggggaggaaaggaggcgggatggaggcagagcacttcgtgaggattgcggacactgagccgacgaaggcacggccactgcaagggctgtggaagactttgaacccttaactgttatcagaactacctgtccatgtggcaattgggttaatgaaatgacaagttttctttgtcaagcaaagctgtatggtttggttcctgccattgcatagtcccttgcacagatcgattctcatagtgttatgtcattgttgattaagagccatgaactgaagtgtactacgcctttggccttactgtgagtcttgaccatgaaccggtgtcagcaggaagcatgctagtgctgaattgcattatgtgaatgggttcccaaaacaaccctaagatttgttttaatttcatcggatcttgatacttcagaagcttggaaaaatctcattcaatcatcccaaaacatttctagacacaaaaactactctatgactggttagtttcaaatgctatctgtatgtgtccaaataataatggttttctggattatttcgttactaaaagctggggaattatcagttaacttttccagattccgatattgctgtgttgttatcaactacattttttatgaggaaacaattgtgggaggctgaatataattagctgtgcctgtagctgcatattattagggtgaattagttgtggtttaactaatcacgatccttgtaccgaatcctacaatattttgcagttagtatcatcttgtttagcattttgcatcttacctctgatttggagaaggcagatgtcatcttgtttattcattttcatcgaaatgttataaatttttgtttttatctcatcaatgatgaatgaccatttaatttttaatattcatttatctgtttctttgaaaaattgttttcatgttgttgatcactaggcatgcacacaacagaatgacgttaccaattttgaattggaggactactatggtatatgcgaggataggactttggaattttaccttgtcacctatgatgacattggtggagtaacttgtcgacgatttagggatacacagagccaaaactctggctactctcctgttttttggacaacagatactacatttcttgaaccaccattctctgagcaagagctggttaattatgccagccgcgatcatatccaaggtgttacttccaatcatgcaggcgctgagaacagggttgtctcaaggatattacgcatcaattccagttatgatgtggttgatactcatctctcaactcccttggatgatgggaggagcgtggagggaaggatttggctatatgaggatggaaccttcggttttggatttgttggcagtaattcaattatagatctgaggcatgtctcctcggctggctgtattcttgatacttaacattagatgatctggatcttgctggcacataatttttgccagcgagccccttgtacagtacttggtgtgaggcatgttgcctccgatttgttgtactctcgatgataaggtcactgaatactggtcccttctggcacttagctgttgctagaatgcccttgtaaaccgaaccttggttcctttgggcatgtacttgttgacataataccgatgtatattacagtactatttgttcattgaattccaataaactgcaactgttacttccttgtga

SEQ ID NO: 57389 - DNA, 2612 bp, Zea Mays
ggttctcccaaagtctccggccaccgcccattcccgaaattcccaagcacgcatcgagatctcttgaggcccctgctcctcgcctttgacgtgcacaacccccagtctcagatcacaccaccaccatggggagcataccgccgccgcatgctcctgccgccgcctcgccgccgccgcatcctctccggcgctcccgctcgccctcgcgctccgcctcggcctgccaccgccaccgccgtctcacccgctgctccccgccgccccctgccccgccgacgctcgcaggctcctccgatcgctccaccgcctccgccgcctcctcgggctctggcgccgcctcccatccggctccggctacgcttcctcgtccctgtcctccccgtccctcgccgcgttcgagtgggccccgcgcgccactctcgcggcgtcattcctcgccccctccgcgcacggggacgttggcgtctccaagtcccccttcgtgacgctttccatcgaggagtccggcgacacggtggcggtcgttggggaagtgtcggtctgcgtcaattttgtcgggaacaaccacattgtggtggaggcggtggtgggtgaagatgaggagtttgaaatggtgagcggttctccgccggaggagatctacgcgcactttgccaataggaggagccctggggcaggtaggaggaggaggggcaagcaggggaggaaaggaggcgggatggaggcagagcacttcgtgaggattgcggacactgagccgacgaaggcacggccactgcaagggctgtggaaggtgcttcttctgtacacctgttgtatacgatctcctagcactatgctgttttcaattggaaagttctattgtttgcatatttagctgcaacacgctgttgaacgccattgcagcattgctggtttgtgtaattacccataaactagatgcctggcactgcactcattcccatgaagatgcctcattcactcagggaaccttacagccttgggatgggatggaatagaggatcaaaatttaccctgcatcctctaaatgttgaagcggaaagtgccttccgggttgacagcttctcctttttgaagattttggttcacaattgttgtcacacactactagaaccattgttggagattgaactaaaaaccgtactcatctgtttgagttttattcactctctattacagaagaattagatgctcgtagcagatgtccactcaggttgagattttgcacattcagcacatatgcttagtgcttaccacgcatcagggtgacatgcgtaaagttgtgtgcttgctatggtgaactacatctagaatttcagggatcattgttttagttgggctcaattgaataccatttaggagaacatgaagctgcttctttagaattggctagatgctagctttggccttttaatatttatggtgcatttatatactgccttatgggttgtattttctctgacataatttcctgctggtgtttatgtagactttgaacccttaactgttatcagaactacctgtccatgtggcaattgggttaatgaaatgacaagttttctttgtcaagcaaagctgtatggtttggttcctgccattgcatagtcccttgcacagatcgattctcatagtgttatgtcattgttgattaagagccatgaactgaagtgtactacgcctttggccttactgtgagtcttgaccatgaaccggtgtcagcaggaagcatgctagtgctgaattgcattatgtgaatgggttcccaaaacaaccctaagatttgttttaatttcatcggatcttgatacttcagaagcttggaaaaatctcattcaatcatcccaaaacatttctagacacaaaaactactctatgactgggtatatgcgaggataggactttggaattttaccttgtcacctatgatgacattggtggagtaacttgtcgacgatttagggatacacagagccaaaactctggctactctcctgttttttggacaacagatactacatttcttgaaccaccattctctgagcaagagctggttaattatgccagccgcgatcatatccaaggtgttacttccaatcatgcaggcgctgagaacagggttgtctcaaggatattacgcatcaattccagttatgatgtggttgatactcatctctcaactcccttggatgatgggaggagcgtggagggaaggatttggctatatgaggatggaaccttcggttttggatttgttggcagtaattcaattatagatctgaggcatgtctcctcggctggctgtattcttgatacttaacattagatgatctggatcttgctggcacataatttttgccagcgagccccttgtacagtacttggtgtgaggcatgttgcctccgatttgttgtactctcgatgataaggtcactgaatactggtcccttctggcacttagctgttgctagaatgcccttgtaaaccgaaccttggttcctttgggcatgtacttgttgacataataccgatgtatattacagtactatttgttcattgaattccaataaactgcaactgttacttccttgtga

SEQ ID NO: 57390 - DNA, 2805 bp, Zea Mays
taaggtttgttattgtttgaccccaaataggtggtggccatcatagagatggtgtcccaccttcaggataatcatcttaggtacatcaagttatcatctccttagttcgaaggtttcttttcaaggccacattcgagatagctttatttgtcttacatcttatctactatctcgctctataaggtctcgacccttcgcgggtgaaacctaggatcatcccaaggtccggactcactacgagggagacctatggatcattagtgtttagtccaaaaaggcgccaacacactttttgacaactctactggggacgaaagatccgatccattagattatatctattaagttagacctattagatcggccacaatggccggtcccaaagatcccaacaatgttaccccacacaacaatacaaggctaactaacttaccaaccactgaggatgagaaattagaagaccacatgaaaaggctgaacgagaagttccaacgacaaaaggctcaaataagcaagatgacataaaagtgatacctcttacacttcaaagtagatgaccacctgaaggtcgtcaaggagacggaagtaaagtacaattccatgtgagccttgcagcagcagctccccattataagtaacaccacaccaatagccgatattcaatatattaattttttttgataatcgaattaaaagtataattgaggatatagataatatgacacatgtattagaaaaactcatacacctaattttttgtcatatgaattggacactaaaataattgcgtcaaacacatcggcaacaaatgtggcttctcagtcccaaccatattgttgtttgccgatgaactcatatccggggcaaatgctgccgccatcctcactaattattgtggtaattagacatgtgcattccgccacctgactgtagtttacctccgatagacttcttaacttgattcatcacttgtcaatgagacaaccaatcctagaacaattaacctacttattctctggccttgtggcctattcaatcttgttatttaagtacatgagaactttagttgtagagggctaaaagcgagttactcctctctaccatcaaagggttaaagattagttgacactaaacgagacatagctcatcttaggaacactgcaaaaacactggtttgaagtagtagattaggggataagaaaagaaaaaggcgagtgagagtctcgttttcaaatgaataaataattccgagtgaaaagtaatttctcatttactttagttccctcttttgattccatcaattgctacacctgcacgaaacctgtctctaccttcccgcataaaataatatttgctttgcagcttgtatgctctactgtgtaaattcgatttgtagctgtaccttgtattgttgttagctgcccgtagctattaagggcttgtttggatccacggggatttcttttctattcaattttgaatagcaagagatttaatctcatccaatgcacctctaaccgaacaagccttggaaaggttagggcttttatcggatgaattcaatttcacagggaaaacatagcaacatggaaaagttcccgcgttcaaaaaaacagggtctagattgtttgcagttcgtgtttttccttttatttttgtttgtttggattctctatatttttttttctattgttatgcatcctttagccaaatatcatcttaaacaaaagatggaccaagccaagagctaacagttctgtgtcttgtaggtgcagaggcatcttctgaccaatgaaaatggtgaaaccaggtagagtatctgactcaaagataacaacgtttacatgcagatacaagacaacaatatcattgttctctgaacacacatgacctccattggtaaaactgaaatcgaaccacgccacagaaatacatagtgctctaggcaaatgcaagaggattcattattcatctgtggttgtgctcagtgatcaatactcttgttcatcctcctccagtgacccagcctgtgatgtcttctcgtggtcattctcaagctggctgaagttccccttctccttgatcagctggatgtggtggtgcttgcagtacagcttcccctcgtgcgcaatgtagttagaagggctgatggtgcaccctccatggcagcacttgaagcagctcttgtggtacatagtgttattaacagtgacctggatgcttaaccggttgtcaagtgaagaaggctcaaactaccggaagaatgattgagatggttgaacacagaatcttaccctctcagttggatagactgtcttgctgcatccaacacatttctctctggtgccagcaaaggcgcttgagactttagtagcattcttgagggtgcccttgcagtggtggcagcggaagcaggccttgtggtagatgcggttgtcggcggtgagcttgtccacaaggtacaccgtcttgtcgcaggcggtgcacttggtggtcgtcccctggaaggaggtcgccatggccgccgtcgtctctcttccaacgacacactctgcttacggaggcgaggctgtgtagccgatggctgcctatatgggaactgtgggttggttggttggtggtggtggtgagctgcagccgggtattgataccgctaggtaggcaggacacagctagctagtgagggagaatgttgggggtgtcaccgtgtcaggcatcagccatgggaaggagagagagagagagagagcatacgaggtggaggtgggggtcggtcctgcacgaatgccgccataccaccatgat

SEQ ID NO: 57391 - DNA, 3458 bp, Zea Mays
taaggtttgttattgtttgaccccaaataggtggtggccatcatagagatggtgtcccaccttcaggataatcatcttaggtacatcaagttatcatctccttagttcgaaggtttcttttcaaggccacattcgagatagctttatttgtcttacatcttatctactatctcgctctataaggtctcgacccttcgcgggtgaaacctaggatcatcccaaggtccggactcactacgagggagacctatggatcattagtgtttagtccaaaaaggcgccaacacactttttgacaactctactggggacgaaagatccgatccattagattatatctattaagttagacctattagatcggccacaatggccggtcccaaagatcccaacaatgttaccccacacaacaatacaaggctaactaacttaccaaccactgaggatgagaaattagaagaccacatgaaaaggctgaacgagaagttccaacgacaaaaggctcaaataagcaagatgacataaaagtgatacctcttacacttcaaagtagatgaccacctgaaggtcgtcaaggagacggaagtaaagtacaattccatgtgagccttgcagcagcagctccccattataagtaacaccacaccaatagccgatattcaatatattaattttttttgataatcgaattaaaagtataattgaggatatagataatatgacacatgtattagaaaaactcatacacctaattttttgtcatatgaattggacactaaaataattgcgtcaaacacatcggcaacaaatgtggcttctcagtcccaaccatattgttgtttgccgatgaactcatatccggggcaaatgctgccgccatcctcactaattattgtggtaattagacatgtgcattccgccacctgactgtagtttacctccgatagacttcttaacttgattcatcacttgtcaatgagacaaccaatcctagaacaattaacctacttattctctggccttgtggcctattcaatcttgttatttaagtacatgagaactttagttgtagagggctaaaagcgagttactcctctctaccatcaaagggttaaagattagttgacactaaacgagacatagctcatcttaggaacactgcaaaaacactggtttgaagtagtagattaggggataagaaaagaaaaaggcgagtgagagtctcgttttcaaatgaataaataattccgagtgaaaagtaatttctcatttactttagttccctcttttgattccatcaattgctacacctgcacgaaacctgtctctaccttcccgcataaaataatatttgctttgcagcttgtatgctctactgtgtaaattcgatttgtagctgtaccttgtattgttgttagctgcccgtagctattaagggcttgtttggatccacggggatttcttttctattcaattttgaatagcaagagatttaatctcatccaatgcacctctaaccgaacaagccttggaaaggttagggcttttatcggatgaattcaatttcacagggaaaacatagcaacatggaaaagttcccgcgttcaaaaaaacagggtctagattgtttgcagttcgtgtttttccttttatttttgtttgtttggattctctatatttttttttctattgttatgcatcctttagccaaatatcatcttaaacaaaagatggaccaagccaagagctaacagttctgtgtcttgtaggtgcagaggcatcttctgaccaatgaaaatggtgaaaccaggtagagtatctgactcaaagataacaacgtttacatgcagatacaagacaacaatatcattgttctctgaacacacatgacctccattgtgacccagcctgtgatgtcttctcgtggtcattctcaagctggctgaagttccccttctccttgatcagctggatgtggtggtgcttgcagtacagcttcccctcgtgcgcaatgtagttagaagggctgatggtgcaccctccatggcagcacttgaagcagctcttgtggtacatagtgttattaacagtgacctggatgcttaaccggttgtcaagtgaagaaggctcaaactaccggaagaatgattgagatggttgaacacagaatcttaccctctcagttggatagactgtcttgctgcatccaacacatttctctctggtgccagcaaaggcgcttgagactttagtagcattctgccaaataatatgcaatcatgatgagcatcatctagtgccagttgttcataaagaacaaaacatgaatggtgtcaactggatgggtgatatgaaacatgtttaaaaccatatacagcactgatctagtcatatacctcatgaatatcaagttttttttttgtgatctgttaaatatctggtgttctgatctttttattggacaagatttactctgttctgatccaagcataacagttaggttttgagtggatctttctctctctaaccattgggattgctgtgcattcaagatccaagcatctcacatcatgtttaaggagttgtttgtgcatcaatgattgaatgtatttgtttcctgtgctactctggactgaaaaagtgaaggaaaaaaatgcaaactttgtaggcactgagaaaaacacataaacacatgaatattaaggcgttgcatatacctcattcccaacgtttctttctggcttgacaaccttcggagttcctgaagccatttgtaggtgaggagacacgcaagaacaccactggatctatttcgtactgcaaagggaaggggggaaaacgatgataccttcgaagctcttgtccaagctccctgtcctcttgaacagctggtcgaagtgaggcctgcagtagagcactccctcgaaggagttgtagttggcgagctgcggcggagaacatacatcctcagacgcacacacaaaccaatgctggtctcagctttgcagatgaagcatgcaggtcgtggtaccttgagggtgcccttgcagtggtggcagcggaagcaggccttgtggtagatgcggttgtcggcggtgagcttgtccacaaggtacaccgtcttgtcgcaggcggtgcacttggtggtcgtcccctggaaggaggtcgccatggccgccgtcgtctctcttccaacgacacactctgcttacggaggcgaggctgtgtagccgatggctgcctatatgggaactgtgggttggttggttggtggtggtggtgagctgcagccgggtattgataccgctaggtaggcaggacacagctagctagtgagggagaatgttgggggtgtcaccgtgtcaggcatcagccatgggaaggagagagagagagagagagcatacgaggtggaggtgggggtcggtcctgcacgaatgccgccataccaccatgat

SEQ ID NO: 57392 - DNA, 1729 bp, Zea Mays
tttttccttttatttttgtttgtttggattctctatatttttttttctattgttatgcatcctttagccaaatatcatcttaaacaaaagatggaccaagccaagagctaacagttctgtgtcttgtaggtgcagaggcatcttctgaccaatgaaaatggtgaaaccagtgacccagcctgtgatgtcttctcgtggtcattctcaagctggctgaagttccccttctccttgatcagctggatgtggtggtgcttgcagtacagcttcccctcgtgcgcaatgtagttagaagggctgatggtgcaccctccatggcagcacttgaagcagctcttgtggtacatagtgttattaacagtgacctggatgcttaaccggttgtcaagtgaagaaggctcaaactaccggaagaatgattgagatggttgaacacagaatcttaccctctcagttggatagactgtcttgctgcatccaacacatttctctctggtgccagcaaaggcgcttgagactttagtagcattctgccaaataatatgcaatcatgatgagcatcatctagtgccagttgttcataaagaacaaaacatgaatggtgtcaactggatgggtgatatgaaacatgtttaaaaccatatacagcactgatctagtcatatacctcatgaatatcaagttttttttttgtgatctgttaaatatctggtgttctgatctttttattggacaagatttactctgttctgatccaagcataacagttaggttttgagtggatctttctctctctaaccattgggattgctgtgcattcaagatccaagcatctcacatcatgtttaaggagttgtttgtgcatcaatgattgaatgtatttgtttcctgtgctactctggactgaaaaagtgaaggaaaaaaatgcaaactttgtaggcactgagaaaaacacataaacacatgaatattaaggcgttgcatatacctcattcccaacgtttctttctggcttgacaaccttcggagttcctgaagccatttgtaggtgaggagacacgcaagaacaccactggatctatttcgtactgcaaagggaaggggggaaaacgatgataccttcgaagctcttgtccaagctccctgtcctcttgaacagctggtcgaagtgaggcctgcagtagagcactccctcgaaggagttgtagttggcgagctgcggcggagaacatacatcctcagacgcacacacaaaccaatgctggtctcagctttgcagatgaagcatgcaggtcgtggtaccttgagggtgcccttgcagtggtggcagcggaagcaggccttgtggtagatgcggttgtcggcggtgagcttgtccacaaggtacaccgtcttgtcgcaggcggtgcacttggtggtcgtcccctggaaggaggtcgccatggccgccgtcgtctctcttccaacgacacactctgcttacggaggcgaggctgtgtagccgatggctgcctatatgggaactgtgggttggttggttggtggtggtggtgagctgcagccgggtattgataccgctaggtaggcaggacacagctagctagtgagggagaatgttgggggtgtcaccgtgtcaggcatcagccatgggaaggagagagagagagagagagcatacgaggtggaggtgggggtcggtcctgcacgaatgccgccataccaccatgat

SEQ ID NO: 57393 - DNA, 1137 bp, Zea Mays
gagtcgtccttggatgcggcagcgtcccacgcgtcttctcgggactcgggttcaccaatcgatgcagcagctgctgacttcctgttcttcactcgcctgcaggctgcagcggaccacgcgctcgacatgctcacgcggaggcggagctgcagagaccagtagcaggcagatgcgtcacagcacgaccttgcctcgctcactttcacttccacttcagctattatttgggcagacgagcagcggcgctgtcgcagacgcatagcatcccacgggttgtcactcactcggcccagcgctcacgagtcacgacccacaactgacgatcgtccatgttcggcggcgacgatggcgctagggtgctgcggcgagccggcagtttcccacgggcaccgcccccgccggcgacggcgaggcacatcctctccaggagcgagtcaatcaagaagaagagcggagccgcgaagcgggcacgcgtgcgcgcggggctcgccgccgcgctgcaggagctcaggctcgccggccggaagcacggggccagaagccggggaggcggggcgttgtcagaagctgtcagcgccggcgccggagccggagccgccgcggggccgcgggctagcgatgacgtccaaggaggaggctgctgcgccgctgctcccctgcacgtgtccgacgttgccgaggcgcaggcgagcagaggagcagcagccaccgctggtcgtcgtcgcgtgaacgcagcaggcggctggacgacgccgctgctgcttgtagcggtgctagccctggcgtgcgtggtggcgctcggcaggacgccggccgtttgctgctgcacctgtgcggcatggctgtgccgcggcccttgtgcggttcggcctcgacggacgggcgccaccggagcagcgagccctctgctgcagcgcggtgcagcgtcagatgcctgtggctgtgagcttaacattggacatgtacgagcaggtgattagcatcagacgtgttgtttgtcactcatggaccgtccgtgtattgttattactccctctttccatgcatgaggccttatttcgttgtagtacatgtatcgggatcggacaggattgaaagaaattattttcctttatattcaatttgattagaaatgga

SEQ ID NO: 57394 - DNA, 940 bp, Zea Mays
tccgttggttgattctgattcgtctcctgttggctgttgccttcgaccgcctccacctcgtctccgacgatgtcctccgtcgccggtgagggggaaggagagggaggaggacggcgccgacgggaggagccaaggagccaacaacatgaggacggggtcgaggtggccgacggaaaactggatttgggtgacctttacggcgcggcggcggggtgggtagaggcgcggaccagctgcccgcacctcggcaccatgccgcccgctggtgctgaattgctgatgaccttgctcgcgtgcctccgcccgactctccgtgctccagatgtcatgaccctgctgaaaactgattatgcttgatatgcaaagatgtgatgtgcagtcgttttatcaacaaacatatgttgtgccatcatgaagaagaaactggtcactgtcttgctttgagcttcagtgatctttcagtttggtgtttctcatgtgactcgtacctagatgttcaagccattttagaattgcgcccaagttgcacatttgttgaagtttggagaacaccttttcaatcacttgaagtactggatttcagcactggtgaaagtggaagttcatcaaggacttagttgtttgtattcaagtgatgagtttcttttcatgatgcttcaatcagatcaagacagacagttgtgtagtatcctggcactttttaagcttcagtgcgatataattcatttgagaagcccttgttcttttcctttttaccttcagttagtatatttcaataacccaaagcttccttagatagttatcacgacaggtgtaaatccctgtgcaccataggagatttgaaggcattattattgctttgatatggacatccagaaaaaatattcaacttcgaatatctttggctttggtgactggtcgtgattgtgcacttctatat

SEQ ID NO: 57395 - DNA, 1937 bp, Zea Mays
ataaaagctgcgcccgcctagatcgtctccgcacagggaagaagagatccaaagtcagagcctgctcacccgaccccgaaaaaccttcacaaaccaccaaagtcaacgtcggaaaccaagaagaaggcaagaagcagaggggaattctttctctcccttcctatctctctccctctctattgcatcccgcgaccatgtccgcgcgtccgccgcctcaaccgcgaccgcgcctggcgctgccgccgcgctcgacggcggaatcgctcttcacgggcgccggggacaccagccccggcccgctcacgctcgcctcagcgctcttcccctctgacgccgacggcggcggtggccccggaggcgcgtcctcctccgccgccggggccgcgaccttcacgcagctcctcaccggctcccttgcgcctcctcctcctccgcagcagcggcatgacgcggagaggggacgaggcggcggggtcgccagggccgggccggcgctctcggtggcgccgccggcatcggcgtccgctggcgcgtccgtgttcacggtgccgcccggcctcagcccctccggtttgttcgactcccctgggctgctcttctcgcccgccatgggcggttttggaatgtcgcaccagcaggctttggctcaagttacagcccaagcaacccattctccactcagaatgtttgatcaccttgaacagccatctttctccacagctgcaacaatgtctggagctctacagcacatgaattctgcagccagtatggcaggaatttcagatatgacaatggcaacagcaaacaatgagaacacgtcctttcagtctgctgaggcgtctcagaggtatcaagttaatgcccctgttgataagcctgctgatgatggctataactggcggaaatatggtcagaaggtggtaaagggcagtgattgtccaaggagctactacaaatgcactcatcccaattgcccggtcaagaaaaaggtagagcatgcagaggatggtcagatatctgagatcatatacaaaggcaaacacaatcaccaacgtccaccaaataagcgggcaaaagacggcaactcttcagcagctgatcacaatgaacaatctaatgataccgcatctggcttgtcagctgccaagagagatcaggacaatatatatgggatgtctgagcaagcatctggtttaagtgacggagatgatatggatgatggtgaatcaaggccacatgaagtggatgacgctgataatgagagcaaaagaaggaatatacacatttcttcacaaaggaccttgtcagagcctaagattattgtgcaaacaaccagtgaggttgatcttctggatgatggttatagatggcgcaagtatgggcagaaggtagtcaaagggaatccacatccaaggagctactacaagtgcacgtttgctggatgcaatgttaggaagcacattgagaggtgttcatcagaccctaaggctgtcataacaacctatgaaggaaaacataaccatgaaccaccggttggtcggggcggcaaccagaacgcaggaatgtcatcacaacagaaagggcagaacaacgtatccagcaatcaagcttcattctcgagaccagacttgagcaacgctaaccagatgccaattggaatcttacagttcaagagcgagcaatagtaacatgtatttggatgacgttcttttggcaaatacaagatgcctgcaattcgtacagccatatggcatcaaaagtttcttaaagcctgataatttcaaatggtacactattaggttggttgagcacaaacttttccaaggagagaaatatcatcatgaatgattttcagggtgagatttgacagggacatttgatcctaacggtgagcagtgccttatcctttttttttattcctctgtgttagaggtttc

SEQ ID NO: 57396 - DNA, 2594 bp, Zea Mays
cgaagcttagtgtataaaaaaattagacgaaaaaaaagagaacactttatttagaaacagaaggacctaccttcaaatttaagggataacctctacgattgtagggtgccgctgaagttagagattctgcacccagcataaaaaggcccctcgtcacctgtcgattatcatgttgatcggcggcttgggcgctgtgtgatgatagaatggagcgcattgctctcgtctgcacgccgttctggcctcgctcgccagctcgggcggctccacgtctttgtcctgcagcagggggcagtggagatgaccgatgaggccatctcccgcttccctgtcagctctggaatgagatgcggcacgatctcgttgccctgttactccgcgccagctccatctccgtctccggcggcgctcgcgcagcacagacgctccacccgctggcgctcaagtccgggcgcgcctcggaggctcgcgtggcgaccgcgctggccgtggcgtacgcgcggtggggcctcgtcgcgcacgcacgccgcgtgttcgacgaagcgccgcgcagggacctggtcctctacaacgccatggtctcctgctatgcctcccacggtctcgcgcgcgaggcctgggcgctctttgccgccgcgcggcgctccgggatcgcccccgacgggttcaccttcagcgccctgctccgtccgccgccgcgccgtggccgccacccaaccgccggcgccgtcgatgacgggctgctgctcaggatgggagccctggcgcacagcctcgtgctcaggctgggtctcctcgcagacgtggtggttgccaccgcgctgctcgacatgtacgccaagtgcggccgggttgacgaggcgcgctgggtgttcgacgctatggcggtcaggaacgtcgtctcatggaacgcgatcgtagtctgctatggtcgggttggtggaggcaaggacgctgttgagctgttccggtggatgctgagagacgggagctgctgcccggatgagctcacgcttgccagtgtgctaagctcgtgcgccagcgtggcggcagcaaacgaggctactcaggttcatgcttatgccataaagagggggtttcacaggtttctgcaggtggccaatgctgttatcacagcgtacggcaagaccggttttgctcgagaggcggggcaaatgtttgctatgatctgcgacccagatgtagttacgtggtcctgtatggtttcgtctttggcgtaccttggactatgcaaggatgcagttcatgtgtttgagagaatgctccaacaaggcgtacagcctgacagcgtcgccttccttggggttctttctgcctgcagccatgccgggctcgttgaagaaggcctgcactatttccttatgatggcgaggggctacaacatcgatccaaattcacagcaccttgcttgtctggttgatctcttggggagagctggtaggattcaagatgcttacaacattgttatcaagctttcttgcgagaacaatgctgatatcgttggagctttccttggtgcctgtaagctgcggggcaaaattgagttggcaaagtgggctgccgataggcttttatgcctggaaccaagtgaggcagtaaattatctgcttatgtctaacgcatttgctgctgcaggagcttggaacgagcttgcagaagtaagaagtgtgatgagacataggtgtggcagcaaggttcctggttgtagttggatagaggtaggtggaacagttcagacatttgtctccaacgatgtggtgctccatcagtcgattgaaatgcaacaaatggtgcaacttactatttcggaagcacaaaaagagtgcaacgaagacacaacttgtggtgatccaattttggttcaagaatgattagtttggcatctacaatcgtcccagagcttaccaatgtgatgtttctcatgtgcctagactcataaaggaatacgttgaggaagtatctactcaactgaaaatggtctgtgattctgattcagacgagttgcctcttgaagagaaactcgcatttatgcatgagacaagacatgcctttggtagaacagccttgctgctaagtggaggtgcttcattatgatcctttaatgtgggtgttgttaaaacattggtagaacataaacttttgccaaggataatttcaggatcaagtgttagctaaataatgtgttctatagtagcaacaagatcatggcctgagctggagagctttttttgaagaatggcattccttgagatcagggcttctggaggcagctttgctgtcatctgccaaggcagcttaggcatgacaaatttctagccgaaaaccactgtgttctggatgaagaactatcggaaagagagaatttgcagccaagacttacaattgcaattggagtaaggaccggtgaaaagaaagtactccagcacatttttggtatttttaaaaacaaaaaggaggaattagacgacctagagtactaccaggaaagaagactcaaggatcttggtttagaaggaaggtagagtttattttttggtaaaaatataagattgtgcttgtattttatcctcatt

SEQ ID NO: 57397 - DNA, 2246 bp, Zea Mays
agattctgcacccagcataaaaaggcccctcgtcacctgtcgattatcatgttgatcggcggcttgggcgctgtgtgatgatagaatggagcgcattgctctcgtctgcacgccgttctggcctcgctcgccagctcgggcggctccacgtctttgtcctgcagcagggggcagtggagatgaccgatgaggccatctcccgcttccctgtcagctctggaatgagatgcggcacgatctcgttgccctgttactccgcgccagctccatctccgtctccggcggcgctcgcgcagcacagacgctccacccgctggcgctcaagtccgggcgcgcctcggaggctcgcgtggcgaccgcgctggccgtggcgtacgcgcggtggggcctcgtcgcgcacgcacgccgcgtgttcgacgaagcgccgcgcagggacctggtcctctacaacgccatggtctcctgctatgcctcccacggtctcgcgcgcgaggcctgggcgctctttgccgccgcgcggcgctccgggatcgcccccgacgggttcaccttcagcgccctgctccgtccgccgccgcgccgtggccgccacccaaccgccggcgccgtcgatgacgggctgctgctcaggatgggagccctggcgcacagcctcgtgctcaggctgggtctcctcgcagacgtggtggttgccaccgcgctgctcgacatgtacgccaagtgcggccgggttgacgaggcgcgctgggtgttcgacgctatggcggtcaggaacgtcgtctcatggaacgcgatcgtagtctgctatggtcgggttggtggaggcaaggacgctgttgagctgttccggtggatgctgagagacgggagctgctgcccggatgagctcacgcttgccagtgtgctaagctcgtgcgccagcgtggcggcagcaaacgaggctactcaggttcatgcttatgccataaagagggggtttcacaggtttctgcaggtggccaatgctgttatcacagcgtacggcaagaccggttttgctcgagaggcggggcaaatgtttgctatgatctgcgacccagatgtagttacgtggtcctgtatggtttcgtctttggcgtaccttggactatgcaaggatgcagttcatgtgtttgagagaatgctccaacaaggcgtacagcctgacagcgtcgccttccttggggttctttctgcctgcagccatgccgggctcgttgaagaaggcctgcactatttccttatgatggcgaggggctacaacatcgatccaaattcacagcaccttgcttgtctggttgatctcttggggagagctggtaggattcaagatgcttacaacattgttatcaagctttcttgcgagaacaatgctgatatcgttggagctttccttggtgcctgtaagctgcggggcaaaattgagttggcaaagtgggctgccgataggcttttatgcctggaaccaagtgaggcagtaaattatctgcttatgtctaacgcatttgctgctgcaggagcttggaacgagcttgcagaagtaagaagtgtgatgagacataggtgtggcagcaaggttcctggttgtagttggatagaggtaggtggaacagttcagacatttgtctccaacgatgtggtgctccatcagtcgattgaaatgcaacaaatggtgcaacttactatttcggaagcacaaaaagagtgcaacgaagacacaacttgtggtgatccaattttggttcaagaatgattagtttggcatctacaatcgtcccagagcttaccaatgtgatgtttctcatgtgcctagactcataaaggaatacgttgaggaagtatctactcaactgaaaatggtctgtgattctgattcagacgagttgcctcttgaagagaaactcgcatttatgcatgagacaagacatgcctttggtagaacagccttgctgctaagtggaggtgcttcattatgatcctttaatgtgggtgttgttaaaacattggtagaacataaacttttgccaaggataatttcaggatcaagtgttagctaaataatgtgttctatagtagcaacaagatcatggcctgagctggagagctttttttgaagaatggcattccttgagatcagggcttctggaggcagctttgctgtcatctgccaagttgtcatatgacatgccttccaacataccagtaatggtagcatgctaatgtctaag

SEQ ID NO: 57398 - DNA, 2198 bp, Zea Mays
cacctgtcgattatcatgttgatcggcggcttgggcgctgtgtgatgatagaatggagcgcattgctctcgtctgcacgccgttctggcctcgctcgccagctcgggcggctccacgtctttgtcctgcagcagggggcagtggagatgaccgatgaggccatctcccgcttccctgtcagctctggaatgagatgcggcacgatctcgttgccctgttactccgcgccagctccatctccgtctccggcggcgctcgcgcagcacagacgctccacccgctggcgctcaagtccgggcgcgcctcggaggctcgcgtggcgaccgcgctggccgtggcgtacgcgcggtggggcctcgtcgcgcacgcacgccgcgtgttcgacgaagcgccgcgcagggacctggtcctctacaacgccatggtctcctgctatgcctcccacggtctcgcgcgcgaggcctgggcgctctttgccgccgcgcggcgctccgggatcgcccccgacgggttcaccttcagcgccctgctccgtccgccgccgcgccgtggccgccacccaaccgccggcgccgtcgatgacgggctgctgctcaggatgggagccctggcgcacagcctcgtgctcaggctgggtctcctcgcagacgtggtggttgccaccgcgctgctcgacatgtacgccaagtgcggccgggttgacgaggcgcgctgggtgttcgacgctatggcggtcaggaacgtcgtctcatggaacgcgatcgtagtctgctatggtcgggttggtggaggcaaggacgctgttgagctgttccggtggatgctgagagacgggagctgctgcccggatgagctcacgcttgccagtgtgctaagctcgtgcgccagcgtggcggcagcaaacgaggctactcaggttcatgcttatgccataaagagggggtttcacaggtttctgcaggtggccaatgctgttatcacagcgtacggcaagaccggttttgctcgagaggcggggcaaatgtttgctatgatctgcgacccagatgtagttacgtggtcctgtatggtttcgtctttggcgtaccttggactatgcaaggatgcagttcatgtgtttgagagaatgctccaacaaggcgtacagcctgacagcgtcgccttccttggggttctttctgcctgcagccatgccgggctcgttgaagaaggcctgcactatttccttatgatggcgaggggctacaacatcgatccaaattcacagcaccttgcttgtctggttgatctcttggggagagctggtaggattcaagatgcttacaacattgttatcaagctttcttgcgagaacaatgctgatatcgttggagctttccttggtgcctgtaagctgcggggcaaaattgagttggcaaagtgggctgccgataggcttttatgcctggaaccaagtgaggcagtaaattatctgcttatgtctaacgcatttgctgctgcaggagcttggaacgagcttgcagaagtaagaagtgtgatgagacataggtgtggcagcaaggttcctggttgtagttggatagaggtaggtggaacagttcagacatttgtctccaacgatgtggtgctccatcagtcgattgaaatgcaacaaatggtgcaacttactatttcggaagcacaaaaagagtgcaacgaagacacaacttgtggtgatccaattttggttcaagaatgattagtttggcatctacaatcgtcccagagcttaccaatgtgatgtttctcatgtgcctagactcataaaggaatacgttgaggaagtatctactcaactgaaaatggtctgtgattctgattcagacgagttgcctcttgaagagaaactcgcatttatgcatgagacaagacatgcctttggtagaacagccttgctgctaagtggaggtgcttcattatgatcctttaatgtgggtgttgttaaaacattggtagaacataaacttttgccaaggataatttcaggatcaagtgttagctaaataatgtgttctatagtagcaacaagatcatggcctgagctggagagctttttttgaagaatggcattccttgagatcagggcttctggaggcagctttgctgtcatctgccaagacgagcaagccactgtggaatctgaagttcagcaagtagga

SEQ ID NO: 57399 - DNA, 2442 bp, Zea Mays
gtcgattatcatgttgatcggcggcttgggcgctgtgtgatgatagaatggagcgcattgctctcgtctgcacgccgttctggcctcgctcgccagctcgggcggctccacgtctttgtcctgcagcagggggcagtggagatgaccgatgaggccatctcccgcttccctgtcagctctggaatgagatgcggcacgatctcgttgccctgttactccgcgccagctccatctccgtctccggcggcgctcgcgcagcacagacgctccacccgctggcgctcaagtccgggcgcgcctcggaggctcgcgtggcgaccgcgctggccgtggcgtacgcgcggtggggcctcgtcgcgcacgcacgccgcgtgttcgacgaagcgccgcgcagggacctggtcctctacaacgccatggtctcctgctatgcctcccacggtctcgcgcgcgaggcctgggcgctctttgccgccgcgcggcgctccgggatcgcccccgacgggttcaccttcagcgccctgctccgtccgccgccgcgccgtggccgccacccaaccgccggcgccgtcgatgacgggctgctgctcaggatgggagccctggcgcacagcctcgtgctcaggctgggtctcctcgcagacgtggtggttgccaccgcgctgctcgacatgtacgccaagtgcggccgggttgacgaggcgcgctgggtgttcgacgctatggcggtcaggaacgtcgtctcatggaacgcgatcgtagtctgctatggtcgggttggtggaggcaaggacgctgttgagctgttccggtggatgctgagagacgggagctgctgcccggatgagctcacgcttgccagtgtgctaagctcgtgcgccagcgtggcggcagcaaacgaggctactcaggttcatgcttatgccataaagagggggtttcacaggtttctgcaggtggccaatgctgttatcacagcgtacggcaagaccggttttgctcgagaggcggggcaaatgtttgctatgatctgcgacccagatgtagttacgtggtcctgtatggtttcgtctttggcgtaccttggactatgcaaggatgcagttcatgtgtttgagagaatgctccaacaaggcgtacagcctgacagcgtcgccttccttggggttctttctgcctgcagccatgccgggctcgttgaagaaggcctgcactatttccttatgatggcgaggggctacaacatcgatccaaattcacagcaccttgcttgtctggttgatctcttggggagagctggtaggattcaagatgcttacaacattgttatcaagctttcttgcgagaacaatgctgatatcgttggagctttccttggtgcctgtaagctgcggggcaaaattgagttggcaaagtgggctgccgataggcttttatgcctggaaccaagtgaggcagtaaattatctgcttatgtctaacgcatttgctgctgcaggagcttggaacgagcttgcagaagtaagaagtgtgatgagacataggtgtggcagcaaggttcctggttgtagttggatagaggtaggtggaacagttcagacatttgtctccaacgatgtggtgctccatcagtcgattgaaatgcaacaaatggtgcaacttactatttcggaagcacaaaaagagtgcaacgaagacacaacttgtggtgatccaattttggttcaagaatgattagtttggcatctacaatcgtcccagagcttaccaatgtgatgtttctcatgtaagtggtgcctagactcataaaggaatacgttgaggaagtatctactcaactgaaaatggtctgtgattctgattcagacgagttgcctcttgaagagaaactcgcatttatgcatgagacaagacatgcctttggtagaacagccttgctgctaagtggaggtgcttcattatgatcctttaatgtgggtgttgttaaaacattggtagaacataaacttttgccaaggataatttcaggatcaagtgttagctaaataatgtgttctatagtagcaacaagatcatggcctgagctggagagctttttttgaagaatggcattccttgagatcagggcttctggaggcagctttgctgtcatctgccaaggcagcttaggcatgacaaatttctagccgaaaaccactgtgttctggatgaagaactatcggaaagagagaatttgcagccaagacttacaattgcaattggagtaaggaccggtgaaaagaaagtactccagcacatttttggtatttttaaaaacaaaaaggaggaattagacgacctagagtactaccaggaaagaagactcaaggatcttggtttagaaggaaggtagagtttattttttggtaaaaatataagattgtgcttgtattttatcctcatt

SEQ ID NO: 57400 - DNA, 231 bp, Zea Mays
cgcatcgctgcaacaaaaagttgccaatcaattgcaccgcacaattcctccatgtgccccctttttttgggggcattttttgatttaatttcgattacaattttggaatctaactaatccactcgagaaaccaaattcagtttacacagaaattctcgtttctctttttatgtgacgccaacgccgcgcaccgatgacgcgtacgaccgagatcaattgctgttgaacgcg

SEQ ID NO: 57401 - DNA, 1782 bp, Zea Mays
caggagtataaggcgagatctactgggacttcaggaaattccgctaaaagtttccatgatctgtacaacatgaaatactcaagctacttaaacgacgaaccaatgcctgatgctacatcggaaaaggagcaggttaatacccaggccattttgctgcaaccttttttgtttccacggaaatgaatatttgatagtattggactgtctcctagctacaacagtcacatttgcaaatagagctgtggcatatcttaaactaagaagattcaaggagggaaagaacttgggaagcttaaggaggcaatgaatgacgctgaatttgccatcggtcttcatcctaacaatccagagctaaggaaccagtattctgaaataaaagctttgcacatggagaaaatggctaaaaaagttccagtgctagctaaacgtgtagttcctggaattgataaaactgttgatgtcacttctcatccaccgactatctcccaaaaggacactgtcatggaagttgattcgcctctttcttcgagattcaatgaagatcgagcgagtgctggcggcaggtctaacggaggatctggagtaatcatcaatggcaacaccattcatgtctttatttctgtatcctttctgaccattataatacccatgatctgtggtttctgtgttgtcataccatggcaagcaagagttcacctatctataaaataggatgtactcagcatttcatttgggcagtttttcttgcaatatttctgagatgcaatgtgtatttaattattttgcttgggaaaaactgaactcttaggataagggaataacttgccatgtatttattagagttctgacatttgcacaccaatctagaaccgaaacaggtttgaaatcgtgtacttgtttaaaacttaatctaactagcttttaatagacggcctcccatttttatgggaaaagctagttacctttgagctatgtgctattcacattggagtggagcatgatggtttgtgtgattggagaatccatcataacccacttcaagctggaaatacgcaactgaggtttctgggtcatgtttattgtttaactgactatactcttaagagttctgcatcaggggtcatgtttgttgcttaacattttaagagatcactgcaattgcagtggcacagatttgtctattttcacactttgctgaaagtactgttgtgtctttgtgtcacatgttacaacacttgattcagcagtaccaaggtcgagaggctaaccacaagcctaggccagaagtttcagttcaagatcttgcatgaagacaccaaaaacagcttatgactttgaggtttcttggagagctctttctgatgacactgccaagcaaatacagttactaaagtcaattccaccagcaagcttaacgcacggactccagtgtctgttttatgtctaatcgcccttgctgcgatgaaagggcggtcgtccttctgctcctgcttccaggactcgagtgagttttgcctgtctatccctaacacacggacggcaaccattgtgactcttgcggacgtgtgtgtgagtgagcagcacacacacagagagagaacctagagaaacacagtgtaacacccggttttaaaggacaaagccgggtgcatctcatacatgcgccaagaagacaacatatataataacagagtgtatagagataaatgtcataatacatcagagtatttattacatagcggaagtcttattacaaaataaagataaatataaaacgaacta

SEQ ID NO: 57402 - DNA, 1661 bp, Zea Mays
gaaaaaaccacatattcccttcttctttcccaatctcactggcaggcactgcctccatcatcctctgactcagagagagagagagcagccgagccggttcaaccccatgaataccgctgctgcagagatcacggcctgcttctgcgtctgcagctccagcagtagcaacagcaggggctgcagtgcaaacgactgctagttcccctttccccgcatgatctctgccccttcccctaccttctcttgttcttgcttgcacgacccttttccttgtgcgctagctgccgcttcttcttcgtcttcctggagctccccgcatccacacatgccccaagaaccagacaataaaacaacacggaaccatcggagtctttttctactactatttccagcgatttgattatatggatgtgtgcacaggtgcacgtagataggtagaatagaagggagattatagctagctagaggcagcgagcagctcggttgctgggacacgcgatcgagctacagcaaagaagactgcagggtggcgcggcgggcatggaggatctgtacagcatccacccggggatctcgcgccacggggcggcggcgactagcgaggcgtccggggtcgccggtggaccgggctcacccccgcccccgcccccgccggcggcggatctgacggagctggtcaaggcgcagatcgccgggcacccacgctacccgtccctcctctccgcctacatcgactgccgcaaggtgggcgcgccgtcggaggtggccacgctgctggaggagatcggccgggagaggtgcgccgccgcctccgccggcggggaggagacgtactgccggttgctggagcggtacaaggaggagctgtcgcggccgttcgacgaggcggcgtccttcctcagcagcgtcaggacgcagctcagctccctctgcggcggcgccgcctcgctctccgatgaaatggtggagtcctctgaggacgagccatgctcaggcgacacagacgcgacgacagacccagggcaggagcacagctcgcgcctggccgaccgcgagctcaaggagatgctgctgaagaagtacagcggctgcctgagccggctgcggtccgagttcctgaagaagaggaagaaagggaagctgcccaaggacgctcggtcggcgctgatggactggtggaacacgcactaccgctggccgtaccctacggaggaggataaggtgaggctggcggccatgactgggctggacccgaagcagatcaacaactggttcatcaaccagcggaagcggcattggaagccgtcggaggacatgcggttcgcgctcatggagggcggcgtctccggatcctcctccgggacgacgctctacttcgacacgggcaccatcgggccgtgatcgatgcgatagatacctctgacgaattgggggcaaattgttggttgatactgagattagttacatgaagcaatatccgctgtcattttgtcggattcattgtgtatatgcatgggcgacaacgtgtattgtcgggtacacagtatgtagtggcatgtaaagacaccgtaacaatataacatgaattgttcaattgcctgttgcattttgatcaccctgttttacatctgaaaatttaaaattcagttcggaagcgacgg

SEQ ID NO: 57403 - DNA, 1617 bp, Zea Mays
cccttcttctttcccaatctcactggcaggcactgcctccatcatcctctgactcagagagagagagagcagccgagccggttcaaccccatgaataccgctgctgcagagatcacggcctgcttctgcgtctgcagctccagcagtagcaacagcaggggctgcagtgcaaacgactgctagttcccctttccccgcatgatctctgccccttcccctaccttctcttgttcttgcttgcacgacccttttccttgtgcgctagctgccgcttcttcttcgtcttcctggagctccccgcatccacacatgccccaagaaccagacaataaaacaacacggaaccatcggagtctttttctactactatttccagcgatttgattatatggatgtgtgcacaggtgcacgtagataggtagaatagaagggagattatagctagctagaggcagcgagcagctcggttgctgggacacgcgatcgagctacagcaaagaagactgcagggtggcgcggcgggcatggaggatctgtacagcatccacccggggatctcgcgccacggggcggcggcgactagcgaggcgtccggggtcgccggtggaccgggctcacccccgcccccgcccccgccggcggcggatctgacggagctggtcaaggcgcagatcgccgggcacccacgctacccgtccctcctctccgcctacatcgactgccgcaaggtgggcgcgccgtcggaggtggccacgctgctggaggagatcggccgggagaggagacgtactgccggttgctggagcggtacaaggaggagctgtcgcggccgttcgacgaggcggcgtccttcctcagcagcgtcaggacgcagctcagctccctctgcggcggcgccgcctcgctctccgatgaaatggtggagtcctctgaggacgagccatgctcaggcgacacagacgcgacgacagacccagggcaggagcacagctcgcgcctggccgaccgcgagctcaaggagatgctgctgaagaagtacagcggctgcctgagccggctgcggtccgagttcctgaagaagaggaagaaagggaagctgcccaaggacgctcggtcggcgctgatggactggtggaacacgcactaccgctggccgtaccctacggaggaggataaggtgaggctggcggccatgactgggctggacccgaagcagatcaacaactggttcatcaaccagcggaagcggcattggaagccgtcggaggacatgcggttcgcgctcatggagggcggcgtctccggatcctcctccgggacgacgctctacttcgacacgggcaccatcgggccgtgatcgatgcgatagatacctctgacgaattgggggcaaattgttggttgatactgagattagttacatgaagcaatatccgctgtcattttgtcggattcattgtgtatatgcatgggcgacaacgtgtattgtcgggtacacagtatgtagtggcatgtaaagacaccgtaacaatataacatgaattgttcaattgcctgttgcattttgatcaccctgttttacatctgaaaatttaaaattcagttcggaagcgacgg

SEQ ID NO: 57404 - DNA, 1241 bp, Zea Mays
atggcgttcaccgtgacgatgctggcgtggagcgtggtggagcacgaggccccgctcgcggcggccggggagctccggaacgcgctggccgccgtgcgctggggcgccgactacctggcccgggcgcacgcggccgccgagacgctgtacgtgcaggtcggcgacggcgactccgaccactcgtgctggcagcggcctgaggacatggacactccccgcaccgcctacagcgtcgacgcctcccgccccgggtccgacgtcgccgccgagacggctgccgcgctggccgccgcctccgtcgcgttccgccagctcgacgctgcctacagcgccatgctcctcggccacgccgagcagctgttcagtttcgccaagaaccaccgcggcctctaccagaacagcgtgccaggcgctgcaaaattctatgccagcagcggcgatgaggacgagatgctctgggctgcagtctggctcttcatcgccaccggtggtgaggactacaaggccttcatcgccggcgacggcaacgtcggcggagcgcagaccttcttctcatgggacaacaagttcgtcggcgcgcaagcactcgtggccaagctcgtcctccaagggaagctggccgacgccggcaacgcggcggcactgaagagccagctggagcagttcctctgcggcgtgctgcagcacaacgccagcgacggcaggctcagccccggcggcgtgctgtggttggagccctggaacaacctgcagttcgtgacgtcggcggcgttcgtggtcgccgcgcactccgaccacctggcgggcgcggcggcatcctcgctccggtgcggcgcggcgacgctgccgccgtcgcagctgctcgcgttcgcgcggtcccaggcggactacatcctcggcgccaacccggagaggatgagctacatggtcgggtacggcgccaggttcccggagcaggtgcaccaccgcggcgcgtcggtgccgtccatcaagtccagccccggcaagatcacctgcaagggagggttcgcgtactacagcagggacacgcccaaccccaacgtcctcgtcggcgccatcgtcgggggccccgatggcaacgaccggtacgacgattcccggccgaactataagcagaccgagccatccaccgtcaccgtcgcccccatggtcggagtgcttgcgaggctttcgaagcagaactgactgaggagagtgacacacacgggctctccatcatt

SEQ ID NO: 57405 - DNA, 2106 bp, Zea Mays
gaaaatttctttgcatgggtagtgtgtttggctaattctctcccaaaatgtggaagaaaataaagggaatactgtgcttgaattgcagcaaagatctatagaattcagttccattatacgaagacatcaatcgatgaaatcatctttgcttgaacggatgcctgtattggatgaagctaattatttggtgaagagagctgcttctatacaggctgcagttccatctgtaaattctgctccagcagtcacttctggaggcccatttaagcttcctaatggtgttggaaagcctgcagctcctttagctgatttgcttgatttgagttctgatgatgctccggtgactacctcggcccctacaacagcacctaatgattttctacaggatctgttgggcattggcttgactgattcgtctcctataggatcggagaacatccgccgcgactccatgctccaggagatcaagtctgcctaccagattcttgcccacaagtaccatcctgatatgaataagagtcccgaagcagaagaaaagttcaaggagatcagtgctgcatatgaggttggcggtgaagagcaaggggacagataagcccaaaggcagcaaggggaacgtcgacaaggaccccaacaagcctgactcccaacattttttgtccgccggtgctgtagcggaagcccaaaggcagcaaggggaacgtcgacaaggaccccaacaaggctgactcccaacattttttgtccgccggtgctgtagcggcggcgctggtgagctcccccatgctgggctctgggatgctcccaggcgccgggttcggcgagacggggactgatctggtgctgggctctgggatgctcccaggcgccgctgccttgcagttcctcggtcgattcaagggaatattatcagtggaagagactggtgaatcaaaggccgtcaacgctagatggaggcaaagtgcctgctgcattgggccaccatgtttttggtgcgggctgttcctcacggaaccaacatatctacatatatttttcatcttctcatcaagggagtatatgggtcgggagcaaggttctacatgacctactagggtatgtaaaaattatggaagtagggccacgagatggtctacagaatgagaaggacatcgtgccaacacctgtaaaggttgagcttatacgaagattggccacatccggattacctgttgtggaggcaacgagttttgtatctccaaaacgggtacctcaggcaggactgaggctgtttcatcctcctctgctgcggggtgggctaggtcgtcaccatggcgtcactcgtggcgtcttgtgcagtagggacgacagcagggagctgtcaagatgggttacctcaagatggacgaggagttcctcaagaggggcgagagcgggggcacgtgctgcgtcatagcccttctccgaaagggtagactagtcgtctccaatattggagactgtcatgtggtgctcagccgagcagggaaggcaaaggtgctcacctctgaccatcgggcctcccaggaggatgagaagcaaagaattgagaatttgggtggatttgtggtgaattaccatgggacatggagagtccagggctccctggcagtgtctaggggcaatggggatggacacctaaagcagtgggttgtggctgaccgagagactagaacgctcctcatcgaccaccagtgcgagttcttgatacttgcttctgatggcctatggggtaagattgataatcaggatgcagttgaccaaaactctaggcattagcactaacagagaccggtggaaggcaggactttgctgcctaaagtttccatgagtcagcgctatttttgggtgtttaacattcattctttgtcatagaaccatttgttatattattagatgtaattagatctatttgattcattcttcggaaatatttattgagataatgcggggtgatctctcgcttcatgatccattgactgtaaaaggcgatttgcctatgttaatacaatgatatattctattcagagaaaacttactgtgtttttgttttgtatcctttttaatcctaaactgagaacactaacc

SEQ ID NO: 57406 - DNA, 2233 bp, Zea Mays
gaaaatttctttgcatgggtagtgtgtttggctaattctctcccaaaatgtggaagaaaataaagggaatactgtgcttgaattgcagcaaagatctatagaattcagttccattatacgaagacatcaatcgatgaaatcatctttgcttgaacggatgcctgtattggatgaagctaattatttggtgaagagagctgcttctatacaggctgcagttccatctgtaaattctgctccagcagtcacttctggaggcccatttaagcttcctaatggtgttggaaagcctgcagctcctttagctgatttgcttgatttgagttctgatgatgctccggtgactacctcggcccctacaacagcacctaatgattttctacaggatctgttgggcattggcttgactgattcgtctcctataggatcggagaacatccgccgcgactccatgctccaggagatcaagtctgcctaccagattcttgcccacaagtaccatcctgatatgaataagagtcccgaagcagaagaaaagttcaaggagatcagtgctgcatatgagcttggatctgaccgctgtactttgtgtcgccgcttgaatctacggttctcttcttccttgttcatcccgtggatctgtcccgtggtggtccaagcattcgatttctgctattataacatccaacgtcgttggcggtgaagagcaaggggacagataagcccaaaggcagcaaggggaacgtcgacaaggaccccaacaagcctgactcccaacattttttgtccgccggtgctgtagcggaagcccaaaggcagcaaggggaacgtcgacaaggaccccaacaaggctgactcccaacattttttgtccgccggtgctgtagcggcggcgctggtgagctcccccatgctgggctctgggatgctcccaggcgccgggttcggcgagacggggactgatctggtgctgggctctgggatgctcccaggcgccgctgccttgcagttcctcggtcgattcaagggaatattatcagtggaagagactggtgaatcaaaggccgtcaacgctagatggaggcaaagtgcctgctgcattgggccaccatgtttttggtgcgggctgttcctcacggaaccaacatatctacatatatttttcatcttctcatcaagggagtatatgggtcgggagcaaggttctacatgacctactagggtatgtaaaaattatggaagtagggccacgagatggtctacagaatgagaaggacatcgtgccaacacctgtaaaggttgagcttatacgaagattggccacatccggattacctgttgtggaggcaacgagttttgtatctccaaaacgggtacctcaggcaggactgaggctgtttcatcctcctctgctgcggggtgggctaggtcgtcaccatggcgtcactcgtggcgtcttgtgcagtagggacgacagcagggagctgtcaagatgggttacctcaagatggacgaggagttcctcaagaggggcgagagcgggggcacgtgctgcgtcatagcccttctccgaaagggtagactagtcgtctccaatattggagactgtcatgtggtgctcagccgagcagggaaggcaaaggtgctcacctctgaccatcgggcctcccaggaggatgagaagcaaagaattgagaatttgggtggatttgtggtgaattaccatgggacatggagagtccagggctccctggcagtgtctaggggcaatggggatggacacctaaagcagtgggttgtggctgaccgagagactagaacgctcctcatcgaccaccagtgcgagttcttgatacttgcttctgatggcctatggggtaagattgataatcaggatgcagttgaccaaaactctaggcattagcactaacagagaccggtggaaggcaggactttgctgcctaaagtttccatgagtcagcgctatttttgggtgtttaacattcattctttgtcatagaaccatttgttatattattagatgtaattagatctatttgattcattcttcggaaatatttattgagataatgcggggtgatctctcgcttcatgatccattgactgtaaaaggcgatttgcctatgttaatacaatgatatattctattcagagaaaacttactgtgtttttgttttgtatcctttttaatcctaaactgagaacactaacc

SEQ ID NO: 57407 - DNA, 2516 bp, Zea Mays
gaaaatttctttgcatgggtagtgtgtttggctaattctctcccaaaatgtggaagaaaataaagggaatactgtgcttgaattgcagcaaagatctatagaattcagttccattatacgaagacatcaatcgatgaaatcatctttgcttgaacggatgcctgtattggatgaagctaattatttggtgaagagagctgcttctatacaggctgcagttccatctgtaaattctgctccagcagtcacttctggaggcccatttaagcttcctaatggtgttggaaagcctgcagctcctttagctgatttgcttgatttgagttctgatgatgctccggtgactacctcggcccctacaacagcacctaatgattttctacaggatctgttgggcattggcttgactgattcgtctcctataggcagagctccgtctacaagcactgacattctgatggatcttctatctattggttcatcttctgtacaaaatggaccaccaacggcaaggtgctagatactaatttcaggatcggagaacatccgccgcgactccatgctccaggagatcaagtctgcctaccagattcttgcccacaagtaccatcctgatatgaataagagtcccgaagcagaagaaaagttcaaggagatcagtgctgcatatgaggtaatcttcagccttgtggcttcagctgaagtgctgaaggagaatagcactagaacgcgctgagtattatattagtttagcaacatgtgtttatttcctattagattagtttaattctaacatgattgattcaatcccgattcgtccacccgttgccgtgaattcctccgccaagcttggatctgaccgctgtactttgtgtcgccgcttgaatctacggttctcttcttccttgttcatcccgtggatctgtcccgtggtggtccaagcattcgatttctgctattataacatccaacgtcgttggcggtgaagagcaaggggacagataagcccaaaggcagcaaggggaacgtcgacaaggaccccaacaagcctgactcccaacattttttgtccgccggtgctgtagcggaagcccaaaggcagcaaggggaacgtcgacaaggaccccaacaaggctgactcccaacattttttgtccgccggtgctgtagcggcggcgctggtgagctcccccatgctgggctctgggatgctcccaggcgccgggttcggcgagacggggactgatctggtgctgggctctgggatgctcccaggcgccgctgccttgcagttcctcggtcgattcaagggaatattatcagtggaagagactggtgaatcaaaggccgtcaacgctagatggaggcaaagtgcctgctgcattgggccaccatgtttttggtgcgggctgttcctcacggaaccaacatatctacatatatttttcatcttctcatcaagggagtatatgggtcgggagcaaggttctacatgacctactagggtatgtaaaaattatggaagtagggccacgagatggtctacagaatgagaaggacatcgtgccaacacctgtaaaggttgagcttatacgaagattggccacatccggattacctgttgtggaggcaacgagttttgtatctccaaaacgggtacctcaggcaggactgaggctgtttcatcctcctctgctgcggggtgggctaggtcgtcaccatggcgtcactcgtggcgtcttgtgcagtagggacgacagcagggagctgtcaagatgggttacctcaagatggacgaggagttcctcaagaggggcgagagcgggggcacgtgctgcgtcatagcccttctccgaaagggtagactagtcgtctccaatattggagactgtcatgtggtgctcagccgagcagggaaggcaaaggtgctcacctctgaccatcgggcctcccaggaggatgagaagcaaagaattgagaatttgggtggatttgtggtgaattaccatgggacatggagagtccagggctccctggcagtgtctaggggcaatggggatggacacctaaagcagtgggttgtggctgaccgagagactagaacgctcctcatcgaccaccagtgcgagttcttgatacttgcttctgatggcctatggggtaagattgataatcaggatgcagttgaccaaaactctaggcattagcactaacagagaccggtggaaggcaggactttgctgcctaaagtttccatgagtcagcgctatttttgggtgtttaacattcattctttgtcatagaaccatttgttatattattagatgtaattagatctatttgattcattcttcggaaatatttattgagataatgcggggtgatctctcgcttcatgatccattgactgtaaaaggcgatttgcctatgttaatacaatgatatattctattcagagaaaacttactgtgtttttgttttgtatcctttttaatcctaaactgagaacactaacc

SEQ ID NO: 57408 - DNA, 3329 bp, Zea Mays
ctccattatctcccccttttccctttgctgcataacaacagtagcgccgccattactgccgtgagagagcgatagtgggccttcgccgagactatgagccacacggaacaagttggtcaggggtctgcaccaagctagtgcgaaaccaaccgcggtagttgctggcggaatcgatggctggccaacccttaattgctcgtcggagccacaaaaccaccacggatccgcctggcaccgcggccaacctcaacagagcgccaatccttggtaagaaacccctacatcaatacctagtcatctccacttcgtttagggtttgtcgcattagagtttagggtctatttgggtcggttggcgcacaccggcaatgacgccatcgtattccggcgagtgcgccgctgatctggtcgagagataccccttcgtccgataaggccctagtcgtagatctgcgatccgagggataagagcgaatctgatggatttaaaatctggggcgttgatcactgatctgatgggccgcattccataccgcttcagtataatctggatctaatcccggccctccaatgaggatctagtggcccaaaactcaccatacccttttgcctggtagttttccataagcatccctatagttttgtattatcaacccgcggtcccctcgggtgcgcctctgagtctcagtttcttttatgccagagcctctgtgtttttcagaaattggcgcccaatccagagagtaatgaaaatatgacattaataacagaaattgatttttaatgtataaataaatgctagaacttgtttaatttgtagaaaattcatgcttagtccaaattaatccattctagttcctataattttgtaatattatctatcaaatagtgcctctgttttgacatgaaagccacattaaaatttatctcttaattaatcttgtatcaagcacatgaaacctttggaaatccataacttaagatccataactccaaaattaatgattcatgttcctatgatcttatcttaaaatgtagattattaatgtgtattttgtttacatgtttggtgtgatgttaatttctcctgtatactatgtatgtttgtattgatgcgagtagatgagcatgccacagaggatccagggcttcagctggtagagactgctgagcaggagctcgttgaatgcaaattatgcccttgatcacttcctttttacccaatcatgttcttattaaccataatgatctgcataggttaattttgatgagatccaataggttaccctagttttggctatctttataccttgttttaccgttgaatatttttgggtagtatatgctattgcattatgtggttttgggtatggagatatacatcactcattgttacacttttgttatcagtttattatttattgttcatgataagatcattatgttaatgggaacatggagaaccacccgggaaaacagtgctaccacaagtaggggtggtaatgggctataaactttacactgcaaattttaagggtcgaatcggattaggatcgggccttattcttattcatttttgaactaatattatttgagggccttaattttttgtgaagaagcatttggatcgtgatccattaccacccttaaccacaagggtggtatgggacgcccttggctgattaattaggaaagctagtggatgactaccttacctccgttaatccctttcatacgtagattaatcagccaagggcttctcattaaacccttgtggtagcactgttttcccgggtggttctccatgttcccattaacataatgatcttaccatgagcagtaaataatgaacagataataaaaagtgtaatcatgagtaatgaatatctctatacccaaaaccacataaagcaatagcatgtactacccaaaagtttagtattaaaaccagtggtgaaacaagatataaagatagtcaaaatctagggtaacctattgggtcccatcaaaattaacctatgcagatcattatgattaataagaacatgactgggtaaaaaggaagtgatcaagggcacaacttgccttccacgagctcctgctcagcaacttctacctgctgggcaccaggatcttctgtgacttgctcgtctactcgcatcaacacaatacatacatagtatagaaaaattaacatcacaccaaacatgtaaataaaatacacaataataatctagacattaaaataagatcataggaactggattcattatatttggagttatagattttaagttaagaattttccaaggttttatgtatttaatacaagattaagtactagataaattttaatgtgtctttcatgtcaaaatagtggcactaatggttagacaataatattacaaaaaattaggaactgggatggagcaaattggagttcatatgaattttctacaaattaaacaagtttctgtaattaaattttactaaaaaatattttctaaataatttttatggttttatcaactatctagactgcgcacagatttctgggaagtgcagggggcaaaaccgaaggtttcccaagacacagaccactggcgcttggagtgcgggtttattcctaagaaacccagggactccttagtaagattgccgggccgaatgggtacggttgattttcggccatccagatcagatccagaggccaggaatggatcacagccccggcaaatagacaagcgagcgtgaccgcttgatcaacgatcgacgggctcgatctaatctaccccgattgaatccaatgcacccgctcccaatcgggcggctcccaatatggcgcaacagcccttgccggattccacggcggagacgaggaacaaggccatccgataggtggacccacattgttcagtgggcactcgcatggtgaacggtgacaggtgggaccacggaactggtgagatagctgcgactgacgcgtggttgggcgactagttggtggcccccagtttacaaagggtggacgatgtacgagttggcgtggtgtgactgccccgtgggcccgaggtgtcaacgctgatctcctggtgatgggctcgcgcagtgtaattctttgttgggctgagaaaccagggttgggcccatgcggggttttctttttttctttccctttttcttttctcttctattttcttttatcttttctttctttccaaatttcgaacttcaatttcaatttaaactttgtggcacatttgtactcagactaaatgtttcatttgatcatactaaattgtgatgaagttattcatttttacatttatt

SEQ ID NO: 57409 - DNA, 1060 bp, Zea Mays
ctccattatctcccccttttccctttgctgcataacaacagtagcgccgccattactgccgtgagagagcgatagtgggccttcgccgagactatgagccacacggaacaagttggtcaggggtctgcaccaagctagtgcgaaaccaaccgcggtagttgctggcggaatcgatggctggccaacccttaattgctcgtcggagccacaaaaccaccacggatccgcctggcaccgcggccaacctcaacagagcgccaatccttgactgcgcacagatttctgggaagtgcagggggcaaaaccgaaggtttcccaagacacagaccactggcgcttggagtgcgggtttattcctaagaaacccagggactccttagtaagattgccgggccgaatgggtacggttgattttcggccatccagatcagatccagaggccaggaatggatcacagccccggcaaatagacaagcgagcgtgaccgcttgatcaacgatcgacgggctcgatctaatctaccccgattgaatccaatgcacccgctcccaatcgggcggctcccaatatggcgcaacagcccttgccggattccacggcggagacgaggaacaaggccatccgataggtggacccacattgttcagtgggcactcgcatggtgaacggtgacaggtgggaccacggaactggtgagatagctgcgactgacgcgtggttgggcgactagttggtggcccccagtttacaaagggtggacgatgtacgagttggcgtggtgtgactgccccgtgggcccgaggtgtcaacgctgatctcctggtgatgggctcgcgcagtgtaattctttgttgggctgagaaaccagggttgggcccatgcggggttttctttttttctttccctttttcttttctcttctattttcttttatcttttctttctttccaaatttcgaacttcaatttcaatttaaactttgtggcacatttgtactcagactaaatgtttcatttgatcatactaaattgtgatgaagttattcatttttacatttatt

SEQ ID NO: 57410 - DNA, 1027 bp, Zea Mays
ctttgctgcataacaacagtagcgccgccattactgccgtgagagagcgatagtgggccttcgccgagactatgagccacacggaacaagttggtcaggggtctgcaccaagctagtgcgaaaccaaccgcggtagttgctggcggaatcgatggctggccaacccttaattgctcgtcggagccacaaaaccaccacggatccgcctggcaccgcggccaacctcaacagagcgccaatccttgatttctgggaagtgcagggggcaaaaccgaaggtttcccaagacacagaccactggcgcttggagtgcgggtttattcctaagaaacccagggactccttagtaagattgccgggccgaatgggtacggttgattttcggccatccagatcagatccagaggccaggaatggatcacagccccggcaaatagacaagcgagcgtgaccgcttgatcaacgatcgacgggctcgatctaatctaccccgattgaatccaatgcacccgctcccaatcgggcggctcccaatatggcgcaacagcccttgccggattccacggcggagacgaggaacaaggccatccgataggtggacccacattgttcagtgggcactcgcatggtgaacggtgacaggtgggaccacggaactggtgagatagctgcgactgacgcgtggttgggcgactagttggtggcccccagtttacaaagggtggacgatgtacgagttggcgtggtgtgactgccccgtgggcccgaggtgtcaacgctgatctcctggtgatgggctcgcgcagtgtaattctttgttgggctgagaaaccagggttgggcccatgcggggttttctttttttctttccctttttcttttctcttctattttcttttatcttttctttctttccaaatttcgaacttcaatttcaatttaaactttgtggcacatttgtactcagactaaatgtttcatttgatcatactaaattgtgatgaagttattcatttttacatttatt

SEQ ID NO: 57411 - DNA, 1752 bp, Zea Mays
gttgtgtattgattcccacgctagctttttgcaggaattggaacgcgtgtaacaaatggagagccacaacccatcgcactctcagatcgccgaagtgacgatggacatcgcagcgtcagcttctggagcggcagggagcaagttctgcaagggcgcagcctgcgacttctccgacgccagcaactcctcgaaggacgccagggagaggtcggcgtcgatgaggaagctgatagtcgcggtggtcctctgcgtcgtattcatggcggtggaggtggtggggggcatcaaggcgaacagcctggccatcctgaccgacgcggcgcacctcctgtcggacgtggcggcgttcgccatctcgctgttctcgctctgggccgccgggtgggaggcgacgccgcggcagtcgtacgggttcttccgggtggagatcctcggcgccctcgtctccatccagctcatctggctgctcgccggcatactggtgtacgaggccgtcgtgaggctcgtcggcgagagcggcgacgtgcgggggtcgctcatgttcgccgtgtcggcgttcgggctggccgtcaacgttctcatggccgtgttgctgggccatgaccacgggcacggccacggccatggacatggacattcgcatgaccatggccacggccatggggattcggacgatggccattcccaccacgacgacgaggagcaagaacagggccgtgtccatcaccacgagcacggccatggaggcgctatcactgtcacaacccaccaccaccaccatcatcacgatcacgatgttgaggaggcgctgatcaagcatgagggtacccagtctgctggcagagctggtaagaagcctcggcggaacatcaacgtgcacagcgcatacctccacgtgctcggggactccgtccagagcgtcggggtcatggtgggcggggcgatcatctggtacaagccggagtggaaggtcatcgacctcatctgcacgctcgtcttctcggtggtggtgctgttcaccacgatccggatgctgcgcagcatcctcgaagtgttgatggagagcacgccccgcgagatcgacgccaccaggctggagagcgggctctgcgggatggagggcgtggtggccgtccacgagctgcacatctgggccatcacggtgggcaaggtgctgctggcgtgccatgtgaccatcgccagggatgcggacgctgatgagatccttgacaaggtgatcgggtacatcaagacggagtacaacatcagccatgtgaccatccaggtcgagcgcgagtagggagctctgtctttggctgctgtcttgggcataaatggctggcgccattcgagctctggtgtgctcggtggtgttgtctattgctagtctattaggcaggccgggggaattatttgcgtggtggtcgtcagtcagtcagtcggtgcataaacaaggatgaaattttcggtaatgctattgacagcatcgtggttcatcgaactgcatattctagtacgctgtgccgtcacatcttgtgtaaggtcacgtttctgtgctgcggtatggaagatgtgaagttcgtggttggcatgttgctatttgttctgagcatgccttgtcgtttcagtcgaatggacttgtgggaaaaaaaactcggccagatggtggcgtggaggtacgcctgtggatgggttatatctatatttattacttttattattaagggcctgtttggttggagtgtgagtgtg

SEQ ID NO: 57412 - DNA, 2631 bp, Zea Mays
atgacggccattcactctgctcaccaacacggcctccatatacagaatttagatcacaaacttaacattgataaccaatttgaggcattgaagtgctatgagatgatagatagggattgccggtggattaatgcaactttccaatcagttccaacttccatgggaacaaatatgaaagtggacgaccttgttcagatcgaaagcaaaagagcctctggtctagtggttaaggggttccaagtagcacctccaaattgggttcgatcttcctcggggttatgtcctgtgcgccatccttcggctgggcgttgcagagtggacggtgacgaccccgctactgatgggagcgaccagctgacacaagctaacccactctcgcccggcgacgtgctcatctccaaggacggagcctttgctctcggcttcttctccgcaggtaactataacaagagtttatacgtcggcatatggtacaacaaggtgccagagcacaccgtggtgtgggtcgccaaccgtgacagcccagtcatcgccccttccagagcgaagctcgccatcaccggaaaaccagagctggtgctgtctgactcccaaggacgcatccgttggacgacgacgaacagcgccgcagctgggggcgctgacgcttttgccgtgctactcaactcgggtaactttgtccttcaaacgccaaccggcgagaccatatggcaaagctttgattacccaactgataccttactcctaaccatgaggttattgctcaatcacaagggtcaagtgccaactcgcatcatttcttggaagagccctgatgacccatccactgggaatttctcctatggaattggtcccaactggaaccttcagttcttcacttggtacgggaccttgccgtacagccgctcaaatgcgcttaacgatgcatctatgtccagtggcatgtacctcagcagtggtgcctccattgtataccaagccattgtcgacacagggaacaggctctactatatatacacagtctctgaaggatcaccctacacacgtatctggcttgactacaccggtaagatgaggactcagagttggaacagcaacacatcatcttggatgctcgtttttgaacgcccccattctagctgcgatctctatgcccagtgtggtccattcggtttctgcgatagcacaggcgatgtcccaacgtgccggtgtcctgaagggttcgagcccatcgatggtgtcaactattcgagaggatgccggagaaaggaggcactgagatgcgggaaagaagacagcttcgtcaccttgccagcgatgaaggttcctgataagttcttgtacttgcgcaacagaagcttcgaccagtgcgcagccgagtgcagcagaaactgctcatgtgtagcttacgcttatgacaccttgagcctaggtgacagtaatggcgacacgtcgaggtgtttagtttggactggggacctcattgacatggagaaggccagcttccatggtaacttgtacctccggattgctggatctcctgtaaagaagaagaagaagagccatttgacaaagattttactcccgattatagcctttgtgctgccactcacattcacagccctagtctggacatgtaaaagaagaggtcgacgacaaaagaagaaggttcagaagagagtgatgctagaatacttgaggtctccggatgaaatgggggataagaatatagagttcccatttattagctttgaagacattgctgcagcaacagatcatttctctgactccaatatgcttgggaagggaggttttggcaaagtttacaagggagtgttaggaggtaccaaggaagtagcagtgaagagacttagtaagggttctgttcaaggaatggaggagttcaaaaatgaagcggtcctgattgcaaaactgcagcacaagaacctagttaagcttattggttgctgtatttatgaagatgagaggttgttggtttacgagtacttacccaacaaaagcttggattacttcctattcgactcatcaaaaaaatcagtgcttcagtggacgacaaggcatggaacttgtggaaagatgggaaatcagaacaaatggtggactcatttgttgtggagagtaattgccctcttgatgaagtttcgcgatgcgtccaaataggtctcttgtgcgtacaagatgatccaggctccagacctgtcatggcagtggttgtgttcatgctggaaaacagaactacgccactgccaacaccgaagcaaccttcatattttgcacaaaggggttacaagccccggaaggctggagaccacagggaggtctccactgacatgagcttgacagcacttgaggctcgttagatgtttaaccatatcatattgtactctgaattttcagggttttgcaacagtgcaccaacttttttgataactgactgtacatgagacctgtgaatctgtgctatgtgatttttatatctgtgagcttgtttctgtatggacgtatggtgtttgttgaatccgtggataatatagattgtagaataatttggtgaagttagcatttgtgttttttgctacagaaaaggctgacaaacttttacaattttgg

SEQ ID NO: 57413 - DNA, 2983 bp, Zea Mays
atgacggccattcactctgctcaccaacacggcctccatatacagaatttagatcacaaacttaacattgataaccaatttgaggcattgaagtgctatgagatgatagatagggattgccggtggattaatgcaactttccaatcagttccaacttccatgggaacaaatatgaaagtggacgaccttgttcagatcgaaagcaaaagagcctctggtctagtggttaaggggttccaagtagcacctccaaattgggttcgatcttcctcggggttatgtcctgtgcgccatccttcggctgggcgttgcagagtggacggtgacgaccccgctactgatgggagcgaccagctgacacaagctaacccactctcgcccggcgacgtgctcatctccaaggacggagcctttgctctcggcttcttctccgcaggtaactataacaagagtttatacgtcggcatatggtacaacaaggtgccagagcacaccgtggtgtgggtcgccaaccgtgacagcccagtcatcgccccttccagagcgaagctcgccatcaccggaaaaccagagctggtgctgtctgactcccaaggacgcatccgttggacgacgacgaacagcgccgcagctgggggcgctgacgcttttgccgtgctactcaactcgggtaactttgtccttcaaacgccaaccggcgagaccatatggcaaagctttgattacccaactgataccttactcctaaccatgaggttattgctcaatcacaagggtcaagtgccaactcgcatcatttcttggaagagccctgatgacccatccactgggaatttctcctatggaattggtcccaactggaaccttcagttcttcacttggtacgggaccttgccgtacagccgctcaaatgcgcttaacgatgcatctatgtccagtggcatgtacctcagcagtggtgcctccattgtataccaagccattgtcgacacagggaacaggctctactatatatacacagtctctgaaggatcaccctacacacgtatctggcttgactacaccggtaagatgaggactcagagttggaacagcaacacatcatcttggatgctcgtttttgaacgcccccattctagctgcgatctctatgcccagtgtggtccattcggtttctgcgatagcacaggcgatgtcccaacgtgccggtgtcctgaagggttcgagcccatcgatggtgtcaactattcgagaggatgccggagaaaggaggcactgagatgcgggaaagaagacagcttcgtcaccttgccagcgatgaaggttcctgataagttcttgtacttgcgcaacagaagcttcgaccagtgcgcagccgagtgcagcagaaactgctcatgtgtagcttacgcttatgacaccttgagcctaggtgacagtaatggcgacacgtcgaggtgtttagtttggactggggacctcattgacatggagaaggccagcttccatggtaacttgtacctccggattgctggatctcctgtaaagaagaagaagaagagccatttgacaaagattttactcccgattatagcctttgtgctgccactcacattcacagccctagtctggacatgtaaaagaagaggtcgacgacaaaagaagaaggttcagaagagagtgatgctagaatacttgaggtctccggatgaaatgggggataagaatatagagttcccatttattagctttgaagacattgctgcagcaacagatcatttctctgactccaatatgcttgggaagggaggttttggcaaagtttacaagggagtgttaggaggtaccaaggaagtagcagtgaagagacttagtaagggttctgttcaaggaatggaggagttcaaaaatgaagcggtcctgattgcaaaactgcagcacaagaacctagttaagcttattggttgctgtatttatgaagatgagaggttgttggtttacgagtacttacccaacaaaagcttggattacttcctattcgactcatcaaaaaaatcagtgcttcagtggacgacaaggttcaagataatccagggggttgctagaggaatcatgtatctccatcaggactcaagactgactataatccatagagatctgaaaacaagcaatatcttgttagataaggagatgagccctaagatatcagattttggcatggcgaggatattctttggcaagcagctccaagcaaatacaaaccgagttgtagggacatacggttacatggctcctgaatatgccatggaaggatccttttcggtcaaatctgacacctacagctttggtgtaatactgctggagattgtaagtggattaaagatcagctcaccgcaccttctcatggatttccctaaccttatagcatatgcatggaacttgtggaaagatgggaaatcagaacaaatggtggactcatttgttgtggagagtaattgccctcttgatgaagtttcgcgatgcgtccaaataggtctcttgtgcgtacaagatgatccaggctccagacctgtcatggcagtggttgtgttcatgctggaaaacagaactacgccactgccaacaccgaagcaaccttcatattttgcacaaaggggttacaagccccggaaggctggagaccacagggaggtctccactgacatgagcttgacagcacttgaggctcgttagatgtttaaccatatcatattgtactctgaattttcagggttttgcaacagtgcaccaacttttttgataactgactgtacatgagacctgtgaatctgtgctatgtgatttttatatctgtgagcttgtttctgtatggacgtatggtgtttgttgaatccgtggataatatagattgtagaataatttggtgaagttagcatttgtgttttttgctacagaaaaggctgacaaacttttacaattttgg

SEQ ID NO: 57414 - DNA, 3625 bp, Zea Mays
taaaactctgacatgtcatcataaacatttgcattatcttgcttgttacacctagaatgcatttactaggttaaaattttcgattcaaaagtgtggtgttgtgtattagagtacagggctcagattaagaactttgtttaagacatgggaagagaagtcgtctcttgagcaagtaataagttggcttggaatttaaggtattaaatgtaagacttagaacctagagcaaatttgttttcaaagggagatcaagtggaaggaatacttgagctcaaggatcaacttagaaaccttaatgtaagggttgaaagtttgtttgcaattatgtgtaagcaaacaactcctaaaccaaggatactttggatctgagtcctataagataaagttgaatttgagattaagaagcaacttttctttaggaggatggataagtttgcttttgatatgtggattagaagtggtgaactacttagggtggttgagtatctctaacccctaaactggagcccaaaagtggatttggagatctagccacattttgcaagaggtaaaaataccaagttggtaggatttccaaagttgcacaattttgttatttggagatttccaagttgtgtggagaaatttggagaaattcacaaaggttcagttttggagttcctgaaaatagcagcaactaggcaattttagtcctttgtaacttttgatctagaaccattttgaagatgctcgttataacaaagtcatagagctacatgaggagtataagtttggttaagtcatctagctctaaaactatttgaaacttggataaaagccggtccaaagtagggttcgcagaaattgtggatttcagacttagtagagttcagaggctgaatttcagtatttggatccaactttgggctttgatattttggaatccaggaggttttggttaatgaccactataccaaccttgtagagcaatgataggaggacaaatcgtattaagtgatatagccccaaaactatatgctactggtagaaaggatagtccaaacattgattgtcagatttctgaattttcagattgaaaacagtaattggaactgaattcagagtttgatagtagttttgggagcttgtttgtgactaatccctaaggatttgggctaaggggtccataaagggattgaataaaatatgttggtgaacaacgttctttaagtatgattgacacgatgctatacaaaatgtggagaaaaactttcccaaatttggattatcagattgctgttgacttagtttattcagagctaaaaatttgaacatcagtgaatggtaccaagtttagagctctattgtgccaaatcctggtagttttggacaaagaactttatagcaaaatggaagactatatctaggagaacaaacttgtttaagcactgctgggttggtgctacacaaatttgggagaaaaagctattccaagttgtgctatcaggcagtgatgcacttagcaaggttcagattaaccaagtctgagttcagttttcttggctcaactttgatggctccttgagactattctagggcgttgtaggtcatgctttatatagcaaagtggtagaccgaagtaagaggaacaaatttcctagaaggcgatggacttgatgctacacaaaaataggagtaaaatgggtcccaaccttccatgttcggctgtgagtggtctgaatttggttctgttgtctgtagttcaatcagtgtgtgagtcccagtttggagctacttttgtgaccaaatcatggggttttgaactgagggttctctagtaaagtgaaaggccatatatagaaagacaaatctccttaagcgatgttagtgtggtgctataaaaactttggagtaaatgtcctaagacatgttattgtcagtctagactgaacttcttctagattcagaaaactgaagttgtgatcagtaaaatgaggcaaactttagagcaatatagcttttgatccatgtacgtttggtacagggaaactatgacaaagttggatatcatagcatggtaaataagtttcataaagtgagatagacctggtgccaaacagaaattagattaaaattctcagagagaaaccctatcagtctgtgttaactctgggctgagttcagagaactgaaaccaggttcagtgaaatttggctaactttggatcaccataacttttgttttatatgcttttagttatgggttgctatacaaaagacatatagctatgaatatagaataactttggtgaagagatagtggtctgttgctatgaagaattgggagatcagagggcctgaactgggaggaatggaatgaagcagcaggctgatacaattgagttcaatgtggcattcgaattctgaagaagatcacttcctctctgttaggttactcgagtattggatggagtcaaggttgagatacatgactatgggtctaggggccttatttgctgctgggaaaatagcagatttggactgttttggtgggcagtgaggccttatctgttggatctgtggtggaattaactagacagcaaaaatccagtggtttcacgccttcaccccagtagcaaatatcaagttttggaccatagtgcatacccaagtgggagacttatctactccctttcctatctgtttaccgaacgaagggatggatattttgtctgtgtgagatagactaaatgcggtgtatttgagctgtggttatgagcctatgtggtgtgggtgcatgggagccacgtacaataggtcatgcagtgctggtattcccacggttctcctacatcaggtctgagttgagctctataccctgcctacacattcagttgtacttgtccatatccagtgcccttcgcttgggttcagtaaagcttccccttgccctcaggttttagctcgagaccactgcaaacttgcacgccatcttcctgccagtggtgaccacgcccacccgttcttaacctcaccatggccagggttcgtggagattgtctcggccgtgttgtgcccgttccttgtttctcacagagtgccaagaaggagattctgaagaggagtctactccagtgtctgctgatcaagtgattgagctatctaactggttatggggtagaagtatctagaacctcttcacttcaacaaaggcaagccccggtgcatttgccacctcccttgtgtttacaaaattttatcacttatatgctgcattaggtgataggagttgattgattaaacaattgatgcattaccatccttgaaagattgattaccataccttgtcacctgttttataaaagctagagatgcttagtcatactgatagactaagaaaaatgttttttatctatgactcatgtttttacaaaaagaaaatgggcttgggataatgaaggcatcaagacgttgataaattcattatccaggcatggcccctctgtcaggcgccaaaattttgaaatagtttaaaatgggaccagacgctgagcaagaaaggtcgcccgtctgtgtcgattaaggaccgtaccgattgttggcctgatgatctaggaccttttaactggccacatacctcatcatgg

SEQ ID NO: 57415 - DNA, 282 bp, Zea Mays
atggccgtgcgcttgccctgctcgggtctcctgcccatggctcccagccccatctcggcctccagttcgcctccacctcagctctggtgcgtgctcggccaccatgatgtccccagcgccggtgaaggtccgtcctgcagcagcgtcgtggtggccttcgacttggagcactgcgacgactccatgctgtgccctctgcttcctccatgcccgagtctgggatcctcctgcggctggttcatcgcggacatgggcaaagagcatgtacgctcggagtgctga

SEQ ID NO: 57416 - DNA, 1089 bp, Zea Mays
gttctctatctttccgagtacatgtccgtcgtcgagctaaaaaaaagctgatcagaacttcacatgagaattgcggtccatccgcaacaatctgtcaagtttgtagtatcaaagtttgttctgagagggaaaaaaacccacatcatgtcagaatagcagcccatatccaacaatctgccagaaatgttacatttttagatttacgtcttctaaatatggatcacttattcacttcttctagatattgatctctaatcaggccacgtctccaaggcgatgaacctcagacaacactggaacatcagaactcaagcaggaagctgcacctgcaccccccggacctcgaccagccgggcacgccgtcgccaccgcgaagctcctgccacgtctcgagatgctcagacagcgagaggaggaggaggagcaggagagcggtgagcgaggacgaggaggtggtcacgccggacgtgtccgtcgcctggcagccggtctgcaggctggtcgaggaaggtctgaggagcacggagtggccgtcgacgcgggacggcgcggacgtcgtcgtcgtcgccgagatagagtgcggcgtcctggaccacctcgtgcgtgagaccgtggacgaactcctccggggagcgtctggaaccgcacgggcgcagcgtcctctcccactccgacccgtctcgaagacacagctgggtgggtggcaagaacgttcggacaggacgagcgatcggatgatgctactgaacgagcgagaggttagattcgtatgctgtgaaactctcaaatgcgaccgtagtctggtctaggtttttttcatcaagatcgctgaaacaagtggatatgatgcaaaacatagcagccggcgtaggtacagtacagactacagatattgctgaacctggagaagtacaccaggatccgcactctctgtactgccaagctccgaactctgaaactgtacatgaagatgagactccttgtactagcacctgaatctgaatgaagttaaaaccaagtttctgtgacgaaaataagcaacctgtatactttgatgtatttctttcttcaataaaaaaaatgttcggc

SEQ ID NO: 57417 - DNA, 5002 bp, Zea Mays
cctcaccaagcggcccggatccctcctctccggccaccccaaaacacgcccgacgccagcgccaccgaaatcccccaacccatgcagcgcaagcattaccataacctcctcgcatatcggcccgcgctgctgccggaagcagatcggagcagcctcttcggctcttggcgacggatgttgctcgcttcgtttaccacgaccagatctgcgatggcttctgctcgcctcgctcgctacccaccagatcccggcgcctcccccctcgtcgctcaattctgctccgccgcgctgcgatcgatccgctcccagacgacgatcgcccggcgcggatcagcagccgccggggctgctccggcgtcgcgaatggccgcgctcgccgggccgacaagcagcgcagatcgtggggctcgccggcggcaccggcttcggcctcgtcttccgtggggacggcaggcgcgaggcggtgccctgcccgccgcggactgcctctgggagttcgcttccgttacggcacctgccatcctggccgtcggtcgggggctggcgttctcgtgaatcccgtggtgggccgggggcagaagcggtaactcgccgggccagcacctgaagataaatcatgtgaaatgacaccaaatacggtcactaactctactaaagatgtcttggaagctgatggtaaaactttcaataatgaattttccatcaagttagatcagctcggtgatgatcctattaatggccttacaaacattctcgttgaacttatgcaacataatgattcttgttctggggattcaaacggcccgaccagtacatgtaagctgctccaactgaaggaaagcatttccaaggagattgaaaagactgaactccagattgattcattggaaggcgaacttaaatctgtgaatactgaggctgtaactactcttgaaagttctcccacaggggtgacacatacagaaaatctgtcaccttctggtgggacatcaaaggttcctggaagtgccgagatctgtgatacatttgatatgataaaagaaccgggggagctcattgtttctcctaaggtacctgtggtgcaggatgctgatgtcaaaggggtcgatatgatggaggttgaaacagctccagttcgcaatgcaaaaacagttccttcagaagagagtgctgtaactcctggagttgctgagggtaaggcatgtgcagctgctgatcttagctcattgatagcttctgaagaagctgggtctcaaaatgatattgacaatgacaggccgaaaacttctttgtgccatgctgattccatgaaaattaaagttagtgatgaactaccagtgaagcaatggacatactgtgatcatatgtctgatttacacagttctttcacatctgcaaataatgatatagccaaagaaatgaatgaggtgctatttaaatcattgcctgctggtacatctgcccttgatttgttggcatcaagtgatcttcttagccaacggaagattgatttgattgtcaaagaaagacttggagtacgtaaaaccaggctgaggttgaaagagcagattcttacaatgaagttcaaggcatatcgtcacttgtggaaagaggatgtacggctactttctgcaaagaaacagcgattgaagtctaataagcgcattgatcagaataaccgaacatctcaaattggatctcagaggcaacgcttttctaaccgctcacgattagccatgcctgctgggaatttaagtacattctcaactccggaaatgtcagatgttgcaagaaagttgttttcagaatctcaaattaagcgctgcagaaactacttgaaaatgcctgcactgattattgatgagaaagagaaggaacacctgaggtttctgaccaagaatggactggttgtggatcctgttttagttgagaaggaacggatcatgataaatccgtggactcaagacgaaaaggaaatttttatggagatgcttgctaaatttggcaaggatttctccaaaatttccagtttcatcacacataaaactactgcagactgtgtggagttctactacaagcatcataaatcagacagcttccgagaagtgaagaaactgttggaccttcatcaacagctgcctgccagcaattaccttggagcgaaatcaggacagaaatggaatcctgagtcaaatgctgcttctcttgatatgcttggggtagcatcagctgaagcagcccatgaccttgaatatgcaaacaaagtggagaaaatttctgtgaaatccctcatccggactgcatatgggtccaatgtttcatttgtgaccaaaaaatcttctgataaggagtgcattgacaatgtgcctttgcatgagagagaatctgtagcagctgatgtactagcaggcatatgcggcactccttctcctgatggaatgggctcatgcattactagttctgctgatcctggcctgaagatcagcatgaaaagagtggagcatgtcttatcccaagaaaatgacaaaaatgttaatgaggaagaatctctctctgatcaagagtgtgaatttgatccagttgattggaatgatgatgagaagtcaattttcattgaggcaatgaataactacggaaaggatttttctcggatctcgtcttgtgtgaagagcaagtcatatgaacaatgcaaagtgttctttagtaaggctcggaaatcacttggtttggatttgatccatcaaggggcagccgatgttagtatgccagctagtgataccaatggagggaggagcgatactgacgaggcctgtgctgtggaaatggattcagctatctgtaggaagcagtcttgttcaaagattgtgcaagatgtttgtcctactgaaggagccattttagggcctgactctgttttaatctctaagcagacagaaggagatatatcaaataggtgcattgttgatgttaaaattgaggaagatgataaggaagctgataaaaattgcagcaatgttgatgataagaggtccagtgatagtactcatcaagctggccctatcaacatcaattgcccagaaagtacagataagctgcaaggaactgatgatgccgttgaccaagtaaacatgcatagtagtgtcctcaactcttcaaatgagcatgcaatggccatgcactcagaagtgagatccagtttacactctgtagatgtacttcaaacagacaaagctgaaggtactggtactgatcctagccaggtggaagaatgttcacatcatgctgtctacacaccgatgacagctgggaattctggttcctcagctttcttaacttcagatagtggtatcaaggacaatgttcacatctcaaacatgtctggtgcctccactgttagtcctgcattcacttcaaactatcaacattctctgccaggagatatgcccctgtcgaaaccaaagccactagtaacctcccttaccccaaaggatttaatgcctgtgcagttcagttcagttcttcctgatcccactgcatttcgttttgagggcataaagcccaactttgaggacagcagtggcaacaaagtcagcagtgccctaggagctaaagacatttgcaagtacccagcttttaaagacccatctgataatgagcatgacacattgtttcgtaatattgatggttatatgaataatcatctgacaactgaattgccagttttttctcaaagaactgcaagtggcactgtgagtacttcgcagacaaaattccagaatggcaggtccagcagcgtgtgccttccaaacagttctgaggggattcaatggcccaggaaacctgaagaagtaccggaagattctttgaggccttgcgctcgcaatgcaaaaactgagggtggtgagaaacaaaagcgacctggtgatgtcaagttatttgggcagattctcagccatcagccaaccttgccaagttctggctcgttgtgtaatggtagccagagcaagcctccctcaccaaagattgacaaaacatctgtgagattgaccaacaatccaagggatcttgtagttttttcttccaggcctggtgtcagtccacatgtgggtctggaggaaagatcagtgaggagctacggccatctggatggaagcacgatacagcctgagcctctgctggtgatggcgaagtgccagagatccttggccagtgtaccattttactcggctaagaacagcacggttggcgtgtttccagattatcaacaaccttcaatgcagccacatcaattagatcccaagccgctggaaatgttttctgattcgcagaagaggaatgggctggaactcgtctcgggtttcggcggtgctggtatccttgttagcaacgtctcagaccatgtggctgctctcaaggctcggtatggtcccggttctaagataatgggcagtgacgcggatccttggaaagacataggaagcaggtagcaccgatagcggtagccagttctagtgcttgttttgttgctcgctgtatcatatttagttcttttttttttctgtaacttgaatgaaatcgtcaaatgaaggaaagtgaatggctttcctgcccatactatttgtaagctttgcagtagttgccgggttatgttatttactggcattaacatttttacctttattgcagcaccataccctttggtagcttgacatgtcaacagcggcccagcgccaccgtgggctcgttagaggtgattaccaggtgttttgtcagcagggtttgatgttgtcagtctatggaaattccttattctcagtatcctagtatgatggatggagttttggttgagatttgtccttgcattggccgttgtttcaacttcttctgtcagcatttctacgggtttatcacttgtgcagctgtgtctagatgcatggatgcactgaacattggctggaaggacatcgactgtgtttcctggtcatcctgtcctcgaagtgag

SEQ ID NO: 57418 - DNA, 4763 bp, Zea Mays
ccccaaaacacgcccgacgccagcgccaccgaaatcccccaacccatgcagcgcaagcattaccataacctcctcgcatatcggcccgcgctgctgccggaagcagatcggagcagcctcttcggctcttggcgacggatgttgctcgcttcgtttaccacgaccagatctgcgatggcttctgctcgcctcgctcgctacccaccagatcccggcgcctcccccctcgtcgctcaattctgctccgccgcgctgcgatcgatccgctcccagacgacgatcgcccggcgcggatcagcagccgccggggctgctccggcgtcgcgaatggccgcgctcgccgggccgacaagcagcgcagatcgtggggctcgccggcggcaccggcttcggcctcgtcttccgtggggacggcaggcgcgaggcggtgccctgcccgccgcggactgcctctgggagttcgcttccgttacggcacctgccatcctggccgtcggtcgggggctggcgttctcgtgaatcccgtggtgggccgggggcagaagcggtaactcgccgggccagcacctgaagataaatcatgtgaaatgacaccaaatacggtcactaactctactaaagatgtcttggaagctgatggtaaaactttcaataatgaattttccatcaagttagatcagctcggtgatgatcctattaatggccttacaaacattctcgttgaacttatgcaacataatgattcttgttctggggattcaaacggcccgaccagtacatgtaagctgctccaactgaaggaaagcatttccaaggagattgaaaagactgaactccagattgattcattggaaggcgaacttaaatctgtgaatactgaggctgtaactactcttgaaagttctcccacaggggtgacacatacagaaaatctgtcaccttctggtgggacatcaaaggttcctggaagtgccgagatctgtgatacatttgatatgataaaagaaccgggggagctcattgtttctcctaaggtacctgtggtgcaggatgctgatgtcaaaggggtcgatatgatggaggttgaaacagctccagttcgcaatgcaaaaacagttccttcagaagagagtgctgtaactcctggagttgctgagggtaaggcatgtgcagctgctgatcttagctcattgatagcttctgaagaagctgggtctcaaaatgatattgacaatgacaggccgaaaacttctttgtgccatgctgattccatgaaaattaaagttagtgatgaactaccagtgaagcaatggacatactgtgatcatatgtctgatttacacagttctttcacatctgcaaataatgatatagccaaagaaatgaatgaggtgctatttaaatcattgcctgctggtacatctgcccttgatttgttggcatcaagtgatcttcttagccaacggaagattgatttgattgtcaaagaaagacttggagtacgtaaaaccaggctgaggttgaaagagcagattcttacaatgaagttcaaggcatatcgtcacttgtggaaagaggatgtacggctactttctgcaaagaaacagcgattgaagtctaataagcgcattgatcagaataaccgaacatctcaaattggatctcagaggcaacgcttttctaaccgctcacgattagccatgcctgctgggaatttaagtacattctcaactccggaaatgtcagatgttgcaagaaagttgttttcagaatctcaaattaagcgctgcagaaactacttgaaaatgcctgcactgattattgatgagaaagagaaggaacacctgaggtttctgaccaagaatggactggttgtggatcctgttttagttgagaaggaacggatcatgataaatccgtggactcaagacgaaaaggaaatttttatggagatgcttgctaaatttggcaaggatttctccaaaatttccagtttcatcacacataaaactactgcagactgtgtggagttctactacaagcatcataaatcagacagcttccgagaagtgaagaaactgttggaccttcatcaacagctgcctgccagcaattaccttggagcgaaatcaggacagaaatggaatcctgagtcaaatgctgcttctcttgatatgcttggggtagcatcagctgaagcagcccatgaccttgaatatgcaaacaaagtggagaaaatttctgtgaaatccctcatccggactgcatatgggtccaatgtttcatttgtgaccaaaaaatcttctgataaggagtgcattgacaatgtgcctttgcatgagagagaatctgtagcagctgatgtactagcaggcatatgcggcactccttctcctgatggaatgggctcatgcattactagttctgctgatcctggcctgaagatcagcatgaaaagagtggagcatgtcttatcccaagaaaatgacaaaaatgttaatgaggaagaatctctctctgatcaagagtgtgaatttgatccagttgattggaatgatgatgagaagtcaattttcattgaggcaatgaataactacggaaaggatttttctcggatctcgtcttgtgtgaagagcaagtcatatgaacaatgcaaagtgttctttagtaaggctcggaaatcacttggtttggatttgatccatcaaggggcagccgatgttagtatgccagctagtgataccaatggagggaggagcgatactgacgaggcctgtgctgtggaaatggattcagctatctgtaggaagcagtcttgttcaaagattgtgcaagatgtttgtcctactgaaggagccattttagggcctgactctgttttaatctctaagcagacagaaggagatatatcaaataggtgcattgttgatgttaaaattgaggaagatgataaggaagctgataaaaattgcagcaatgttgatgataagaggtccagtgatagtactcatcaagctggccctatcaacatcaattgcccagaaagtacagataagctgcaaggaactgatgatgccgttgaccaagtaaacatgcatagtagtgtcctcaactcttcaaatgagcatgcaatggccatgcactcagaagtgagatccagtttacactctgtagatgtacttcaaacagacaaagctgaaggtactggtactgatcctagccaggtggaagaatgttcacatcatgctgtctacacaccgatgacagctgggaattctggttcctcagctttcttaacttcagatagtggtatcaaggacaatgttcacatctcaaacatgtctggtgcctccactgttagtcctgcattcacttcaaactatcaacattctctgccaggagatatgcccctgtcgaaaccaaagccactagtaacctcccttaccccaaaggatttaatgcctgtgcagttcagttcagttcttcctgatcccactgcatttcgttttgagggcataaagcccaactttgaggacagcagtggcaacaaagtcagcagtgccctaggagctaaagacatttgcaagtacccagcttttaaagacccatctgataatgagcatgacacattgtttcgtaatattgatggttatatgaataatcatctgacaactgaattgccagttttttctcaaagaactgcaagtggcactgtgagtacttcgcagacaaaattccagaatggcaggtccagcagcgtgtgccttccaaacagttctgaggggattcaatggcccaggaaacctgaagaagtaccggaagattctttgaggccttgcgctcgcaatgcaaaaactgagggtggtgagaaacaaaagcgacctggtgatgtcaagttatttgggcagattctcagccatcagccaaccttgccaagttctggctcgttgtgtaatggtagccagagcaagcctccctcaccaaagattgacaaaacatctgtgagattgaccaacaatccaagggatcttgtagttttttcttccaggcctggtgtcagtccacatgtgggtctggaggaaagatcagtgaggagctacggccatctggatggaagcacgatacagcctgagcctctgctggtgatggcgaagtgccagagatccttggccagtgtaccattttactcggctaagaacagcacggttggcgtgtttccagattatcaacaaccttcaatgcagccacatcaattagatcccaagccgctggaaatgttttctgattcgcagaagaggaatgggctggaactcgtctcgggtttcggcggtgctggtatccttgttagcaacgtctcagaccatgtggctgctctcaaggctcggtatggtcccggttctaagataatgggcagtgacgcggatccttggaaagacataggaagcagcaccataccctttggtagcttgacatgtcaacagcggcccagcgccaccgtgggctcgttagaggtgattaccaggtgttttgtcagcagggtttgatgttgtcagtctatggaaattccttattctcagtatcctagtatgatggatggagttttggttgagatttgtccttgcattggccgttgtttcaacttcttctgtcagcatttctacgggtttatcacttgtgcagctgtgtctagatgcatggatgcactgaacattggctggaaggacatcgactgtgtttcctggtcatcctgtcctcgaagtgag

SEQ ID NO: 57419 - DNA, 5580 bp, Zea Mays
cgttacggcacctgccatcctggccgtcggtcgggggctggcgttctcgtgaatcccgtggtgggccgggggcagaagcggtaactcgccgggccaggtttcttacgggttaggagcaggaggtcagagactccccagagttggcttcgccgcgcgcatgcgatttgcggcggcggccgaagcctcgtacagccgccgctgggacgacgacgacaacggcgacgtggatgcctccgccgccgccggatcgaagggactatctataccgggagggccgcaggcacgacggcggcgtcggcgactcgctcctgccgcctgcccccacgccgccgcgctggcgggactcgccgtaccacccgccgccgccaccgccccttcgggaccccgcgcggccctcgccgcgccgtgcgccgccgttggcctcctcaggtgggcatgccccccgcgaatgctcagatctgaggccgccgccgcctcgccgaccccctctggtgcccctaatttcctccaaccgctctgctatttcagaaggctactaccgacagggtggcggcgcgtacgaccgttcctaccctgatgacccgccgtctgtctacacgccgtcgcgctcggaccggtactggccggaagacgacgacgggggatacaagggtttcggtcggtatggcagcggtggccgcagggacggccgtgacatgaggggttcataccggaagtccccatacaggggcggctacggaagcgacttctccaggaaccactcagagcagccccctccgccaccacccaggaggtctcccttgaggtcagttgccgttccgatctgctatgaccctccgggcaatagaattaacagaggggacagggacaacctcccacgggtgacaccatggcggagaagggagagcagatctgaagtagccgatgctgatggaccgctttctgttggccaaagtactcggctctctgcttcagggaaggaggcttcagctcagcctctggccgcggcaggtcctcacgggacggaagacgaggcaccaaggaagaaggcacgccttggatggggtcagggtttggccaagtatgagaagcagaaggtgcagggtccttcggatcccgctgaagttgttgctgatgtaagttcaggtgatggcgaacagaagacctcccttgcgcctgcgccttctgttgcatctgtatttcctgctgcaccactgcctgagtctgcaccagcacctcctgctgctcttgcactttcgtctgctcctatgcgatgctcatctccagttactgcaccgccatattgttcctcagcacctgaagataaatcatgtgaaatgacaccaaatacggtcactaactctactaaagatgtcttggaagctgatgtacatgtaagctgctccaactgaaggaaagcatttccaaggagattgaaaagactgaactccagattgattcattggaaggcgaacttaaatctgtgaatactgaggctgtaactactcttgaaagttctcccacaggggtgacacatacagaaaatctgtcaccttctggtgggacatcaaaggttcctggaagtgccgagatctgtgatacatttgatatgataaaagaaccgggggagctcattgtttctcctaaggtacctgtggtgcaggatgctgatgtcaaaggggtcgatatgatggaggttgaaacagctccagttcgcaatgcaaaaacagttccttcagaagagagtgctgtaactcctggagttgctgagggtaaggcatgtgcagctgctgatcttagctcattgatagcttctgaagaagctgggtctcaaaatgatattgacaatgacaggccgaaaacttctttgtgccatgctgattccatgaaaattaaagttagtgatgaactaccagtgaagcaatggacatactgtgatcatatgtctgatttacacagttctttcacatctgcaaataatgatatagccaaagaaatgaatgaggtgctatttaaatcattgcctgctggtacatctgcccttgatttgttggcatcaagtgatcttcttagccaacggaagattgatttgattgtcaaagaaagacttggagtacgtaaaaccaggctgaggttgaaagagcagattcttacaatgaagttcaaggcatatcgtcacttgtggaaagaggatgtacggctactttctgcaaagaaacagcgattgaagtctaataagcgcattgatcagaataaccgaacatctcaaattggatctcagaggcaacgcttttctaaccgctcacgattagccatgcctgctgggaatttaagtacattctcaactccggaaatgtcagatgttgcaagaaagttgttttcagaatctcaaattaagcgctgcagaaactacttgaaaatgcctgcactgattattgatgagaaagagaaggaacacctgaggtttctgaccaagaatggactggttgtggatcctgttttagttgagaaggaacggatcatgataaatccgtggactcaagacgaaaaggaaatttttatggagatgcttgctaaatttggcaaggatttctccaaaatttccagtttcatcacacataaaactactgcagactgtgtggagttctactacaagcatcataaatcagacagcttccgagaagtgaagaaactgttggaccttcatcaacagctgcctgccagcaattaccttggagcgaaatcaggacagaaatggaatcctgagtcaaatgctgcttctcttgatatgcttggggtagcatcagctgaagcagcccatgaccttgaatatgcaaacaaagtggagaaaatttctgtgaaatccctcatccggactgcatatgggtccaatgtttcatttgtgaccaaaaaatcttctgataaggagtgcattgacaatgtgcctttgcatgagagagaatctgtagcagctgatgtactagcaggcatatgcggcactccttctcctgatggaatgggctcatgcattactagttctgctgatcctggcctgaagatcagcatgaaaagagtggagcatgtcttatcccaagaaaatgacaaaaatgttaatgaggaagaatctctctctgatcaagagtgtgaatttgatccagttgattggaatgatgatgagaagtcaattttcattgaggcaatgaataactacggaaaggatttttctcggatctcgtcttgtgtgaagagcaagtcatatgaacaatgcaaagtgttctttagtaaggctcggaaatcacttggtttggatttgatccatcaaggggcagccgatgttagtatgccagctagtgataccaatggagggaggagcgatactgacgaggcctgtgctgtggaaatggattcagctatctgtaggaagcagtcttgttcaaagattgtgcaagatgtttgtcctactgaaggagccattttagggcctgactctgttttaatctctaagcagacagaaggagatatatcaaataggtgcattgttgatgttaaaattgaggaagatgataaggaagctgataaaaattgcagcaatgttgatgataagaggtccagtgatagtactcatcaagctggccctatcaacatcaattgcccagaaagtacagataagctgcaaggaactgatgatgccgttgaccaagtaaacatgcatagtagtgtcctcaactcttcaaatgagcatgcaatggccatgcactcagaagtgagatccagtttacactctgtagatgtacttcaaacagacaaagctgaaggtactggtactgatcctagccaggtggaagaatgttcacatcatgctgtctacacaccgatgacagctgggaattctggttcctcagctttcttaacttcagatagtggtatcaaggacaatgttcacatctcaaacatgtctggtgcctccactgttagtcctgcattcacttcaaactatcaacattctctgccaggagatatgcccctgtcgaaaccaaagccactagtaacctcccttaccccaaaggatttaatgcctgtgcagttcagttcagttcttcctgatcccactgcatttcgttttgagggcataaagcccaactttgaggacagcagtggcaacaaagtcagcagtgccctaggagctaaagacatttgcaagtacccagcttttaaagacccatctgataatgagcatgacacattgtttcgtaatattgatggttatatgaataatcatctgacaactgaattgccagttttttctcaaagaactgcaagtggcactgtgagtacttcgcagacaaaattccagaatggcaggtccagcagcgtgtgccttccaaacagttctgaggggattcaatggcccaggaaacctgaagaagtaccggaagattctttgaggccttgcgctcgcaatgcaaaaactgagggtggtgagaaacaaaagcgacctggtgatgtcaagttatttgggcagattctcagccatcagccaaccttgccaagttctggctcgttgtgtaatggtagccagagcaagcctccctcaccaaagattgacaaaacatctgtgagattgaccaacaatccaagggatcttgtagttttttcttccaggcctggtgtcagtccacatgtgggtctggaggaaagatcagtgaggagctacggccatctggatggaagcacgatacagcctgagcctctgctggtgatggcgaagtgccagagatccttggccagtgtaccattttactcggctaagaacagcacggttggcgtgtttccagattatcaacaaccttcaatgcagccacatcaattagatcccaagccgctggaaatgttttctgattcgcagaagaggaatgggctggaactcgtctcgggtttcggcggtgctggtatccttgttagcaacgtctcagaccatgtggctgctctcaaggctcggtatggtcccggttctaagataatgggcagtgacgcggatccttggaaagacataggaagcaggtagcaccgatagcggtagccagttctagtgcttgttttgttgctcgctgtatcatatttagttcttttttttttctgtaacttgaatgaaatcgtcaaatgaaggaaagtgaatggctttcctgcccatactatttgtaagctttgcagtagttgccgggttatgttatttactggcattaacatttttacctttattgcagcaccataccctttggtagcttgacatgtcaacagcggcccagcgccaccgtgggctcgttagaggtgattaccaggtgttttgtcagcagggtttgatgttgtcagtctatggaaattccttattctcagtatcctagtatgatggatggagttttggttgagatttgtccttgcattggccgttgtttcaacttcttctgtcagcatttctacgggtttatcacttgtgcagctgtgtctagatgcatggatgcactgaacattggctggaaggacatcgactgtgtttcctggtcatcctgtcctcgaagtgag

SEQ ID NO: 57420 - DNA, 4264 bp, Zea Mays
cgtcggtcgggggctggcgttctcgtgaatcccgtggtgggccgggggcagaagcggtaactcgccgggccagtacatgtaagctgctccaactgaaggaaagcatttccaaggagattgaaaagactgaactccagattgattcattggaaggcgaacttaaatctgtgaatactgaggctgtaactactcttgaaagttctcccacaggggtgacacatacagaaaatctgtcaccttctggtgggacatcaaaggttcctggaagtgccgagatctgtgatacatttgatatgataaaagaaccgggggagctcattgtttctcctaaggtacctgtggtgcaggatgctgatgtcaaaggggtcgatatgatggaggttgaaacagctccagttcgcaatgcaaaaacagttccttcagaagagagtgctgtaactcctggagttgctgagggtaaggcatgtgcagctgctgatcttagctcattgatagcttctgaagaagctgggtctcaaaatgatattgacaatgacaggccgaaaacttctttgtgccatgctgattccatgaaaattaaagttagtgatgaactaccagtgaagcaatggacatactgtgatcatatgtctgatttacacagttctttcacatctgcaaataatgatatagccaaagaaatgaatgaggtgctatttaaatcattgcctgctggtacatctgcccttgatttgttggcatcaagtgatcttcttagccaacggaagattgatttgattgtcaaagaaagacttggagtacgtaaaaccaggctgaggttgaaagagcagattcttacaatgaagttcaaggcatatcgtcacttgtggaaagaggatgtacggctactttctgcaaagaaacagcgattgaagtctaataagcgcattgatcagaataaccgaacatctcaaattggatctcagaggcaacgcttttctaaccgctcacgattagccatgcctgctgggaatttaagtacattctcaactccggaaatgtcagatgttgcaagaaagttgttttcagaatctcaaattaagcgctgcagaaactacttgaaaatgcctgcactgattattgatgagaaagagaaggaacacctgaggtttctgaccaagaatggactggttgtggatcctgttttagttgagaaggaacggatcatgataaatccgtggactcaagacgaaaaggaaatttttatggagatgcttgctaaatttggcaaggatttctccaaaatttccagtttcatcacacataaaactactgcagactgtgtggagttctactacaagcatcataaatcagacagcttccgagaagtgaagaaactgttggaccttcatcaacagctgcctgccagcaattaccttggagcgaaatcaggacagaaatggaatcctgagtcaaatgctgcttctcttgatatgcttggggtagcatcagctgaagcagcccatgaccttgaatatgcaaacaaagtggagaaaatttctgtgaaatccctcatccggactgcatatgggtccaatgtttcatttgtgaccaaaaaatcttctgataaggagtgcattgacaatgtgcctttgcatgagagagaatctgtagcagctgatgtactagcaggcatatgcggcactccttctcctgatggaatgggctcatgcattactagttctgctgatcctggcctgaagatcagcatgaaaagagtggagcatgtcttatcccaagaaaatgacaaaaatgttaatgaggaagaatctctctctgatcaagagtgtgaatttgatccagttgattggaatgatgatgagaagtcaattttcattgaggcaatgaataactacggaaaggatttttctcggatctcgtcttgtgtgaagagcaagtcatatgaacaatgcaaagtgttctttagtaaggctcggaaatcacttggtttggatttgatccatcaaggggcagccgatgttagtatgccagctagtgataccaatggagggaggagcgatactgacgaggcctgtgctgtggaaatggattcagctatctgtaggaagcagtcttgttcaaagattgtgcaagatgtttgtcctactgaaggagccattttagggcctgactctgttttaatctctaagcagacagaaggagatatatcaaataggtgcattgttgatgttaaaattgaggaagatgataaggaagctgataaaaattgcagcaatgttgatgataagaggtccagtgatagtactcatcaagctggccctatcaacatcaattgcccagaaagtacagataagctgcaaggaactgatgatgccgttgaccaagtaaacatgcatagtagtgtcctcaactcttcaaatgagcatgcaatggccatgcactcagaagtgagatccagtttacactctgtagatgtacttcaaacagacaaagctgaaggtactggtactgatcctagccaggtggaagaatgttcacatcatgctgtctacacaccgatgacagctgggaattctggttcctcagctttcttaacttcagatagtggtatcaaggacaatgttcacatctcaaacatgtctggtgcctccactgttagtcctgcattcacttcaaactatcaacattctctgccaggagatatgcccctgtcgaaaccaaagccactagtaacctcccttaccccaaaggatttaatgcctgtgcagttcagttcagttcttcctgatcccactgcatttcgttttgagggcataaagcccaactttgaggacagcagtggcaacaaagtcagcagtgccctaggagctaaagacatttgcaagtacccagcttttaaagacccatctgataatgagcatgacacattgtttcgtaatattgatggttatatgaataatcatctgacaactgaattgccagttttttctcaaagaactgcaagtggcactgtgagtacttcgcagacaaaattccagaatggcaggtccagcagcgtgtgccttccaaacagttctgaggggattcaatggcccaggaaacctgaagaagtaccggaagattctttgaggccttgcgctcgcaatgcaaaaactgagggtggtgagaaacaaaagcgacctggtgatgtcaagttatttgggcagattctcagccatcagccaaccttgccaagttctggctcgttgtgtaatggtagccagagcaagcctccctcaccaaagattgacaaaacatctgtgagattgaccaacaatccaagggatcttgtagttttttcttccaggcctggtgtcagtccacatgtgggtctggaggaaagatcagtgaggagctacggccatctggatggaagcacgatacagcctgagcctctgctggtgatggcgaagtgccagagatccttggccagtgtaccattttactcggctaagaacagcacggttggcgtgtttccagattatcaacaaccttcaatgcagccacatcaattagatcccaagccgctggaaatgttttctgattcgcagaagaggaatgggctggaactcgtctcgggtttcggcggtgctggtatccttgttagcaacgtctcagaccatgtggctgctctcaaggctcggtatggtcccggttctaagataatgggcagtgacgcggatccttggaaagacataggaagcaggtagcaccgatagcggtagccagttctagtgcttgttttgttgctcgctgtatcatatttagttcttttttttttctgtaacttgaatgaaatcgtcaaatgaaggaaagtgaatggctttcctgcccatactatttgtaagctttgcagtagttgccgggttatgttatttactggcattaacatttttacctttattgcagcaccataccctttggtagcttgacatgtcaacagcggcccagcgccaccgtgggctcgttagaggtgattaccaggtgttttgtcagcagggtttgatgttgtcagtctatggaaattccttattctcagtatcctagtatgatggatggagttttggttgagatttgtccttgcattggccgttgtttcaacttcttctgtcagcatttctacgggtttatcacttgtgcagctgtgtctagatgcatggatgcactgaacattggctggaaggacatcgactgtgtttcctggtcatcctgtcctcgaagtgag

SEQ ID NO: 57421 - DNA, 5504 bp, Zea Mays
catcaaatcgggctcaggcccggccgggcgcatccgctttatcggctcacgttggcgcggcctccgtttcctctcccatttccttgtcctctctccctctccctcttcctccctcacggcctcacctctccagcctcccgctcacctcttccacctctctacgctccccagagggccccagacgcaccgccgacgacccccggcgcgggcgcagatcagcgtgcgccgtgacctgcccgccctgcctccgctgctttcgaccctgggagcgcctgcccgcgccgccggggcgcttcgtatcgccgcttctctttttgttccgcggctcttcctcgccggcaggcggccggctgctgccccgcccacgccgcgtctacgtgtcctcaaggggctgggcgctcttgcctgtcaaacctggtgccgcctccggttggaaaccgtttcttacgggttaggagcaggaggtcagagactccccagagttggcttcgccgcgcgcatgcgatttgcggcggcggccgaagcctcgtacagccgccgctgggacgacgacgacaacggcgacgtggatgcctccgccgccgccggatcgaagggactatctataccgggagggccgcaggcacgacggcggcgtcggcgactcgctcctgccgcctgcccccacgccgccgcgctggcgggactcgccgtaccacccgccgccgccaccgccccttcgggaccccgcgcggccctcgccgcgccgtgcgccgccgttggcctcctcagaaggctactaccgacagggtggcggcgcgtacgaccgttcctaccctgatgacccgccgtctgtctacacgccgtcgcgctcggaccggtactggccggaagacgacgacgggggatacaagggtttcggtcggtatggcagcggtggccgcagggacggccgtgacatgaggggttcataccggaagtccccatacaggggcggctacggaagcgacttctccaggaaccactcagagcagccccctccgccaccacccaggaggtctcccttgagtactcggctctctgcttcagggaaggaggcttcagctcagcctctggccgcggcaggtcctcacgggacggaagacgaggcaccaaggaagaaggcacgccttggatggggtcagggtttggccaagtatgagaagcagaaggtgcagggtccttcggatcccgctgaagttgttgctgatgtaagttcaggtgatggcgaacagaagacctcccttgcgcctgcgccttctgttgcatctgtatttcctgctgcaccactgcctgagtctgcaccagcacctcctgctgctcttgcactttcgtctgctcctatgcgatgctcatctccagttactgcaccgccatattgttcctcagcacctgaagataaatcatgtgaaatgacaccaaatacggtcactaactctactaaagatgtcttggaagctgatgtacatgtaagctgctccaactgaaggaaagcatttccaaggagattgaaaagactgaactccagattgattcattggaaggcgaacttaaatctgtgaatactgaggctgtaactactcttgaaagttctcccacaggggtgacacatacagaaaatctgtcaccttctggtgggacatcaaaggttcctggaagtgccgagatctgtgatacatttgatatgataaaagaaccgggggagctcattgtttctcctaaggtacctgtggtgcaggatgctgatgtcaaaggggtcgatatgatggaggttgaaacagctccagttcgcaatgcaaaaacagttccttcagaagagagtgctgtaactcctggagttgctgagggtaaggcatgtgcagctgctgatcttagctcattgatagcttctgaagaagctgggtctcaaaatgatattgacaatgacaggccgaaaacttctttgtgccatgctgattccatgaaaattaaagttagtgatgaactaccagtgaagcaatggacatactgtgatcatatgtctgatttacacagttctttcacatctgcaaataatgatatagccaaagaaatgaatgaggtgctatttaaatcattgcctgctggtacatctgcccttgatttgttggcatcaagtgatcttcttagccaacggaagattgatttgattgtcaaagaaagacttggagtacgtaaaaccaggctgaggttgaaagagcagattcttacaatgaagttcaaggcatatcgtcacttgtggaaagaggatgtacggctactttctgcaaagaaacagcgattgaagtctaataagcgcattgatcagaataaccgaacatctcaaattggatctcagaggcaacgcttttctaaccgctcacgattagccatgcctgctgggaatttaagtacattctcaactccggaaatgtcagatgttgcaagaaagttgttttcagaatctcaaattaagcgctgcagaaactacttgaaaatgcctgcactgattattgatgagaaagagaaggaacacctgaggtttctgaccaagaatggactggttgtggatcctgttttagttgagaaggaacggatcatgataaatccgtggactcaagacgaaaaggaaatttttatggagatgcttgctaaatttggcaaggatttctccaaaatttccagtttcatcacacataaaactactgcagactgtgtggagttctactacaagcatcataaatcagacagcttccgagaagtgaagaaactgttggaccttcatcaacagctgcctgccagcaattaccttggagcgaaatcaggacagaaatggaatcctgagtcaaatgctgcttctcttgatatgcttggggtagcatcagctgaagcagcccatgaccttgaatatgcaaacaaagtggagaaaatttctgtgaaatccctcatccggactgcatatgggtccaatgtttcatttgtgaccaaaaaatcttctgataaggagtgcattgacaatgtgcctttgcatgagagagaatctgtagcagctgatgtactagcaggcatatgcggcactccttctcctgatggaatgggctcatgcattactagttctgctgatcctggcctgaagatcagcatgaaaagagtggagcatgtcttatcccaagaaaatgacaaaaatgttaatgaggaagaatctctctctgatcaagagtgtgaatttgatccagttgattggaatgatgatgagaagtcaattttcattgaggcaatgaataactacggaaaggatttttctcggatctcgtcttgtgtgaagagcaagtcatatgaacaatgcaaagtgttctttagtaaggctcggaaatcacttggtttggatttgatccatcaaggggcagccgatgttagtatgccagctagtgataccaatggagggaggagcgatactgacgaggcctgtgctgtggaaatggattcagctatctgtaggaagcagtcttgttcaaagattgtgcaagatgtttgtcctactgaaggagccattttagggcctgactctgttttaatctctaagcagacagaaggagatatatcaaataggtgcattgttgatgttaaaattgaggaagatgataaggaagctgataaaaattgcagcaatgttgatgataagaggtccagtgatagtactcatcaagctggccctatcaacatcaattgcccagaaagtacagataagctgcaaggaactgatgatgccgttgaccaagtaaacatgcatagtagtgtcctcaactcttcaaatgagcatgcaatggccatgcactcagaagtgagatccagtttacactctgtagatgtacttcaaacagacaaagctgaaggtactggtactgatcctagccaggtggaagaatgttcacatcatgctgtctacacaccgatgacagctgggaattctggttcctcagctttcttaacttcagatagtggtatcaaggacaatgttcacatctcaaacatgtctggtgcctccactgttagtcctgcattcacttcaaactatcaacattctctgccaggagatatgcccctgtcgaaaccaaagccactagtaacctcccttaccccaaaggatttaatgcctgtgcagttcagttcagttcttcctgatcccactgcatttcgttttgagggcataaagcccaactttgaggacagcagtggcaacaaagtcagcagtgccctaggagctaaagacatttgcaagtacccagcttttaaagacccatctgataatgagcatgacacattgtttcgtaatattgatggttatatgaataatcatctgacaactgaattgccagttttttctcaaagaactgcaagtggcactgtgagtacttcgcagacaaaattccagaatggcaggtccagcagcgtgtgccttccaaacagttctgaggggattcaatggcccaggaaacctgaagaagtaccggaagattctttgaggccttgcgctcgcaatgcaaaaactgagggtggtgagaaacaaaagcgacctggtgatgtcaagttatttgggcagattctcagccatcagccaaccttgccaagttctggctcgttgtgtaatggtagccagagcaagcctccctcaccaaagattgacaaaacatctgtgagattgaccaacaatccaagggatcttgtagttttttcttccaggcctggtgtcagtccacatgtgggtctggaggaaagatcagtgaggagctacggccatctggatggaagcacgatacagcctgagcctctgctggtgatggcgaagtgccagagatccttggccagtgtaccattttactcggctaagaacagcacggttggcgtgtttccagattatcaacaaccttcaatgcagccacatcaattagatcccaagccgctggaaatgttttctgattcgcagaagaggaatgggctggaactcgtctcgggtttcggcggtgctggtatccttgttagcaacgtctcagaccatgtggctgctctcaaggctcggtatggtcccggttctaagataatgggcagtgacgcggatccttggaaagacataggaagcaggtagcaccgatagcggtagccagttctagtgcttgttttgttgctcgctgtatcatatttagttcttttttttttctgtaacttgaatgaaatcgtcaaatgaaggaaagtgaatggctttcctgcccatactatttgtaagctttgcagtagttgccgggttatgttatttactggcattaacatttttacctttattgcagcaccataccctttggtagcttgacatgtcaacagcggcccagcgccaccgtgggctcgttagagctgtgtctagatgcatggatgcactgaacattggctggaaggacatcgactgtgtttcctggtcatcctgtcctcgaagtgag

SEQ ID NO: 57422 - DNA, 5593 bp, Zea Mays
gcgcatccgctttatcggctcacgttggcgcggcctccgtttcctctcccatttccttgtcctctctccctctccctcttcctccctcacggcctcacctctccagcctcccgctcacctcttccacctctctacgctccccagagggccccagacgcaccgccgacgacccccggcgcgggcgcagatcagcgtgcgccgtgacctgcccgccctgcctccgctgctttcgaccctgggagcgcctgcccgcgccgccggggcgcttcgtatcgccgcttctctttttgttccgcggctcttcctcgccggcaggcggccggctgctgccccgcccacgccgcgtctacgtgtcctcaaggggctgggcgctcttgcctgtcaaacctggtgccgcctccggttggaaaccgtttcttacgggttaggagcaggaggtcagagactccccagagttggcttcgccgcgcgcatgcgatttgcggcggcggccgaagcctcgtacagccgccgctgggacgacgacgacaacggcgacgtggatgcctccgccgccgccggatcgaagggactatctataccgggagggccgcaggcacgacggcggcgtcggcgactcgctcctgccgcctgcccccacgccgccgcgctggcgggactcgccgtaccacccgccgccgccaccgccccttcgggaccccgcgcggccctcgccgcgccgtgcgccgccgttggcctcctcagaaggctactaccgacagggtggcggcgcgtacgaccgttcctaccctgatgacccgccgtctgtctacacgccgtcgcgctcggaccggtactggccggaagacgacgacgggggatacaagggtttcggtcggtatggcagcggtggccgcagggacggccgtgacatgaggggttcataccggaagtccccatacaggggcggctacggaagcgacttctccaggaaccactcagagcagccccctccgccaccacccaggaggtctcccttgaggtcagttgccgttccgatctgctatgaccctccgggcaatagaattaacagaggggacagggacaacctcccacgggtgacaccatggcggagaagggagagcagatctgaagtagccgatgctgatggaccgctttctgttggccaaagtactcggctctctgcttcagggaaggaggcttcagctcagcctctggccgcggcaggtcctcacgggacggaagacgaggcaccaaggaagaaggcacgccttggatggggtcagggtttggccaagtatgagaagcagaaggtgcagggtccttcggatcccgctgaagttgttgctgatgtaagttcaggtgatggcgaacagaagacctcccttgcgcctgcgccttctgttgcatctgtatttcctgctgcaccactgcctgagtctgcaccagcacctcctgctgctcttgcactttcgtctgctcctatgcgatgctcatctccagttactgcaccgccatattgttcctcagcacctgaagataaatcatgtgaaatgacaccaaatacggtcactaactctactaaagatgtcttggaagctgatgtacatgtaagctgctccaactgaaggaaagcatttccaaggagattgaaaagactgaactccagattgattcattggaaggcgaacttaaatctgtgaatactgaggctgtaactactcttgaaagttctcccacaggggtgacacatacagaaaatctgtcaccttctggtgggacatcaaaggttcctggaagtgccgagatctgtgatacatttgatatgataaaagaaccgggggagctcattgtttctcctaaggtacctgtggtgcaggatgctgatgtcaaaggggtcgatatgatggaggttgaaacagctccagttcgcaatgcaaaaacagttccttcagaagagagtgctgtaactcctggagttgctgagggtaaggcatgtgcagctgctgatcttagctcattgatagcttctgaagaagctgggtctcaaaatgatattgacaatgacaggccgaaaacttctttgtgccatgctgattccatgaaaattaaagttagtgatgaactaccagtgaagcaatggacatactgtgatcatatgtctgatttacacagttctttcacatctgcaaataatgatatagccaaagaaatgaatgaggtgctatttaaatcattgcctgctggtacatctgcccttgatttgttggcatcaagtgatcttcttagccaacggaagattgatttgattgtcaaagaaagacttggagtacgtaaaaccaggctgaggttgaaagagcagattcttacaatgaagttcaaggcatatcgtcacttgtggaaagaggatgtacggctactttctgcaaagaaacagcgattgaagtctaataagcgcattgatcagaataaccgaacatctcaaattggatctcagaggcaacgcttttctaaccgctcacgattagccatgcctgctgggaatttaagtacattctcaactccggaaatgtcagatgttgcaagaaagttgttttcagaatctcaaattaagcgctgcagaaactacttgaaaatgcctgcactgattattgatgagaaagagaaggaacacctgaggtttctgaccaagaatggactggttgtggatcctgttttagttgagaaggaacggatcatgataaatccgtggactcaagacgaaaaggaaatttttatggagatgcttgctaaatttggcaaggatttctccaaaatttccagtttcatcacacataaaactactgcagactgtgtggagttctactacaagcatcataaatcagacagcttccgagaagtgaagaaactgttggaccttcatcaacagctgcctgccagcaattaccttggagcgaaatcaggacagaaatggaatcctgagtcaaatgctgcttctcttgatatgcttggggtagcatcagctgaagcagcccatgaccttgaatatgcaaacaaagtggagaaaatttctgtgaaatccctcatccggactgcatatgggtccaatgtttcatttgtgaccaaaaaatcttctgataaggagtgcattgacaatgtgcctttgcatgagagagaatctgtagcagctgatgtactagcaggcatatgcggcactccttctcctgatggaatgggctcatgcattactagttctgctgatcctggcctgaagatcagcatgaaaagagtggagcatgtcttatcccaagaaaatgacaaaaatgttaatgaggaagaatctctctctgatcaagagtgtgaatttgatccagttgattggaatgatgatgagaagtcaattttcattgaggcaatgaataactacggaaaggatttttctcggatctcgtcttgtgtgaagagcaagtcatatgaacaatgcaaagtgttctttagtaaggctcggaaatcacttggtttggatttgatccatcaaggggcagccgatgttagtatgccagctagtgataccaatggagggaggagcgatactgacgaggcctgtgctgtggaaatggattcagctatctgtaggaagcagtcttgttcaaagattgtgcaagatgtttgtcctactgaaggagccattttagggcctgactctgttttaatctctaagcagacagaaggagatatatcaaataggtgcattgttgatgttaaaattgaggaagatgataaggaagctgataaaaattgcagcaatgttgatgataagaggtccagtgatagtactcatcaagctggccctatcaacatcaattgcccagaaagtacagataagctgcaaggaactgatgatgccgttgaccaagtaaacatgcatagtagtgtcctcaactcttcaaatgagcatgcaatggccatgcactcagaagtgagatccagtttacactctgtagatgtacttcaaacagacaaagctgaaggtactggtactgatcctagccaggtggaagaatgttcacatcatgctgtctacacaccgatgacagctgggaattctggttcctcagctttcttaacttcagatagtggtatcaaggacaatgttcacatctcaaacatgtctggtgcctccactgttagtcctgcattcacttcaaactatcaacattctctgccaggagatatgcccctgtcgaaaccaaagccactagtaacctcccttaccccaaaggatttaatgcctgtgcagttcagttcagttcttcctgatcccactgcatttcgttttgagggcataaagcccaactttgaggacagcagtggcaacaaagtcagcagtgccctaggagctaaagacatttgcaagtacccagcttttaaagacccatctgataatgagcatgacacattgtttcgtaatattgatggttatatgaataatcatctgacaactgaattgccagttttttctcaaagaactgcaagtggcactgtgagtacttcgcagacaaaattccagaatggcaggtccagcagcgtgtgccttccaaacagttctgaggggattcaatggcccaggaaacctgaagaagtaccggaagattctttgaggccttgcgctcgcaatgcaaaaactgagggtggtgagaaacaaaagcgacctggtgatgtcaagttatttgggcagattctcagccatcagccaaccttgccaagttctggctcgttgtgtaatggtagccagagcaagcctccctcaccaaagattgacaaaacatctgtgagattgaccaacaatccaagggatcttgtagttttttcttccaggcctggtgtcagtccacatgtgggtctggaggaaagatcagtgaggagctacggccatctggatggaagcacgatacagcctgagcctctgctggtgatggcgaagtgccagagatccttggccagtgtaccattttactcggctaagaacagcacggttggcgtgtttccagattatcaacaaccttcaatgcagccacatcaattagatcccaagccgctggaaatgttttctgattcgcagaagaggaatgggctggaactcgtctcgggtttcggcggtgctggtatccttgttagcaacgtctcagaccatgtggctgctctcaaggctcggtatggtcccggttctaagataatgggcagtgacgcggatccttggaaagacataggaagcagcaccataccctttggtagcttgacatgtcaacagcggcccagcgccaccgtgggctcgttagaggtgattaccaggtgttttgtcagcagggtttgatgttgtcagtctatggaaattccttattctcagtatcctagtatgatggatggagttttggttgagatttgtccttgcattggccgttgtttcaacttcttctgtcagcatttctacgggtttatcacttgtgcagctgtgtctagatgcatggatgcactgaacattggctggaaggacatcgactgtgtttcctggtcatcctgtcctcgaagtgag

SEQ ID NO: 57423 - DNA, 1663 bp, Zea Mays
aatccacatccgtccctctcaacacaataggctcgtgtggataagtggatgtggatccgatacaatcccaatcccatgcagtccggtcggtggatccaatgcgatcaggccggcagctccctggccggctcccagcccgagcccatcattgcgccgccgcctccagctccagctcatccggatgagggggaaggaagacgataccagacgctactcctacaactcaccaccactacactatcccctccgctctctctccgcactactgcgtattaggtagcctctcgcattgacaagccagccggtggtttggttcgctttgctttgcttacgtgctgcgctgcgcgctccgaccaggcccgccccgaccggcgatgcagcggtggctcccggcgctcctccgccgcgcggcgcccggcggcggcgcggcgcggctcctcgccacgtcctccctcctcttcgacgacacgcaggagcagttcaaggagagcgtgcgcaagttcgcgcaggaggccatcgcgccgcgcgccgcggccatcgacgcctccaaccacttcccgcgggacgtggacctgtggaggctcatgggagacttcaacctccacggcctcaccgcgcccgaggagtacggcgggatggggctcgggtacatgtaccactgcatcgccatggaggagatcaccagggcatccggcgccgtcggcctctcctacggcgcgcactccaacctctgcatcaaccagctcgtccggcacggaaacccggagcagaagctcaagtatctgcccaagtggggagcatatcggggcactggcgatgagtgaacccaactctggctctgatgtcgtcagcatgaagtgcaaagctgagaaagtggacggtggctatgtccttaatgggaataagatgtggtgcaccaatggcccgtctgctcagacactggttgtttacgcaaaaacagatctagctgcagggtcaaaaggaataactgcattcataatcgagaaagggatgcccgggttcagtactgctcagaagttggacaaacttggcatgagaggaagcgacacgtgtgagcttgtttttgagaactgctttgtgccatgcgaaaatgtcctcggtgaagaaggcaaaggtgtttatgtcatgatgtcagggcttgatctggaaaggcttgtattagctgcgggccctattggccttatgcaggcatgccttgatgttgtacttccatatgttcgccagagggagcaattcggccgtccaattggtgaatttcagttcatacaggggaaaatggctgatatgtacacttcgttgcagtcgtcaagatcatttgtatactcagttgctagggactgcgataatggcaaagttgatcgcaaggattgtgcaggagtaattctctttgctgctgaaaatgcaacccaagttgcacttcaggcaatccagtgtcttggtggaaatgggtacataaatgagtacccaactggtcgtctcctgagagatgcaaaattgtttgagattggtgccggtactagtgaggtaagaagaatgataattggccgtgagctcttcaaagaggactgaaacttctattttgcaagccagatatcagagcatattgttagctggaggaggtcagggcctgcttagagtgagg

SEQ ID NO: 57424 - DNA, 2070 bp, Zea Mays
aatcccatgcagtccggtcggtggatccaatgcgatcaggccggcagctccctggccggctcccagcccgagcccatcattgcgccgccgcctccagctccagctcatccggatgagggggaaggaagacgataccagacgctactcctacaactcaccaccactacactatcccctccgctctctctccgcactactgcgtattaggcccgccccgaccggcgatgcagcggtggctcccggcgctcctccgccgcgcggcgcccggcggcggcgcggcgcggctcctcgccacgtcctccctcctcttcgacgacacgcaggagcagttcaaggagagcgtgcgcaagttcgcgcaggaggccatcgcgccgcgcgccgcggccatcgacgcctccaaccacttcccgcgggacgtggacctgtggaggctcatgggagacttcaacctccacggcctcaccgcgcccgaggagtacggcgggatggggctcgggtacatgtaccactgcatcgccatggaggagatcaccagggcatccggcgccgtcggcctctcctacggcgcgcactccaacctctgcatcaaccagctcgtccggcacggaaacccggagcagaagctcaagtatctgcccaagtggggagcatatcggggcactggcgatgagtgaacccaactctggctctgatgtcgtcagcatgaagtgcaaagctgagaaagtggacggtggctatgtccttaatgggaataagatgtggtgcaccaatggcccgtctgctcagacactggttgtttacgcaaaaacagatctagctgcagggtcaaaaggaataactgcattcataatcgagaaagggatgcccgggttcagtactgctcagaagttggacaaacttggcatgagaggaagcgacacgtgtgagcttgtttttgagaactgctttgtgccatgcgaaaatgtcctcggtgaagaaggcaaaggtgtttatgtcatgatgtcagggcttgatctggaaaggcttgtattagctgcgggccctattggccttatgcaggcatgccttgatgttgtacttccatatgttcgccagagggagcaattcggccgtccaattggtgaatttcagttcatacaggggaaaatggctgatatgtacacttcgttgcagtcgtcaagttgctagggactgcgataatggcaaagttgatcgcaaggattgtgcaggagtaattctctttgctgctgaaaatgcaacccaagttgcacttcaggcaatccagtgtcttggtggaaatgggtacataaatgagtacccaactggtcgtctcctgagagatgcaaaattgtttgagattggtgccggtactagtgaggtaagaagaatgataattggccgtgagctcttcaaagaggactgaaacttctattttgcaagccagatatcagagcatattgttagctggaggaggtgagggcgatttagatatttagcaaatcacccctgtggttcaatgcttttgtataaccgcagacatacatcaaataaagttcacttgtacttgctgcttgcagtggctctatttttctgtcaataaagttttttatgtctctgacttatgcaatgttgttcagttgcattttactatattagtgtagacaagacagtaatataaatgtttcaatgagtgcagaatagaggtattgcttaaggaatctttacatcaagaatattttagtagcttctccacttttgatgaataataacattggcacaaactagttgaggtggtgaatttgatattcaggatttttttccataactggtttcaaagttaagtttacattgatagccatgataatatatgatacacaactctcctgcatgttcgagaaataaaatagttatgatgatatgaatctctcttttggggaagaaaacatgaaagtacaaaattagaatacagctattgatcagaatattctgaaaacacaattaagaagtgcacactgcttctcttaatgaaatgacatgtagctctcctgcatcattcaagaaaaagaagaa

SEQ ID NO: 57425 - DNA, 1521 bp, Zea Mays
aatcccatgcagtccggtcggtggatccaatgcgatcaggccggcagctccctggccggctcccagcccgagcccatcattgcgccgccgcctccagctccagctcatccggatgagggggaaggaagacgataccagacgctactcctacaactcaccaccactacactatcccctccgctctctctccgcactactgcgtattaggcccgccccgaccggcgatgcagcggtggctcccggcgctcctccgccgcgcggcgcccggcggcggcgcggcgcggctcctcgccacgtcctccctcctcttcgacgacacgcaggagcagttcaaggagagcgtgcgcaagttcgcgcaggaggccatcgcgccgcgcgccgcggccatcgacgcctccaaccacttcccgcgggacgtggacctgtggaggctcatgggagacttcaacctccacggcctcaccgcgcccgaggagtacggcgggatggggctcgggtacatgtaccactgcatcgccatggaggagatcaccagggcatccggcgccgtcggcctctcctacggcgcgcactccaacctctgcatcaaccagctcgtccggcacggaaacccggagcagaagctcaagtatctgcccaagctgatcagtggggagcatatcggggcactggcgatgagtgaacccaactctggctctgatgtcgtcagcatgaagtgcaaagctgagaaagtggacggtggctatgtccttaatgggaataagatgtggtgcaccaatggcccgtctgctcagacactggttgtttacgcaaaaacagatctagctgcagggtcaaaaggaataactgcattcataatcgagaaagggatgcccgggttcagtactgctcagaagttggacaaacttggcatgagaggaagcgacacgtgtgagcttgtttttgagaactgctttgtgccatgcgaaaatgtcctcggtgaagaaggcaaaggtgtttatgtcatgatgtcagggcttgatctggaaaggcttgtattagctgcgggccctattggccttatgcaggcatgccttgatgttgtacttccatatgttcgccagagggagcaattcggccgtccaattggtgaatttcagttcatacaggggaaaatggctgatatgtacacttcgttgcagtcgtcaagatcatttgtatactcagttgctagggactgcgataatggcaaagttgatcgcaaggattgtgcaggagtaattctctttgctgctgaaaatgcaacccaagttgcacttcaggcaatccagtgtcttggtggaaatgggtacataaatgagtacccaactggtcgtctcctgagagatgcaaaattgtttgagattggtgccggtactagtgaggtaagaagaatgataattggccgtgagctcttcaaagaggactgaaacttctattttgcaagccagatatcagagcatattgttagctggaggaggtcagggcctgcttagagtgagg

SEQ ID NO: 57426 - DNA, 1523 bp, Zea Mays
aatcccatgcagtccggtcggtggatccaatgcgatcaggccggcagctccctggccggctcccagcccgagcccatcattgcgccgccgcctccagctccagctcatccggatgagggggaaggaagacgataccagacgctactcctacaactcaccaccactacactatcccctccgctctctctccgcactactgcgtattaggcccgccccgaccggcgatgcagcggtggctcccggcgctcctccgccgcgcggcgcccggcggcggcgcggcgcggctcctcgccacgtcctccctcctcttcgacgacacgcaggagcagttcaaggagagcgtgcgcaagttcgcgcaggaggccatcgcgccgcgcgccgcggccatcgacgcctccaaccacttcccgcgggacgtggacctgtggaggctcatgggagacttcaacctccacggcctcaccgcgcccgaggagtacggcgggatggggctcgggtacatgtaccactgcatcgccatggaggagatcaccagggcatccggcgccgtcggcctctcctacggcgcgcactccaacctctgcatcaaccagctcgtccggcacggaaacccggagcagaagctcaagtatctgcccaagctgatcagtggggagcatatcggggcactggcgatgagtgaacccaactctggctctgatgtcgtcagcatgaagtgcaaagctgagaaagtggacggtggctatgtccttaatgggaataagatgtggtgcaccaatggcccgtctgctcagacactggttgtttacgcaaaaacagatctagctgcagggtcaaaaggaataactgcattcataatcgagaaagggatgcccgggttcagtactgctcagaagttggacaaacttggcatgagaggaagcgacacgtgtgagcttgtttttgagaactgctttgtgccatgcgaaaatgtcctcggtgaagaaggcaaaggtgtttatgtcatgatgtcagggcttgatctggaaaggcttgtattagctgcgggccctattggccttatgcaggcatgccttgatgttgtacttccatatgttcgccagagggagcaattcggccgtccaattggtgaatttcagttcatacaggggaaaatggctgatatgtacacttcgttgcagtcgtcaagatcatttgtatactcagttgctagggactgcgataatggcaaagttgatcgcaaggattgtgcaggagtaattctctttgctgctgaaaatgcaacccaagttgcacttcaggcaatccagtgtcttggtggaaatgggtacataaatgagtacccaactggtcgtctcctgagagatgcaaaattgtttgagattggtgccggtactagtgaggtaagaagaatgataattggccgtgagctcttcaaagaggactgaaacttctattttgcaagccagatatcagagcatattgttagctggaggagatgtttgatagaagggcaatggtta

SEQ ID NO: 57427 - DNA, 2317 bp, Zea Mays
atcgaatccatccatgaaccattgagtggccttttcctaccactaattaaggacgcagtgtgggcgcctggcgcggccatgcccccgcctcgggtgccctcctcatccgcgcgtcgtacactaatctgcatcaacccctcccctgccgtctcgcgaaacctccgcttcaccttcacgaaatatcctcccccaatcacgtagttgtcgccactcccctcccccacctgccgcagtcgcccatgccatccccgtgcaggcgacctccgcgccgttgaccccgggcgcgcctgccatcctcatccacgccccaaatcctcacccatgtctctcaacaccgtgctgccaacccaaccgcgtgctcggcttcggtgccgcgaccgccaccgccccgcacgcaatagacaaggggaagttgggttgtggtggagaagtgctacgacctcctcgtctcggtcggcgatgatgggaagcgacaccgcaagccatgatcttgtcaccgtgggagctgcattggtgcccccacacggtcgtttcagcctttcttgggaggctgctttagcaggaggagcctgtgagcgcagcagatctggtggcccgcaagacctccgccgaccactccgccccgacaatctagatctatatatttggtctgttctctttcattcgtttcctccctctcagcctcaattgcgcacctcccacaggcgtcctcgtggtggtagatccgcccgtgcgccctgggatctataatttgtttgacgtgcggtggggtgctgcagcctcttttggtactctcaaattttttgtgagccatttcaagctcaatatcatgacgtgcacaacttttcagcgagaaatgttgggtcctcttctactggcaccataaatgcactcaaggctgcctctgctacaaatgctcgtgcacatgctccatgcattcaaagtataatatttgagaattttttcacatttcacaagcacttcttttaattgtcactcattatgtatttatgcatcatactatagcagtatttacttctggcacctaggatacatatttcacatttttcaattcactttgcatttcaaggaacactcaaattttggtaagtatcatgtatgctcctgatggtagtaagtttatcaatgtgagttctgataagaagggtttgatatatgatggcaaaactagataaaagataggagagctttccgctgaaggcagacacatagggagcatatatgctgttagctagagtcttgacagcaaacaagtaattttctattaattattttctatagaaatgtgacaatttgtatatactttctgggaaagcattgagaacttgacgagtaaagcctaatagagttttagtgtgcagtaagagcttcaaactggaacagcagagcatgtttgagattttgatgagtaaacagatgattgggtgttgtatatcaagctaagcactgctttaagaattgttttcctttttttcagcttccacacatcggagttactacagtacattgattctctgtcctacacctgctccttgcattcaaagtagaatgtttgaggaattttgcacatttcacaagcacttcttttaattgtcactcattatgtatttgtgcatcataatgtagcagtatttacttatggcacctgggagactaggatacatatttcatatttttttcaattcattttgcattttagggatcactcaaattttgttacttgtatctgctgtgcttctgatggtagtaagtttatcattgtgagttctgataagaagggtttgacatatgatggcaaaattggagataagataggatcgatatccactgaaggcggacaaataaggagcatatatgctgttagctggagccttgacagtaaacatcttccagctgctcctacaacaaaaggatatacaagggcgatctgtatctgtggcaaattatgaatggttatacttgtacataagaacctctaggatttcagcttccagctgcttctacaggaaaaggatatacaaagccaaagcttcttctcaagcatcaacacatcaaacgtagtatatataaatccatagccaagataattgtagctacatcagatgagcagtgacattcttgtaggaattttatagacaccgtaatattttttaaaaaaatactaattgtttggacgatcatatgagtgtaaaagtttatcgtgggacgaccagattataccaacattttacttgagctcataaatttcctcttatttggtctttgtatggtagaattatgtcattctataatattt

SEQ ID NO: 57428 - DNA, 978 bp, Zea Mays
caatcacgtagttgtcgccactcccctcccccacctgccgcagtcgcccatgccatccccgtgcaggcgacctccgcgccgttgaccccgggcgcgcctgccatcctcatccacgccccaaatcctcacccatgtctctcaacaccgtgctgccaacccaaccgcgtgctcggcttcggtgccgcgaccgccaccgccccgcacgcaatagacaaggggaagttgggttgtggtggagaagtgctacgacctcctcgtctcggtcggcgatgatgggaagcgacaccgcaagccatgatcttgtcaccgtgggagctgcattggtgcccccacacggtcgtttcagcctttcttgggaggctgctttagcaggaggagcctgtgagcgcagcagatctggtggcccgcaagacctccgccgaccactccgccccgacaatctagatctatatatttgaagggtttgacatatgatggcaaaattggagataagataggatcgatatccactgaaggcggacaaataaggagcatatatgctgttagctggagccttgacagtaaacatcttccagctgctcctacaacaaaaggatatacaagggcgatctgtatctgtggcaaattatgaatggttatacttgtacataagaacctctaggatttcagcttccagctgcttctacaggaaaaggatatacaaagccaaagcttcttctcaagcatcaacacatcaaacgtagtatatataaatccatagccaagataattgtagctacatcagatgagcagtgacattcttgtaggaattttatagacaccgtaatattttttaaaaaaatactaattgtttggacgatcatatgagtgtaaaagtttatcgtgggacgaccagattataccaacattttacttgagctcataaatttcctcttatttggtctttgtatggtagaattatgtcattctataatattt

SEQ ID NO: 57429 - DNA, 1557 bp, Zea Mays
atgtgcactgctcttggaatacattctaagagttttgaaaagccttttcttgagtgcatttctgaatttgatggtacagaaggtgttaaatatatacaacaatctgatattctagactacctgaagcatgtagaatcaaggttgcaagaacatgaaaggtgtacgtgaaggatcctgacttcctgtgtgtgctgagttgctagacactcttgttacttatttatggcatattcatggtgtggtttaccatggtatatataggacaaatgaacctaaaggcttaaggcaggtgaaagttgatgtgaggacagacgattgggctacctcaaatggagcaggatgggaaaataaacttgattcattctggcaaggcagaactcaaggtgaagatgcttgcacatcagcatcacctctaaaaagcaatagtggggaaaaaaacaagtgtcactaaccgctgactaatcatagcagcaattcttgagatagaaataagtgcatagtgaagtacactagaagacataaaaagacttccaggtcccatataactagtcgcttaaaaggctatcaaatctaaagaatgtttgtggagaaaaaacatatataacaaacaaaaaaattaatagatgtcgtacctagcagaaaacacaattcaaaaactatattctttgatactgagtatactatcattgtcagccatataaaaaaagataatcacctattcctacagctggcagaactgaatttgaagcaacagaacttattatctggaggcaatcatttttatgaccagtacgccaatgcagtgcctaagaaacagcaatcaagagccatcaatctaaaatataagtttgtatcagctgtcagaaacgaattgatggacactaaagtttggcatacatacctgatgtttctcataacagtaccttgctttcttgcagctactacatattttatcacctttccaggtaccacaccagtggcatacaggagctgggcaacaaatagttatgcatttgaaagaatttagtaacattaactgtttgacagccaagggacaagtaaagctcatttaccaacaactagtagacagattgcaagattataggcaccgaaacagtaatttgacacaccagaaagttttaagacagcaattgtcgtatatttatgctaagtttacatatttccgaataaacttctcttgaataaaatttgcatctgccataggtccctagacactccaaacataaataaacataaatgttcccaaatgagaaaacaaggtagtagttgacatggagaaaatgttgcacactgacataaactactaatgtaataaatgacaatgtcaagaaattaggagaagcagaagtcagtatcaaacatttacaatttcacatatttatacaacatctagtgcaggatatatactgtcaactgccactcaacagaagacaacactacctcctggacagagtggtttgtcagagccatcatgctttggaggttgagctgagtagaaggcattattccgtggcaattggcaccggaaaatcttca

SEQ ID NO: 57430 - DNA, 632 bp, Zea Mays
aaaaacggttgcaacggtgtatgccctgaaaaatttgacaatagcatcgacggtgtatgccctatcaccggcaagaatcatggtagcaacatcaaggaaagtcgtgatcatggtgaaaaaaaggcaaggatcctcatgtggtaccagcaaaacgcccagttggttatgactccaacacttccaagctaggtctgcttagctccattgcctgccagacactgctccatgaatgtagaaaatgtaagttgtgtacccataaattctgcaaggcatgtatattatgctttaaagacagcccactatgtggtgccaatatagaattcaagctcttgttcaccgattcattgatggtcatgccagaatcaagcgatcacatgctacaggggatgtggaagcagcaggtggcaagaataaagtcatatatgaggatgttttcatggagagatggacttttgtggcgcaacaagctgtgagggctttttgtgtctaagacattggaagtgcaaagtcaaggctcactatgtgtagacgatatcaaggagttaaaatgttcagaagatagacctatgttcataacttggagctgtgttaggaatgcttggggactgttggacacatttatttggcatgag

SEQ ID NO: 57431 - DNA, 3393 bp, Zea Mays
aacagttcttcaaacgaggaacaggggcggtccacatctggccgtacccttcccggctccctccgtctccgatatgcaccagcaccacgcctcccgctcccgctccccctgcccctcctcgtccgccgcggcgcgtcccaggaccgaggacttccccgtggacatcgtcagcgacgaggagatggcgctcatcgacgccgcgctcgccgccgccgcggcgggggcgcgcccgctcctctccgcagcggcccgccgcgccgccgtcccgctctcccgtgcggcgtgctcggccaccgacgggctcgccgccggcgacatcgaggacgcgcctccgcggtctcggctcgctcggttccgggagcgccgcgcgctcgccgtcaccgacatcaccgccacggaatggtgcgagaagcagatggagttcgtgctcgaacggggcaagccggaaaagaccgcggccatgagggtcggatcggaccgccatgcccagctcgagcaagaggttgttgagagagtggacgtcgccattagatctgcggaagagctatgggcagtaaaattcatgaacttcatcgtgggaacaaaccagctactgttcgagggcataacgcgggaaattccagtgatcggggttgtggaaggttcatggatatcaggaatcatagacgaaatccaaatggccacggttggcgtttcattgcaacccatgctggtggatacaaagacacggtccacacgaacagttccatcagaagcacaaaaaagaaatggaaggtttgctccttacatttgctttcctaaccatttcacagtatgttcccctgaggaataactggtattttgccactcgaaaggttgcctccttgttataataattataggtctatttgagtgtatgaaatatggacctgatgataattttgcgaactcctctcgttgtaattagggattacaatttcgtttcataattttcaaaacccgttttattgactaaagtttgacttttatatttttaattttgaaatcggaatataccagaaaccggaccggttttcgtatctcgcttagcaccgagaacgagaaatttcatcggatttcggtgtttaccgaccgagaaagtgaaccgtggttgtaatggcaaatatccaattctcttgttcgccagactagtgaattcccttcaagtgacttctgctttgatctgaatttgcaatgaattgtattaatgctattttggcatgtttacaattgcccaatcatcgcttcagtacctaaaaaaagggattaattggtagactgtgttgttttatgcaaatctttgtactatatttgtaaatctaccggggggatccatttggctttgtcttaagaaatgggagtatcaaactctttactgatgtactcacacgacctgtgacacctgggatcaaaagcctgggtgtgcagcctctcaactggaatttctaccaaccatgtgatcactcagtttactacaagttcctattgccgccaactatggattttagttatttttgttttaagcaacaaattttaggtaaatcattcagtatatgaatctggaacactgcttaaatttggttgtactgggcaactgtgttttgttacaacagattgtacacatactgtccctttgtatttgtgccattaaaactttatcatattaacgtgactaggccattggtgagtgctactgtttagaaacaaaatccatatgattaatagcatacgtggctatcttcaaattctaatgttttgcatcacagtaataagatggtagaatgctcttcaagacatgggaaaacaatagcatctatgaagtttgtatgatagctgaatatctgatgacgacaggcttcaactaatgtgttacaagtatctatgggacaatttgatcgcagagaaattcccagcagataatttcttcagccattttaacctggaccccaactacttgttatcagatgatgtcaaggggtatattagctcattggggttcgatgcaaagacctttgaagatgtattgaaatatttcaaggttacctgtcacacgctaccacggtctcaagaacagctgctcttgagatacgagctacaggaagatcattcccttcttgaagaataccggttcacttatgatgctaggtggttcagggatcaaatccaggacgtcctcagcttctggacaggatcacacgagcctaaacttgtagctgaagaggagatgtggaagtgccgtttctgcaaatttgtgtcaagttgcccaatgaatgcttccatgccaaggtgttgacgctaacaaaaaattgctccgaattggtgtcttggtgaaatatttgatgctgacctgaaaaacaaaccgtaccgatgaatttgaaatgtagctcattgttatttgacttcatattcagttttgtaactcacatagtattgatttgcggattctattcttgttatacataccatactgaagaaatcacttaatatcactccttgcgtccaagagtctcccaccatcgtttaaaccttgcgcgctgagacgaaaatttggcagccaaagtttcattagcatcactcaaatttattttcaatttaccatggcttatatataatatacggagtaagtcgcaaggaggatgaaaacatcctgagggtagcacaaggaatcttctgaaaatgaaatatatggctcacataaatagaggacctgtttacatacaagcatcacagattctagtgacaaattgatgtttgttttacagaaaacaacaaatggaaccaactggcaggtacagtgaatcttatacagcaaacaatgtggttgtaacgggaaaacaattcaaaccattcgtagatccggcaccactcttaacttctgttcacggatgaaacatgtccctccataagaccataacccgctcccccatcctggaacttgtcaatacaagtcacttgcttccaccaccattggctaccaaggcctcaggctgtggtggcgcagcaatgtccttcacagcgctctccaccttgggagggccagaatgccgtcgcatcggtgaggcagccgcagctccaccttggaaagacaacctcttcttgactggtccagcagagcctcctttctcaggcgtctctgcgccattggccgttgctgtgcgagatttggccctcgcagattctgtgggaaccatgtagctcgggagcgacggggagctcgcgaggctctcatcgtcccgcatggtcgacgtcgtggctatgctgtgcctccttggtcgctcagactgcacactgagcacgctcctcacgtcatcgtccacctgtgaaagcccattctttggcgtgctggatttcctcctcgcaggtattggggccact

SEQ ID NO: 57432 - DNA, 3210 bp, Zea Mays
accttctggaccgcctgcgatttcggtttcaactctggaaattgctgatcaattaattatggggggaagcgtctctacttccttctcggttggtcaagagaattaagaagttgtcttgacctcactggacccagagactactcatcaccagaggaaatggtacaaagactaacaacagcttctactgtactaaggagggtgttggataatccagcactccaggactgtcaagagaataatggatttggagacatgatggatgaagatgttataagcaatatttcagttcgcttgaactgtccggccgcgtgtaccgcgtcaccttcaccaaccggctcaacggggacgcaggcgcggtgccgtgaagcagatacggaccgccgggaaactgtacctccacaagagcaactgggaaaacttcgtgaagaaaatgggtctcttaaaagaagcttggagagctgtaagacagtttcagccaattctaatggcactttggaaagatcacttaaagtgcaaaggaatgcagttcaggaaaattcattgaatctcaccaagcagaatggatatggtggtggttcttctcacagtacccaggcaaatggtgttctccatgccatggcaaccagtggtcaagttggccatttggctcggtgggaccttcgctcgtcctgcatgttatgtgactctcaaaaacttgcactttccattacttgtacagagtctaacggacggccttactactgatacatgataactatttatatcgctatcggggtttcaagactacggatggcttcatgctcattgtatttttaggttgtcaagcctgtcaattagatccaaagcattgttcctatcaatctcaaagtaaataactggaagtatggaagacctcctaactgggagcaagtctttcctgtttccactggctgggtagctggatcatcaacaaaagagaactactttggagaccatcatgacgacagaagattttctgtcgcctgtattaggtggtgaatcttaacaagtcaatatgtaaagctcaactcttcccattgtatgagaacagaacattagtgatcaagttgctggttacatgagagatccaagccggatgattaacaagatgtacttgaccaactctactgttagagtatttggaaaggacgtgggagaacctggaacagctgtggaggggcacattatggaaggtgatcctggacttattgatgattttgagttttatcaacaacttctcaaggagttccttgagtcatgtgatagaggggcatcagttttgtgcgtacacaatttttctggattccgtgtgcagctcactagatgtatcaggatgcgcgcacggaaacaagcaggtgaagggtttcatgtttgaaaaaccggttgatctgaaagtaggtgtgaaccatgtcgtattgctgtcatcaactatgggaatgaaggatagtggtggtgaacttgctgaagtaaagggcggcattcaggagtgcctaatccaaggtctcaacactgggacgttggatttacaagtcaatggctgaggccataaagctgcactagaaggtgagttaaaggagatctactcagaaaaaggtttgggcaaagttcagtggaaaccggctgagaacgaccgggcagccacttggtataagagatactttgatgagccagatggagatgatcccgttgtacttgacatgagctcaatgagcaagggaatgatttttgtgaatggcgaaggagtgggtagatactgggtctcataccgaactcttgctggaactccttctcaagcagtgtaagtctgtggagttaaccttattgaggcaggtcgtatactgttcttggccaacaagcttgacaataaaaggtcttttcatttgccgtcgtggcgtctgtggagcgggtgtggagcgggtgttcgcgggtgttcgcggacaaggcggtgccgtcgtggcgggagcagctcacgctgcgggcattcgtcgtcagcgcgctgctggccgtcatgttcagcgtcatagtcatgaagctcaaccttaccacggggatcatcccctccctcaatgtctccgctgggctgctcggcttcttcttcgtccgcatgtggaccgccgccgccgagaggatgggcttcctccgccagcccttcaccaggcaggagaacaccgtcatccagacctgcgttgtctctgcctacggcatcaccttcagcggtggctttggcagttatctatttgaaatgagtgaaaaaatagctaaacaagcaacaacggtgtaccacggaggaacaaattttggaaggactggcgcttcttatgtgctgactggatactatgatgaagctcccatggatgaatatggtatgtacaaggagcccaaatttgggcatctcagggacttggcacaacgtaataaggtcatatcaaaaagcattcctctggggcaacattcgtctgagatattgggtcattggtatgaggcacacatctttgagttgcctgaagaaaagctatgcctctctttcctttccaacaataacacgggcgaagacggaacagtgatcttccgaggggataagcactatgtgcctagccgttctgtctccattatttggggttaccgaggagggggtgaaccaaacacaaaaacatcagctcatgctcgtgcggtattttaagccctgcctctacatggacgccggcctcgcttccgcggtcaccatgctccggacctgcaccgatgtcgcgcacgtgctcgagcagtttcgtctcgcctggtgcggcaagctcgttcgggacgcccgcaccgtcgttccgtcaaggacctctgcttcgacctcttcatcattaggggtggaaacagagctttcaatgcatgctggaggtgcgcgatgtgatcgatattatccatgcttgataaatgataacaatggtgatggtcatgatatatggtcaatattgtattgatctttttccgagttttaggctgtcatgttgtttgctggaatggagatatttcattattcacttggttcatgtgacagagttaattaccttgtttacgtgctttcttagtaccctttttctgagatttgagttgtaagtaacacttccctaatgtgttgtcattataactcaatgacattattaaatcatatatagaagtctatatggtactgattgttgcaat

SEQ ID NO: 57433 - DNA, 3806 bp, Zea Mays
tgctgatcaattaattatggggggaagcgtctctacttccttctcggttggtcaaggtatccccttcctgtgtcctctctcctctgtgtagatggcgaatttgtggagtccgaataatctgaatgttctcgcattctttacataatcccttgccaattcatggcaagttttatttgctccatttgttttatggtatgatgatctggatctgatgagcccattcaaattcttttgccgagccgccgtccctctttttctactgtttgtttgtgtatcggaattgctggatctataccgaaatctgaaaagtgtaggccatacagagaattaagaagttgtcttgacctcactggacccagagactactcatcaccagaggaaatggtacaaagactaacaacagcttctactgtactaaggagggtgttggataatccagcactccaggactgtcaagagaataatggatttggagacatgatggatgaagatgttataagcaatatttcagttcgcttgaactgtccggccgcgtgtaccgcgtcaccttcaccaaccggctcaacggggacgcaggcgcggtgccgtgaagcagatacggaccgccgggaaactgtacctccacaagagcaactgggaaaacttcgtgaagaaaatgggtctcttaaaagaagcttggagagctgtaagacagtttcagccaattctaatggcactttggaaagatcacttaaagtgcaaaggaatgcagttcaggaaaattcattgaatctcaccaagcagaatggatatggtggtggttcttctcacagtacccaggcaaatggtctgcatccaatggcaggttatcagaaggtgttctccatgccatggcaaccagtggtcaagttggccatttggctcggtgggaccttcgctcgtcctgcatgttatgtgactctcaaaaacttgcactttccattacttgtacagagtctaacggacggccttactactgatacatgataactatttatatcgctatcggggtttcaagactacggatggcttcatgctcattgtatttttaggttgtcaagcctgtcaattagatccaaagcattgttcctatcaatctcaaagtaaataactggaagtatggaagacctcctaactgggagcaagtctttcctgtttccactggctgggtagctggatcatcaacaaaagagaactactttggagaccatcatgacgacagaagattttctgtcgcctgtattaggtggtgaatcttaacaagtcaatatgtaaagctcaactcttcccattgtatgagaacagaacattagtgatcaagttgctggttacatgagagatccaagccggatgattaacaagatgtacttgaccaactctactgttagagtatttggaaaggacgtgggagaacctggaacagctgtggaggggcacattatggaaggtgatcctggacttattgatgattttgagttttatcaacaacttctcaaggagttccttgagtcatgtgatagaggggcatcaggttagttcattttgaaaaaaatagttaaaatgttgcactgtacaaaacaccaaagtatatagttaagcatgtgacctcatgccatttgtcctatatcgtaagtttacattacattcatcaccaagaaaacattaactaagggtcaaattttgagcaatcctattggtggtgtgaactgaaaactgatggttcgatgaggcagatcatagtgcaacagatcaagtgccatcgtcggatttgagcccaaacaaagctggaggtagtgaaggacttagtggcagcatgttgccctggtaccatgtccatgagaagatcactaatttcatggcaccggagcccatgttttgtgcgtacacaatttttctggattccgtgtgcagctcactagatgtatcaggatgcgcgcacggaaacaagcaggtgaagggtttcatgtttgaaaaaccggttgatctgaaagtaggtgtgaaccatgtcgtattgctgtcatcaactatgggaatgaaggatagtggtggtgaacttgctgaagtaaagggcggcattcaggagtgcctaatccaaggtctcaacactgggacgttggatttacaagtcaatggctgaggccataaagctgcactagaaggtgagttaaaggagatctactcagaaaaaggtttgggcaaagttcagtggaaaccggctgagaacgaccgggcagccacttggtataagagatactttgatgagccagatggagatgatcccgttgtacttgacatgagctcaatgagcaagggaatgatttttgtgaatggcgaaggagtgggtagatactgggtctcataccgaactcttgctggaactccttctcaagcagtgtaagtctgtggagttaaccttattgaggcaggtcgtatactgttcttggccaacaagcttgacaataaaaggtcttttcatttgccgtcgtggcgtctgtggagcgggtgtggagcgggtgttcgcgggtgttcgcggacaaggcggtgccgtcgtggcgggagcagctcacgctgcgggcattcgtcgtcagcgcgctgctggccgtcatgttcagcgtcatagtcatgaagctcaaccttaccacggggatcatcccctccctcaatgtctccgctgggctgctcggcttcttcttcgtccgcatgtggaccgccgccgccgagaggatgggcttcctccgccagcccttcaccaggcaggagaacaccgtcatccagacctgcgttgtctctgcctacggcatcaccttcagcggtggctttggcagttatctatttgaaatgagtgaaaaaatagctaaacaagcaacaacggtgtaccacggaggaacaaattttggaaggactggcgcttcttatgtgctgactggatactatgatgaagctcccatggatgaatatggtatgtacaaggagcccaaatttgggcatctcagggacttggcacaacgtaataaggtcatatcaaaaagcattcctctggggcaacattcgtctgagatattgggtcattggtatgaggcacacatctttgagttgcctgaagaaaagctatgcctctctttcctttccaacaataacacgggcgaagacggaacagtgatcttccgaggggataagcactatgtgcctagccgttctgtctccattatttggggttaccgaggagggggtgaaccaaacacaaaaacatcagctcatgctcgtgcggtattttaagccctgcctctacatggacgccggcctcgcttccgcggtcaccatgctccggacctgcaccgatgtcgcgcacgtgctcgagcagtttcgtctcgcctggtgcggcaagctcgttcgggacgcccgcaccgtcgttccgtcaaggacctctgcttcgacctcttcatcattaggggtggaaacagagctttcaatgcatgctggaggtgcgcgatgtgatcgatattatccatgcttgataaatgataacaatggtgatggtcatgatatatggtcaatattgtattgatctttttccgagttttaggctgtcatgttgtttgctggaatggagatatttcattattcacttggttcatgtgacagagttaattaccttgtttacgtgctttcttagtaccctttttctgagatttgagttgtaagtaacacttccctaatgtgttgtcattataactcaatgacattattaaatcatatatagaagtctatatggtactgattgttgcaat

SEQ ID NO: 57434 - DNA, 4310 bp, Zea Mays
tgctgatcaattaattatggggggaagcgtctctacttccttctcggttggtcaaggtatccccttcctgtgtcctctctcctctgtgtagatggcgaatttgtggagtccgaataatctgaatgttctcgcattctttacataatcccttgccaattcatggcaagttttatttgctccatttgttttatggtatgatgatctggatctgatgagcccattcaaattcttttgccgagccgccgtccctctttttctactgtttgtttgtgtatcggaattgctggatctataccgaaatctgaaaagtgtaggccatacagagaattaagaagttgtcttgacctcactggacccagagactactcatcaccagaggaaatggtacaaagactaacaacagcttctactgtactaaggagggtgttggataatccagcactccaggactgtcaagagaataatggatttggagacatgatggatgaagatgttataagcaatatttcagttcgcttgaactgtccggccgcgtgtaccgcgtcaccttcaccaaccggctcaacggggacgcaggcgcggtgccgtgaagcagatacggaccgccgggaaactgtacctccacaagagcaactgggaaaacttcgtgaagaaaatgggtctcttaaaagaagcttggagagctgtaagacagtttcagccaattctaatggcactttggaaagatcacttaaagtgcaaaggaatgcagttcaggaaaattcattgaatctcaccaagcagaatggatatggtggtggttcttctcacagtacccaggcaaatggtctgcatccaatggcaggttatcagaaggtgttctccatgccatggcaaccagtggtcaagttggccatttggctcggtgggaccttcgctcgtcctgcatgttatgtgactctcaaaaacttgcactttccattacttgtacagagtctaacggacggccttactactgatacatgataactatttatatcgctatcggggtttcaagactacggatggcttcatgctcattgtatttttaggttgtcaagcctgtcaattagatccaaagcattgttcctatcaatctcaaagtaaataactggaagtatggaagacctcctaactgggagcaagtctttcctgtttccactggctgggtagctggatcatcaacaaaagagaactactttggagaccatcatgacgacagaagattttctgtcgcctgtattaggtggtgaatcttaacaagtcaatatgtaaagctcaactcttcccattgtatgagaacagaacattagtgatcaagttgctggttacatgagagatccaagccggatgattaacaagatgtacttgaccaactctactgttagagtatttggaaaggacgtgggagaacctggaacagctgtggaggttcgagcatttactacattttcccttaaaaatatttcaaaccttatttggtctccttcagtctactgaagcgtaacggggcacattatggaaggtgatcctggacttattgatgattttgagttttatcaacaacttctcaaggagttccttgagtcatgtgatagaggggcatcaggttagttcattttgaaaaaaatagttaaaatgttgcactgtacaaaacaccaaagtatatagttaagcatgtgacctcatgccatttgtcctatatcgtaagtttacattacattcatcaccaagaaaacattaactaagggtcaaattttgagcaatcctattggtggtgtgaactgaaaactgatggttcgatgaggcagatcatagtgcaacagatcaagtgccatcgtcggatttgagcccaaacaaagctggaggtagtgaaggacttagtggcagcatgttgccctggttcatgaagcacccccaccccctccgcgggtccatggatgcaaccaaagttttatttgtttaagcagcctcggttcataccaagctgaagcgttgaaccgaagaatcttctcccctttgtcgatgctgatagtgtgtaaattgaactatatgactgtcacatcgatttacaacactggagctacttgaacagcttatagggctggaagcttacaaaataagcattacaatttggcacatagcatatccagtaccatgtccatgagaagatcactaatttcatggcaccggagcccatggttcttcctccaatggctccgaagttgtttgagaatttatttgggaatagcagctagaatccatatactgcagtagattaaatttcacatttcttgctgttgctttttctacttctataaactgcactcggtatgatgtcactagactaaattgaaagttttgatggcctcatcagttttgtgcgtacacaatttttctggattccgtgtgcagctcactagatgtatcaggatgcgcgcacggaaacaagcaggtgaagggtttcatgtttgaaaaaccggttgatctgaaagtaggtgtgaaccatgtcgtattgctgtcatcaactatgggaatgaaggatagtggtggtgaacttgctgaagtaaagggcggcattcaggagtgcctaatccaaggtctcaacactgggacgttggatttacaagtcaatggctgaggccataaagctgcactagaaggtgagttaaaggagatctactcagaaaaaggtttgggcaaagttcagtggaaaccggctgagaacgaccgggcagccacttggtataagagatactttgatgagccagatggagatgatcccgttgtacttgacatgagctcaatgagcaagggaatgatttttgtgaatggcgaaggagtgggtagatactgggtctcataccgaactcttgctggaactccttctcaagcagtgtaagtctgtggagttaaccttattgaggcaggtcgtatactgttcttggccaacaagcttgacaataaaaggtcttttcatttgccgtcgtggcgtctgtggagcgggtgtggagcgggtgttcgcgggtgttcgcggacaaggcggtgccgtcgtggcgggagcagctcacgctgcgggcattcgtcgtcagcgcgctgctggccgtcatgttcagcgtcatagtcatgaagctcaaccttaccacggggatcatcccctccctcaatgtctccgctgggctgctcggcttcttcttcgtccgcatgtggaccgccgccgccgagaggatgggcttcctccgccagcccttcaccaggcaggagaacaccgtcatccagacctgcgttgtctctgcctacggcatcaccttcagcggtggctttggcagttatctatttgaaatgagtgaaaaaatagctaaacaagcaacaacggtgtaccacggaggaacaaattttggaaggactggcgcttcttatgtgctgactggatactatgatgaagctcccatggatgaatatggtatgtacaaggagcccaaatttgggcatctcagggacttggcacaacgtaataaggtcatatcaaaaagcattcctctggggcaacattcgtctgagatattgggtcattggtatgaggcacacatctttgagttgcctgaagaaaagctatgcctctctttcctttccaacaataacacgggcgaagacggaacagtgatcttccgaggggataagcactatgtgcctagccgttctgtctccattatttggggttaccgaggagggggtgaaccaaacacaaaaacatcagctcatgctcgtgcggtattttaagccctgcctctacatggacgccggcctcgcttccgcggtcaccatgctccggacctgcaccgatgtcgcgcacgtgctcgagcagtttcgtctcgcctggtgcggcaagctcgttcgggacgcccgcaccgtcgttccgtcaaggacctctgcttcgacctcttcatcattaggggtggaaacagagctttcaatgcatgctggaggtgcgcgatgtgatcgatattatccatgcttgataaatgataacaatggtgatggtcatgatatatggtcaatattgtattgatctttttccgagttttaggctgtcatgttgtttgctggaatggagatatttcattattcacttggttcatgtgacagagttaattaccttgtttacgtgctttcttagtaccctttttctgagatttgagttgtaagtaacacttccctaatgtgttgtcattataactcaatgacattattaaatcatatatagaagtctatatggtactgattgttgcaat

SEQ ID NO: 57435 - DNA, 3160 bp, Zea Mays
atgacagaggcttacaagtttgcttatatttggggtgtattgttttttttgggtaggagcaactgggaaaacttcgtgaagaaaatgggtctcttaaaagaagcttggagagctggcactttggaaagatcacttaaagtgcaaaggaatgcagttcaggaaaattcattgaatctcaccaagcagaatggatatggtggtggttcttctcacagtacccaggcaaatggtctgcatccaatggcaggttatcagaaggtgttctccatgccatggcaaccagtggtcaagttggccatttggctcggtgggaccttcgctcgtcctgcatgttatgtgactctcaaaaacttgcactttccattacttgtacagaacattagtgatcaagttgctggttacatgagagatccaagccggatgattaacaagatgtacttgaccaactctactgttagagtatttggaaaggacgtgggagaacctggaacagctgtggaggttcgagcatttactacattttcccttaaaaatatttcaaaccttatttggtctccttcagtctactgaagcgtaacggggcacattatggaaggtgatcctggacttattgatgattttgagttttatcaacaacttctcaaggagttccttgagtcatgtgatagaggggcatcagatcatagtgcaacagatcaagtgccatcgtcggatttgagcccaaacaaagctggaggtagtgaaggacttagtggcagcatgttgccctggttcatgaagcacccccaccccctccgcgggtccatggatgcaaccaaagttttatttgtttaagcagcctcggttcataccaagctgaagcgttgaaccgaagaatcttctcccctttgtcgatgctgatagtgtgtaaattgaactatatgactgtcacatcgatttacaacactggagctacttgaacagcttatagggctggaagcttacaaaataagcattacaatttggcacatagcatatccagtaccatgtccatgagaagatcactaatttcatggcaccggagcccatggttcttcctccaatggctccgaagttgtttgagaatttatttgggaatagcagctagaatccatatactgcagtagattaaatttcacatttcttgctgttgctttttctacttctataaactgcactcggtatgatgtcactagactaaattgaaagttttgatggcctcatcagttttgtgcgtacacaatttttctggattccgtgtgcagctcactagatgtatcaggatgcgcgcacggaaacaagcaggtgaagggtttcatgtttgaaaaaccggttgatctgaaagtaggtgtgaaccatgtcgtattgctgtcatcaactatgggaatgaaggatagtggtggtgaacttgctgaagtaaagggcggcattcaggagtgcctaatccaaggtctcaacactgggacgttggatttacaagtcaatggctgaggccataaagctgcactagaaggtgagttaaaggagatctactcagaaaaaggtttgggcaaagttcagtggaaaccggctgagaacgaccgggcagccacttggtataagagatactttgatgagccagatggagatgatcccgttgtacttgacatgagctcaatgagcaagggaatgatttttgtgaatggcgaaggagtgggtagatactgggtctcataccgaactcttgctggaactccttctcaagcagtgtaagtctgtggagttaaccttattgaggcaggtcgtatactgttcttggccaacaagcttgacaataaaaggtcttttcatttgccgtcgtggcgtctgtggagcgggtgtggagcgggtgttcgcgggtgttcgcggacaaggcggtgccgtcgtggcgggagcagctcacgctgcgggcattcgtcgtcagcgcgctgctggccgtcatgttcagcgtcatagtcatgaagctcaaccttaccacggggatcatcccctccctcaatgtctccgctgggctgctcggcttcttcttcgtccgcatgtggaccgccgccgccgagaggatgggcttcctccgccagcccttcaccaggcaggagaacaccgtcatccagacctgcgttgtctctgcctacggcatcaccttcagcggtggctttggcagttatctatttgaaatgagtgaaaaaatagctaaacaagcaacaacggtgtaccacggaggaacaaattttggaaggactggcgcttcttatgtgctgactggatactatgatgaagctcccatggatgaatatggtatgtacaaggagcccaaatttgggcatctcagggacttggcacaacgtaataaggtcatatcaaaaagcattcctctggggcaacattcgtctgagatattgggtcattggtatgaggcacacatctttgagttgcctgaagaaaagctatgcctctctttcctttccaacaataacacgggcgaagacggaacagtgatcttccgaggggataagcactatgtgcctagccgttctgtctccattatttggggttaccgaggagggggtgaaccaaacacaaaaacatcagctcatgctcgtgcggtattttaagccctgcctctacatggacgccggcctcgcttccgcggtcaccatgctccggacctgcaccgatgtcgcgcacgtgctcgagcagtttcgtctcgcctggtgcggcaagctcgttcgggacgcccgcaccgtcgttccgtcaaggacctctgcttcgacctcttcatcattaggggtggaaacagagctttcaatgcatgctggaggtgcgcgatgtgatcgatattatccatgcttgataaatgataacaatggtgatggtcatgatatatggtcaatattgtattgatctttttccgagttttaggctgtcatgttgtttgctggaatggagatatttcattattcacttggttcatgtgacagagttaattaccttgtttacgtgctttcttagtaccctttttctgagatttgagttgtaagtaacacttccctaatgtgttgtcattataactcaatgacattattaaatcatatatagaagtctatatggtactgattgttgcaat

SEQ ID NO: 57436 - DNA, 2322 bp, Zea Mays
atatctgtacaccctgtcattgccggctccgtcggccgtcttcccgaggatgctgcggctgcgctggcgtgccgtcctccccccactcccactccctccgctgcctggcttgcttcgccgcctgcctccgcaccggcgcgccctctcgtcctcttccggctctatcccgcttccaccgccggtgatggaggcttcctacaagtttgggccctacaaaatcgacgccagggaggtcttccacgccacgcccctctcctacgccatggtgaatctccgcccgctgctcccgggtgggtaacacacacacacacacacccttgttccctccctttccagttcgccttccatgatccatgcttgcttcgttactgtagacgcaaccactcccgaactcactgcaccatagcatttttttagcttgggagtgggagttgctggaactgggagactagtcatcgcgacaaaaaaaaaaagctttctcggaaacgtggttgatggaaattagattcatctaacgttgggtcccagaatgctaaaataaaactttgtattcagaatcatgcgctgctcgtaacaaattcggcaagacaacagtgtaccgccacacccattgctcccgtagggattgttccaataggcaaggatcacaggcattgcccttctgggttggctggtaatcccaacccagttcctgcaatctcgtcgtacttaatataatccctccctatagaacaacagtcccattcaagattttctcctgatgaaacctgagactactcacaagtgcttcctgtagacattgcatttaagctttgcatatctctaaaccaccgcatcgcattgttttttttttctaatagacattgcatctgacaatgcgaaccttttcttatgcaggtcatatcctttgatttcagcgaacctagagctgtaatttctttgaagctagttttgcagtttttaccactgttgtgcctgcgcaaccattttcttctgcaggccactgtctattgattgctcactgcagtatagttcatgaaactttacttacctttgtgttggttctcttctttttagacctggttatcttgtctgtctaggggggatcaagtttgctttaggtactcatttagtgagggttctgttttgttgagccactgacttcacttcatatttggttcatctttccatggagaccatcaacaattctatgacatgattatttctttttcacatcatgcaacagttccacttccagaatgattgtatgcctgcaactcaagttgactttatgaatcaatttctactgtgttgtcattcggggcaaagctgtcataactcatagacccacccggatatatttatttgactcgaagtttgatacatcatgtgtttaggaaactgtgttcttctatatgcaccggtttttccttgacaatacctacatgttcttgtgtgccccaagcgtgaagtgaaaagattcgccgatctaagttctgatgagattagtgacttatgggttactgcaaaggaagttggtgcacgtcttgagcagtaccacaaagcatcttcacttacctttgctatccaggatggtcctcaagctggccaaacagttgcacatgtccacatccacctcatcccaaggaagaaaggggattttgagaaaaatgatgaaatatatgatgcgattgatgtgaaggagaaagaattgaaggagaagcttgacctggacatcgagaggaaagataggagcatggaagagatggctaatgaggccaatgagtaccgtgctctttttagttagtttctaagctgagctgactgtttgctagaaataaggtggaagaagctgctgcacgatgaacaaaaaaaagggcatggctttgctgctgatgaaaggggcaagcaaagttcatctcgagatccacactagcgccgggtagaggtgaccggaatagcctacgccacctttgcaacaagccaacaagcaacaaaaggtcaggaaggacctggattaaacgattgtttaccctcttgacttgattaatgacccctttctgtggaaaattgactaaaataaatgcagccccctttctgtccttactagtacgtagcaaaactgaatggtggaaccaaataaagaatcgtcacaaattcgcgactttttgtgcactgtaatagtaaaatccaatgtttccttagcagaggatttccggccatgaaaatcgaatggctaggcatgtaaagcaagggtgcgaagcgaggaagagacctgaatcggggagaggttgcggccgtagaacatggcgggcgtctccg

SEQ ID NO: 57437 - DNA, 3751 bp, Zea Mays
gagccgaatagtagggcggcagcagcggcacgcacgcacagggatgcgcacaggcgcagcggccgcaccgcactgcagcatcgacgacgccccggcgggcccgtccctatcaacccaccccgcgccatagaagcaggcgaaagcgagccccgggaactcactcccttccctttcagagctcacagttcggagtgggaggaggagaggagacccacacactgtacccggccacagaagcagctactacagcaggagagggagaggaggccggcccccaagatctccgtccgagaagaagcgagcggcgacggcgagacgaggcagagagcagtttggtgactgcagaaggattcggtgaggaatctcgtcatgcagacttcaaaaccaaggagtgggtcttcagatgccccgcagaggacttctccaaggacaccgcgggcatctcgtgtggccaaaaccggagggaatgaaaccgattctacaggagttaccccgacaagaacgcctacggagaggagccctaaggttactgagaggcggtctccacggagcccaattactgagaagaagcgcccaagcaggctatcggaactggagtccaaggtcagccagctgcaagatgaactgaagaaggccaaggagcaacttagctcgtcagaggcacggaggcgccatgcgcagcaggaagccgaggaagcaaagacgcaagagcaggctgcagccgcctcgaagctggaggagttgcagcgccagcttgacgagttctcagctgcggaggaatcccgtctccaggaactgcgcaagatctcgcaggaacgtgaccgtgcctgggagtcggaactcgaggcagtgcagaggcagaaatcagcggacgcagccgcgctcggctcggccatgtccgagatccagcggctgaagcagcagctggaagcttcagcagagtctgacgcggcccgcgcgaagcagtgcgagtacgtggaagctgagatcgagggcttgaagcaggagatggagatccgcctagcgaccattgagggcctgaaggtgaatgtcagcgagagtgacagggctgcggctgaggcaaatgccacggtaaatgagaccaagcagcagctggagacagcgaaggccaccattgactcacttgtagctgagggcgtccgcatgcaggaatgcctgaggtcgaaggacatggagctcaatgagtccaaggctctcgtggcatcgctccaggaagatatgaagaagtcacatgacacggacaatgccaaggccaaggccaatactgatgtccgctctgagactgaggctctgcagaaggtgctggtgaccacaagtgccgccgacgccaatgggagctgtggaagctatgacccagagatcgaacagttgcggactgctcttgaggtcgctgagatcaggtaccaggagcagcaaactcggatgactatcgagactggaggcttgtacgagacattggagagtgtgagggccgagtgcgcccgcgaactgtgcgagctcaggctggagctgaagaacaagaacgatgcactcatggaggcaatggcaggagccgccgcagatcctcacaggccagacgcgatgcagcagccggagctggaggcgaagctgatgaggtccatcaccgacgcggcggagctgaaggcatgcctgatggacaaggagaacgcgctgcagagcctggcggaggagaacgaggcgctgaaggcgggggcgggcagggcggaggcggagctgcggcgcaagtacgaggcggcggtggcggagctggagctggccaaggccgcggagcaggacgtgcggatgcggctggggctggtgacggacgaggcggacaggagcagccggcgcgctgcgcgggcgtcggagcagctggacgcggcccaggcggccggcgcggagatggaggcggagctgcggcgcctgcgcgtgcagtccgaccagtggcgcaaggccgcggaggcggctgcagccgcgctcggtgggggtggggggaaggacggcaacggcggcacggtggagaggaccgggtcgctggggcccgagtacggcagctccatcggcgggaagctgatgagctcgccattctcggacgacgtggacgaggagtcacccaagcggcgcaacggcggcggcggcggcggcggcggcgtgctgcgcaggatgagcgggctctggaagaagagccccaagtgagtgagactgagatggggtggacggggtccgggatagccgtaggtgcgaggtgatgcaatagcagcagtatgagtaggagggatactggtgaatgctgcagggaagacgacgacgctctttctggacaagacacggagacacagctctagtctaggtggtaggaagcatgatcgtctctgtctgataacatttggctggtacttgagtgaacctcgtgtcgaggagcagctgcttttggctgcctgttctgtaccttactatgcttcattcagtcaaaaaaattcccacatgtgacatgttcttggttcttttttctttttgaagcgtttttatttcattttcccttcagaagctatgctgtacatctaatacgttacttgcctggctgatgatttggatgtatgtatctgggcagtatcactgcgcgttctctcagcgcgatttcactggaatccaggtacccgtttagttgagagagagagagagagagagagagagagaggaagccgtcggggatgccgttgcggaagagctaccaacgaacgtcgcagtgcatgcacctctgcttccataagaattcagcacggctagcacgaaggaagatctcagaaaacatgtctggattcagaatcagtagcagagtagaaactctggactctagtacacacttgcatacaagctacggttccttcttcccatccatgtccatgggcacagcaaaacggaccggtagacgagctgagagaagctaagctgcaagcagctagctaaagctaactaaagcaagacacaaacatacagcatgggctaaacgtacgtatgcctgcatcactgcatgcatggaatggatggatcagaagcactgggtctgggtctcatatattccagctcccggcgggcgggcggacggtcaccatcgtcgtcatacctaccacaccatgttgtgctttcacgcgacgaggacgtagacggcgtagatgatgcccgggatgtatcccaggatggtgagcagcaggcagatccagaactcaacctgcagggcaggcacacagtagatcgcgagcaagcagttactttacttacacacatctgatgagaacgacgatgcatcaattaatcagatgctaagctgagtgttaattaccccgatgccgtagcggaggaagacgccgaccggcggcagcaggatggccagcaggatctccacgaacgtctccgaccccattgccgacgccgccgccttccaagtaggagcagctcaatctcagcgcaaagtttcgctccctgctctgctctcagctcagggccccagctgggaaggagagacgccggtggcagcagatgaggaggcgtggtagcaagcaagcagacgctggaactggaacccaggggaaggatcaaagcaagctgcccgcagagagaagacgtggcggcgccgagcttcggtggcgcgacacctggcctcgcttctaggacgcgtgccctgcctaccattgcggcagagaagagaggttttctgtcaacaacagtgaag

SEQ ID NO: 57438 - DNA, 3744 bp, Zea Mays
cgaatagtagggcggcagcagcggcacgcacgcacagggatgcgcacaggcgcagcggccgcaccgcactgcagcatcgacgacgccccggcgggcccgtccctatcaacccaccccgcgccatagaagcaggcgaaagcgagccccgggaactcactcccttccctttcagagctcacagttcggagtgggaggaggagaggagacccacacactgtacccggccacagaagcagctactacagcaggagagggagaggaggccggcccccaagatctccgtccgagaagaagcgagcggcgacggcgagacgaggcagagagtttggtgactgcagaaggattcggtgaggaatctcgtcatgcagacttcaaaaccaaggagtgggtcttcagatgccccgcagaggacttctccaaggacaccgcgggcatctcgtgtggccaaaaccggagggaatgaaaccgattctacaggagttaccccgacaagaacgcctacggagaggagccctaaggttactgagaggcggtctccacggagcccaattactgagaagaagcgcccaagcaggctatcggaactggagtccaaggtcagccagctgcaagatgaactgaagaaggccaaggagcaacttagctcgtcagaggcacggaggcgccatgcgcagcaggaagccgaggaagcaaagacgcaagagcaggctgcagccgcctcgaagctggaggagttgcagcgccagcttgacgagttctcagctgcggaggaatcccgtctccaggaactgcgcaagatctcgcaggaacgtgaccgtgcctgggagtcggaactcgaggcagtgcagaggcagaaatcagcggacgcagccgcgctcggctcggccatgtccgagatccagcggctgaagcagcagctggaagcttcagcagagtctgacgcggcccgcgcgaagcagtgcgagtacgtggaagctgagatcgagggcttgaagcaggagatggagatccgcctagcgaccattgagggcctgaaggtgaatgtcagcgagagtgacagggctgcggctgaggcaaatgccacggtaaatgagaccaagcagcagctggagacagcgaaggccaccattgactcacttgtagctgagggcgtccgcatgcaggaatgcctgaggtcgaaggacatggagctcaatgagtccaaggctctcgtggcatcgctccaggaagatatgaagaagtcacatgacacggacaatgccaaggccaaggccaatactgatgtccgctctgagactgaggctctgcagaaggtgctggtgaccacaagtgccgccgacgccaatgggagctgtggaagctatgacccagagatcgaacagttgcggactgctcttgaggtcgctgagatcaggtaccaggagcagcaaactcggatgactatcgagactggaggcttgtacgagacattggagagtgtgagggccgagtgcgcccgcgaactgtgcgagctcaggctggagctgaagaacaagaacgatgcactcatggaggcaatggcaggagccgccgcagatcctcacaggccagacgcgatgcagcagccggagctggaggcgaagctgatgaggtccatcaccgacgcggcggagctgaaggcatgcctgatggacaaggagaacgcgctgcagagcctggcggaggagaacgaggcgctgaaggcgggggcgggcagggcggaggcggagctgcggcgcaagtacgaggcggcggtggcggagctggagctggccaaggccgcggagcaggacgtgcggatgcggctggggctggtgacggacgaggcggacaggagcagccggcgcgctgcgcgggcgtcggagcagctggacgcggcccaggcggccggcgcggagatggaggcggagctgcggcgcctgcgcgtgcagtccgaccagtggcgcaaggccgcggaggcggctgcagccgcgctcggtgggggtggggggaaggacggcaacggcggcacggtggagaggaccgggtcgctggggcccgagtacggcagctccatcggcgggaagctgatgagctcgccattctcggacgacgtggacgaggagtcacccaagcggcgcaacggcggcggcggcggcggcggcggcgtgctgcgcaggatgagcgggctctggaagaagagccccaagtgagtgagactgagatggggtggacggggtccgggatagccgtaggtgcgaggtgatgcaatagcagcagtatgagtaggagggatactggtgaatgctgcagggaagacgacgacgctctttctggacaagacacggagacacagctctagtctaggtggtaggaagcatgatcgtctctgtctgataacatttggctggtacttgagtgaacctcgtgtcgaggagcagctgcttttggctgcctgttctgtaccttactatgcttcattcagtcaaaaaaattcccacatgtgacatgttcttggttcttttttctttttgaagcgtttttatttcattttcccttcagaagctatgctgtacatctaatacgttacttgcctggctgatgatttggatgtatgtatctgggcagtatcactgcgcgttctctcagcgcgatttcactggaatccaggtacccgtttagttgagagagagagagagagagagagagagagaggaagccgtcggggatgccgttgcggaagagctaccaacgaacgtcgcagtgcatgcacctctgcttccataagaattcagcacggctagcacgaaggaagatctcagaaaacatgtctggattcagaatcagtagcagagtagaaactctggactctagtacacacttgcatacaagctacggttccttcttcccatccatgtccatgggcacagcaaaacggaccggtagacgagctgagagaagctaagctgcaagcagctagctaaagctaactaaagcaagacacaaacatacagcatgggctaaacgtacgtatgcctgcatcactgcatgcatggaatggatggatcagaagcactgggtctgggtctcatatattccagctcccggcgggcgggcggacggtcaccatcgtcgtcatacctaccacaccatgttgtgctttcacgcgacgaggacgtagacggcgtagatgatgcccgggatgtatcccaggatggtgagcagcaggcagatccagaactcaacctgcagggcaggcacacagtagatcgcgagcaagcagttactttacttacacacatctgatgagaacgacgatgcatcaattaatcagatgctaagctgagtgttaattaccccgatgccgtagcggaggaagacgccgaccggcggcagcaggatggccagcaggatctccacgaacgtctccgaccccattgccgacgccgccgccttccaagtaggagcagctcaatctcagcgcaaagtttcgctccctgctctgctctcagctcagggccccagctgggaaggagagacgccggtggcagcagatgaggaggcgtggtagcaagcaagcagacgctggaactggaacccaggggaaggatcaaagcaagctgcccgcagagagaagacgtggcggcgccgagcttcggtggcgcgacacctggcctcgcttctaggacgcgtgccctgcctaccattgcggcagagaagagaggttttctgtcaacaacagtgaag

SEQ ID NO: 57439 - DNA, 3692 bp, Zea Mays
cgcactgcagcatcgacgacgccccggcgggcccgtccctatcaacccaccccgcgccatagaagcaggcgaaagcgagccccgggaactcactcccttccctttcagagctcacagttcggagtgggaggaggagaggagacccacacactgtacccggccacagaagcagctactacagcaggagagggagaggaggccggcccccaagatctccgtccgagaagaagcgagcggcgacggcgagacgaggcagagagtttggtgactgcagaaggattcggtgaggaatctcgtcatgcagacttcaaaaccaagctctctttgcaggagtgggtcttcagatgccccgcagaggacttctccaaggacaccgcgggcatctcgtgtggccaaaaccggagggaatgaaaccgattctacaggagttaccccgacaagaacgcctacggagaggagccctaaggttactgagaggcggtctccacggagcccaattactgagaagaagcgcccaagcaggctatcggaactggagtccaaggtcagccagctgcaagatgaactgaagaaggccaaggagcaacttagctcgtcagaggcacggaggcgccatgcgcagcaggaagccgaggaagcaaagacgcaagagcaggctgcagccgcctcgaagctggaggagttgcagcgccagcttgacgagttctcagctgcggaggaatcccgtctccaggaactgcgcaagatctcgcaggaacgtgaccgtgcctgggagtcggaactcgaggcagtgcagaggcagaaatcagcggacgcagccgcgctcggctcggccatgtccgagatccagcggctgaagcagcagctggaagcttcagcagagtctgacgcggcccgcgcgaagcagtgcgagtacgtggaagctgagatcgagggcttgaagcaggagatggagatccgcctagcgaccattgagggcctgaaggtgaatgtcagcgagagtgacagggctgcggctgaggcaaatgccacggtaaatgagaccaagcagcagctggagacagcgaaggccaccattgactcacttgtagctgagggcgtccgcatgcaggaatgcctgaggtcgaaggacatggagctcaatgagtccaaggctctcgtggcatcgctccaggaagatatgaagaagtcacatgacacggacaatgccaaggccaaggccaatactgatgtccgctctgagactgaggctctgcagaaggtgctggtgaccacaagtgccgccgacgccaatgggagctgtggaagctatgacccagagatcgaacagttgcggactgctcttgaggtcgctgagatcaggtaccaggagcagcaaactcggatgactatcgagactggaggcttgtacgagacattggagagtgtgagggccgagtgcgcccgcgaactgtgcgagctcaggctggagctgaagaacaagaacgatgcactcatggaggcaatggcaggagccgccgcagatcctcacaggccagacgcgatgcagcagccggagctggaggcgaagctgatgaggtccatcaccgacgcggcggagctgaaggcatgcctgatggacaaggagaacgcgctgcagagcctggcggaggagaacgaggcgctgaaggcgggggcgggcagggcggaggcggagctgcggcgcaagtacgaggcggcggtggcggagctggagctggccaaggccgcggagcaggacgtgcggatgcggctggggctggtgacggacgaggcggacaggagcagccggcgcgctgcgcgggcgtcggagcagctggacgcggcccaggcggccggcgcggagatggaggcggagctgcggcgcctgcgcgtgcagtccgaccagtggcgcaaggccgcggaggcggctgcagccgcgctcggtgggggtggggggaaggacggcaacggcggcacggtggagaggaccgggtcgctggggcccgagtacggcagctccatcggcgggaagctgatgagctcgccattctcggacgacgtggacgaggagtcacccaagcggcgcaacggcggcggcggcggcggcggcggcgtgctgcgcaggatgagcgggctctggaagaagagccccaagtgagtgagactgagatggggtggacggggtccgggatagccgtaggtgcgaggtgatgcaatagcagcagtatgagtaggagggatactggtgaatgctgcagggaagacgacgacgctctttctggacaagacacggagacacagctctagtctaggtggtaggaagcatgatcgtctctgtctgataacatttggctggtacttgagtgaacctcgtgtcgaggagcagctgcttttggctgcctgttctgtaccttactatgcttcattcagtcaaaaaaattcccacatgtgacatgttcttggttcttttttctttttgaagcgtttttatttcattttcccttcagaagctatgctgtacatctaatacgttacttgcctggctgatgatttggatgtatgtatctgggcagtatcactgcgcgttctctcagcgcgatttcactggaatccaggtacccgtttagttgagagagagagagagagagagagagagagaggaagccgtcggggatgccgttgcggaagagctaccaacgaacgtcgcagtgcatgcacctctgcttccataagaattcagcacggctagcacgaaggaagatctcagaaaacatgtctggattcagaatcagtagcagagtagaaactctggactctagtacacacttgcatacaagctacggttccttcttcccatccatgtccatgggcacagcaaaacggaccggtagacgagctgagagaagctaagctgcaagcagctagctaaagctaactaaagcaagacacaaacatacagcatgggctaaacgtacgtatgcctgcatcactgcatgcatggaatggatggatcagaagcactgggtctgggtctcatatattccagctcccggcgggcgggcggacggtcaccatcgtcgtcatacctaccacaccatgttgtgctttcacgcgacgaggacgtagacggcgtagatgatgcccgggatgtatcccaggatggtgagcagcaggcagatccagaactcaacctgcagggcaggcacacagtagatcgcgagcaagcagttactttacttacacacatctgatgagaacgacgatgcatcaattaatcagatgctaagctgagtgttaattaccccgatgccgtagcggaggaagacgccgaccggcggcagcaggatggccagcaggatctccacgaacgtctccgaccccattgccgacgccgccgccttccaagtaggagcagctcaatctcagcgcaaagtttcgctccctgctctgctctcagctcagggccccagctgggaaggagagacgccggtggcagcagatgaggaggcgtggtagcaagcaagcagacgctggaactggaacccaggggaaggatcaaagcaagctgcccgcagagagaagacgtggcggcgccgagcttcggtggcgcgacacctggcctcgcttctaggacgcgtgccctgcctaccattgcggcagagaagagaggttttctgtcaacaacagtgaag

SEQ ID NO: 57440 - DNA, 3630 bp, Zea Mays
ccctatcaacccaccccgcgccatagaagcaggcgaaagcgagccccgggaactcactcccttccctttcagagctcacagttcggagtgggaggaggagaggagacccacacactgtacccggccacagaagcagctactacagcaggagagggagaggaggccggcccccaagatctccgtccgagaagaagcgagcggcgacggcgagacgaggcagagagaaggattcggtgaggaatctcgtcatgcagacttcaaaaccaaggagtgggtcttcagatgccccgcagaggacttctccaaggacaccgcgggcatctcgtgtggccaaaaccggagggaatgaaaccgattctacaggagttaccccgacaagaacgcctacggagaggagccctaaggttactgagaggcggtctccacggagcccaattactgagaagaagcgcccaagcaggctatcggaactggagtccaaggtcagccagctgcaagatgaactgaagaaggccaaggagcaacttagctcgtcagaggcacggaggcgccatgcgcagcaggaagccgaggaagcaaagacgcaagagcaggctgcagccgcctcgaagctggaggagttgcagcgccagcttgacgagttctcagctgcggaggaatcccgtctccaggaactgcgcaagatctcgcaggaacgtgaccgtgcctgggagtcggaactcgaggcagtgcagaggcagaaatcagcggacgcagccgcgctcggctcggccatgtccgagatccagcggctgaagcagcagctggaagcttcagcagagtctgacgcggcccgcgcgaagcagtgcgagtacgtggaagctgagatcgagggcttgaagcaggagatggagatccgcctagcgaccattgagggcctgaaggtgaatgtcagcgagagtgacagggctgcggctgaggcaaatgccacggtaaatgagaccaagcagcagctggagacagcgaaggccaccattgactcacttgtagctgagggcgtccgcatgcaggaatgcctgaggtcgaaggacatggagctcaatgagtccaaggctctcgtggcatcgctccaggaagatatgaagaagtcacatgacacggacaatgccaaggccaaggccaatactgatgtccgctctgagactgaggctctgcagaaggtgctggtgaccacaagtgccgccgacgccaatgggagctgtggaagctatgacccagagatcgaacagttgcggactgctcttgaggtcgctgagatcaggtaccaggagcagcaaactcggatgactatcgagactggaggcttgtacgagacattggagagtgtgagggccgagtgcgcccgcgaactgtgcgagctcaggctggagctgaagaacaagaacgatgcactcatggaggcaatggcaggagccgccgcagatcctcacaggccagacgcgatgcagcagccggagctggaggcgaagctgatgaggtccatcaccgacgcggcggagctgaaggcatgcctgatggacaaggagaacgcgctgcagagcctggcggaggagaacgaggcgctgaaggcgggggcgggcagggcggaggcggagctgcggcgcaagtacgaggcggcggtggcggagctggagctggccaaggccgcggagcaggacgtgcggatgcggctggggctggtgacggacgaggcggacaggagcagccggcgcgctgcgcgggcgtcggagcagctggacgcggcccaggcggccggcgcggagatggaggcggagctgcggcgcctgcgcgtgcagtccgaccagtggcgcaaggccgcggaggcggctgcagccgcgctcggtgggggtggggggaaggacggcaacggcggcacggtggagaggaccgggtcgctggggcccgagtacggcagctccatcggcgggaagctgatgagctcgccattctcggacgacgtggacgaggagtcacccaagcggcgcaacggcggcggcggcggcggcggcggcgtgctgcgcaggatgagcgggctctggaagaagagccccaagtgagtgagactgagatggggtggacggggtccgggatagccgtaggtgcgaggtgatgcaatagcagcagtatgagtaggagggatactggtgaatgctgcagggaagacgacgacgctctttctggacaagacacggagacacagctctagtctaggtggtaggaagcatgatcgtctctgtctgataacatttggctggtacttgagtgaacctcgtgtcgaggagcagctgcttttggctgcctgttctgtaccttactatgcttcattcagtcaaaaaaattcccacatgtgacatgttcttggttcttttttctttttgaagcgtttttatttcattttcccttcagaagctatgctgtacatctaatacgttacttgcctggctgatgatttggatgtatgtatctgggcagtatcactgcgcgttctctcagcgcgatttcactggaatccaggtacccgtttagttgagagagagagagagagagagagagagagaggaagccgtcggggatgccgttgcggaagagctaccaacgaacgtcgcagtgcatgcacctctgcttccataagaattcagcacggctagcacgaaggaagatctcagaaaacatgtctggattcagaatcagtagcagagtagaaactctggactctagtacacacttgcatacaagctacggttccttcttcccatccatgtccatgggcacagcaaaacggaccggtagacgagctgagagaagctaagctgcaagcagctagctaaagctaactaaagcaagacacaaacatacagcatgggctaaacgtacgtatgcctgcatcactgcatgcatggaatggatggatcagaagcactgggtctgggtctcatatattccagctcccggcgggcgggcggacggtcaccatcgtcgtcatacctaccacaccatgttgtgctttcacgcgacgaggacgtagacggcgtagatgatgcccgggatgtatcccaggatggtgagcagcaggcagatccagaactcaacctgcagggcaggcacacagtagatcgcgagcaagcagttactttacttacacacatctgatgagaacgacgatgcatcaattaatcagatgctaagctgagtgttaattaccccgatgccgtagcggaggaagacgccgaccggcggcagcaggatggccagcaggatctccacgaacgtctccgaccccattgccgacgccgccgccttccaagtaggagcagctcaatctcagcgcaaagtttcgctccctgctctgctctcagctcagggccccagctgggaaggagagacgccggtggcagcagatgaggaggcgtggtagcaagcaagcagacgctggaactggaacccaggggaaggatcaaagcaagctgcccgcagagagaagacgtggcggcgccgagcttcggtggcgcgacacctggcctcgcttctaggacgcgtgccctgcctaccattgcggcagagaagagaggttttctgtcaacaacagtgaag

SEQ ID NO: 57441 - DNA, 3542 bp, Zea Mays
tttttttgagaaaagtttcagcctttcaggttcattcagtcagtagatgctgtttattagctctcttgaaaaagaaagcttagatgctatttagctcttttgcgtcttattacagttgctaatttggtgactgcagaaggattcggtgaggaatctcgtcatgcagacttcaaaaccaaggagtgggtcttcagatgccccgcagaggacttctccaaggacaccgcgggcatctcgtgtggccaaaaccggagggaatgaaaccgattctacaggagttaccccgacaagaacgcctacggagaggagccctaaggttactgagaggcggtctccacggagcccaattactgagaagaagcgcccaagcaggctatcggaactggagtccaaggtcagccagctgcaagatgaactgaagaaggccaaggagcaacttagctcgtcagaggcacggaggcgccatgcgcagcaggaagccgaggaagcaaagacgcaagagcaggctgcagccgcctcgaagctggaggagttgcagcgccagcttgacgagttctcagctgcggaggaatcccgtctccaggaactgcgcaagatctcgcaggaacgtgaccgtgcctgggagtcggaactcgaggcagtgcagaggcagaaatcagcggacgcagccgcgctcggctcggccatgtccgagatccagcggctgaagcagcagctggaagcttcagcagagtctgacgcggcccgcgcgaagcagtgcgagtacgtggaagctgagatcgagggcttgaagcaggagatggagatccgcctagcgaccattgagggcctgaaggtgaatgtcagcgagagtgacagggctgcggctgaggcaaatgccacggtaaatgagaccaagcagcagctggagacagcgaaggccaccattgactcacttgtagctgagggcgtccgcatgcaggaatgcctgaggtcgaaggacatggagctcaatgagtccaaggctctcgtggcatcgctccaggaagatatgaagaagtcacatgacacggacaatgccaaggccaaggccaatactgatgtccgctctgagactgaggctctgcagaaggtgctggtgaccacaagtgccgccgacgccaatgggagctgtggaagctatgacccagagatcgaacagttgcggactgctcttgaggtcgctgagatcaggtaccaggagcagcaaactcggatgactatcgagactggaggcttgtacgagacattggagagtgtgagggccgagtgcgcccgcgaactgtgcgagctcaggctggagctgaagaacaagaacgatgcactcatggaggcaatggcaggagccgccgcagatcctcacaggccagacgcgatgcagcagccggagctggaggcgaagctgatgaggtccatcaccgacgcggcggagctgaaggcatgcctgatggacaaggagaacgcgctgcagagcctggcggaggagaacgaggcgctgaaggcgggggcgggcagggcggaggcggagctgcggcgcaagtacgaggcggcggtggcggagctggagctggccaaggccgcggagcaggacgtgcggatgcggctggggctggtgacggacgaggcggacaggagcagccggcgcgctgcgcgggcgtcggagcagctggacgcggcccaggcggccggcgcggagatggaggcggagctgcggcgcctgcgcgtgcagtccgaccagtggcgcaaggccgcggaggcggctgcagccgcgctcggtgggggtggggggaaggacggcaacggcggcacggtggagaggaccgggtcgctggggcccgagtacggcagctccatcggcgggaagctgatgagctcgccattctcggacgacgtggacgaggagtcacccaagcggcgcaacggcggcggcggcggcggcggcggcgtgctgcgcaggatgagcgggctctggaagaagagccccaagtgagtgagactgagatggggtggacggggtccgggatagccgtaggtgcgaggtgatgcaatagcagcagtatgagtaggagggatactggtgaatgctgcagggaagacgacgacgctctttctggacaagacacggagacacagctctagtctaggtggtaggaagcatgatcgtctctgtctgataacatttggctggtacttgagtgaacctcgtgtcgaggagcagctgcttttggctgcctgttctgtaccttactatgcttcattcagtcaaaaaaattcccacatgtgacatgttcttggttcttttttctttttgaagcgtttttatttcattttcccttcagaagctatgctgtacatctaatacgttacttgcctggctgatgatttggatgtatgtatctgggcagtatcactgcgcgttctctcagcgcgatttcactggaatccaggtacccgtttagttgagagagagagagagagagagagagagagaggaagccgtcggggatgccgttgcggaagagctaccaacgaacgtcgcagtgcatgcacctctgcttccataagaattcagcacggctagcacgaaggaagatctcagaaaacatgtctggattcagaatcagtagcagagtagaaactctggactctagtacacacttgcatacaagctacggttccttcttcccatccatgtccatgggcacagcaaaacggaccggtagacgagctgagagaagctaagctgcaagcagctagctaaagctaactaaagcaagacacaaacatacagcatgggctaaacgtacgtatgcctgcatcactgcatgcatggaatggatggatcagaagcactgggtctgggtctcatatattccagctcccggcgggcgggcggacggtcaccatcgtcgtcatacctaccacaccatgttgtgctttcacgcgacgaggacgtagacggcgtagatgatgcccgggatgtatcccaggatggtgagcagcaggcagatccagaactcaacctgcagggcaggcacacagtagatcgcgagcaagcagttactttacttacacacatctgatgagaacgacgatgcatcaattaatcagatgctaagctgagtgttaattaccccgatgccgtagcggaggaagacgccgaccggcggcagcaggatggccagcaggatctccacgaacgtctccgaccccattgccgacgccgccgccttccaagtaggagcagctcaatctcagcgcaaagtttcgctccctgctctgctctcagctcagggccccagctgggaaggagagacgccggtggcagcagatgaggaggcgtggtagcaagcaagcagacgctggaactggaacccaggggaaggatcaaagcaagctgcccgcagagagaagacgtggcggcgccgagcttcggtggcgcgacacctggcctcgcttctaggacgcgtgccctgcctaccattgcggcagagaagagaggttttctgtcaacaacagtgaag

SEQ ID NO: 57442 - DNA, 3451 bp, Zea Mays
ctcttttgcgtcttattacagttgctaacagtttggtgactgcagaaggattcggtgaggaatctcgtcatgcagacttcaaaaccaaggagtgggtcttcagatgccccgcagaggacttctccaaggacaccgcgggcatctcgtgtggccaaaaccggagggaatgaaaccgattctacaggagttaccccgacaagaacgcctacggagaggagccctaaggttactgagaggcggtctccacggagcccaattactgagaagaagcgcccaagcaggctatcggaactggagtccaaggtcagccagctgcaagatgaactgaagaaggccaaggagcaacttagctcgtcagaggcacggaggcgccatgcgcagcaggaagccgaggaagcaaagacgcaagagcaggctgcagccgcctcgaagctggaggagttgcagcgccagcttgacgagttctcagctgcggaggaatcccgtctccaggaactgcgcaagatctcgcaggaacgtgaccgtgcctgggagtcggaactcgaggcagtgcagaggcagaaatcagcggacgcagccgcgctcggctcggccatgtccgagatccagcggctgaagcagcagctggaagcttcagcagagtctgacgcggcccgcgcgaagcagtgcgagtacgtggaagctgagatcgagggcttgaagcaggagatggagatccgcctagcgaccattgagggcctgaaggtgaatgtcagcgagagtgacagggctgcggctgaggcaaatgccacggtaaatgagaccaagcagcagctggagacagcgaaggccaccattgactcacttgtagctgagggcgtccgcatgcaggaatgcctgaggtcgaaggacatggagctcaatgagtccaaggctctcgtggcatcgctccaggaagatatgaagaagtcacatgacacggacaatgccaaggccaaggccaatactgatgtccgctctgagactgaggctctgcagaaggtgctggtgaccacaagtgccgccgacgccaatgggagctgtggaagctatgacccagagatcgaacagttgcggactgctcttgaggtcgctgagatcaggtaccaggagcagcaaactcggatgactatcgagactggaggcttgtacgagacattggagagtgtgagggccgagtgcgcccgcgaactgtgcgagctcaggctggagctgaagaacaagaacgatgcactcatggaggcaatggcaggagccgccgcagatcctcacaggccagacgcgatgcagcagccggagctggaggcgaagctgatgaggtccatcaccgacgcggcggagctgaaggcatgcctgatggacaaggagaacgcgctgcagagcctggcggaggagaacgaggcgctgaaggcgggggcgggcagggcggaggcggagctgcggcgcaagtacgaggcggcggtggcggagctggagctggccaaggccgcggagcaggacgtgcggatgcggctggggctggtgacggacgaggcggacaggagcagccggcgcgctgcgcgggcgtcggagcagctggacgcggcccaggcggccggcgcggagatggaggcggagctgcggcgcctgcgcgtgcagtccgaccagtggcgcaaggccgcggaggcggctgcagccgcgctcggtgggggtggggggaaggacggcaacggcggcacggtggagaggaccgggtcgctggggcccgagtacggcagctccatcggcgggaagctgatgagctcgccattctcggacgacgtggacgaggagtcacccaagcggcgcaacggcggcggcggcggcggcggcggcgtgctgcgcaggatgagcgggctctggaagaagagccccaagtgagtgagactgagatggggtggacggggtccgggatagccgtaggtgcgaggtgatgcaatagcagcagtatgagtaggagggatactggtgaatgctgcagggaagacgacgacgctctttctggacaagacacggagacacagctctagtctaggtggtaggaagcatgatcgtctctgtctgataacatttggctggtacttgagtgaacctcgtgtcgaggagcagctgcttttggctgcctgttctgtaccttactatgcttcattcagtcaaaaaaattcccacatgtgacatgttcttggttcttttttctttttgaagcgtttttatttcattttcccttcagaagctatgctgtacatctaatacgttacttgcctggctgatgatttggatgtatgtatctgggcagtatcactgcgcgttctctcagcgcgatttcactggaatccaggtacccgtttagttgagagagagagagagagagagagagagagaggaagccgtcggggatgccgttgcggaagagctaccaacgaacgtcgcagtgcatgcacctctgcttccataagaattcagcacggctagcacgaaggaagatctcagaaaacatgtctggattcagaatcagtagcagagtagaaactctggactctagtacacacttgcatacaagctacggttccttcttcccatccatgtccatgggcacagcaaaacggaccggtagacgagctgagagaagctaagctgcaagcagctagctaaagctaactaaagcaagacacaaacatacagcatgggctaaacgtacgtatgcctgcatcactgcatgcatggaatggatggatcagaagcactgggtctgggtctcatatattccagctcccggcgggcgggcggacggtcaccatcgtcgtcatacctaccacaccatgttgtgctttcacgcgacgaggacgtagacggcgtagatgatgcccgggatgtatcccaggatggtgagcagcaggcagatccagaactcaacctgcagggcaggcacacagtagatcgcgagcaagcagttactttacttacacacatctgatgagaacgacgatgcatcaattaatcagatgctaagctgagtgttaattaccccgatgccgtagcggaggaagacgccgaccggcggcagcaggatggccagcaggatctccacgaacgtctccgaccccattgccgacgccgccgccttccaagtaggagcagctcaatctcagcgcaaagtttcgctccctgctctgctctcagctcagggccccagctgggaaggagagacgccggtggcagcagatgaggaggcgtggtagcaagcaagcagacgctggaactggaacccaggggaaggatcaaagcaagctgcccgcagagagaagacgtggcggcgccgagcttcggtggcgcgacacctggcctcgcttctaggacgcgtgccctgcctaccattgcggcagagaagagaggttttctgtcaacaacagtgaag

SEQ ID NO: 57443 - DNA, 452 bp, Zea Mays
gttttttattgtctccttgaggtgcagccacgtgcctccatataatgcagcttatgtatgaccattgcatcaatatttttgtatcaaccacatccttgcatcaatagccgtttttatatttctatcttgccattaatctgttttcttgcttctattcacagcttaccatttttgtgcatttgttatctatgtaggatgtagcaatgcaaagcaagtatggaaatgtgagatcccctccaaggtcacacttcatcagcccaggattgcttcgtcaacaacatgcgaaaaggtcctatccaaaccccaatacaggcataggaacaaacaatgagagttcgtctagaaagcgagctatgaaagctatgggcaatgttaaccaaccaaaagtagcatatgataatttagaagatgaatgtgtgaatcttgaaagcaaaaaatggggactgaagatt

SEQ ID NO: 57444 - DNA, 983 bp, Zea Mays
aagaagtcaaaatccatgaaccaggatgctccaacaagcaaaagggattattttgaagataggagggactgtgccagagcatctaatgctgaagacttaatgaatgctacaaaaaatggtgtgcttaattcacacaccagaagggatgattatgaagaagggagggacagtgccagggcacccaattctgaaaactatgaggaggggagggactgtaccagggcatccaatgccaaaaacattgtgaatgctacaaaaaaggcacaaattcaggaacaaatgttatcagatccttctctttctaatgcacaacttatggacaagtgcttcccttcaaaacggcaggaccatatcattggatatggtggtggagtgaaagcaagacatcttcgaagtccatctgttagtaaggctgaattgttagagaagctgaaacagtcggaggatgagaaacgagcaatgcttgaggagaacagagagcttcgagaagaaaatcgggctacaaatagtcgtggaagcagaaagatatcgtttattaatgtttcatgggtgtcaggtagaagaatgtagttgttgatgtttcaaaaatggctggtagaagaaataaatttggtcgttaatgctccatacatggatgttagaactaaaaacttggttcttaatgcgtcatatgtggtcgctaaaggttacaaatatgatcgttaatgaatcatggcagcctgtacacaattattaacgatgaaaaatgtcatcgttattacgataattgtggtcgttaatactgtataattgacgacaatcacatatgtcgtcgttaatcatgtaacgaccggaatcctcatgtggtcgttattacaattaacgacgggacttttaacgaccatcgacgaccacatttttgtggtcgttacaaacttttaacgaccacatatggacttttaacgaccacatatcccgtggttaaaacaggtttctcctgttgt

SEQ ID NO: 57445 - DNA, 2647 bp, Zea Mays
gtcatcatcattattatcatctgaccctctttttttttcactctcactcccatgtttttattcccgggcggggccgtgtgggtgtgggttgggatggccggattggggtcccggggtggagaaatgacaaatccaggcccgcaggcggccacccaccaaatcggacgacgcagggtgcccaaatcaggaaggattttaaggttaaccggccaccggcggtgaccgacgccccaccccactctccttctcctattctatctatatatcacccgcctcttttttctccctcactccgccacaccttccctcttcttcctcagctccgtcgcccaccgccggagctccgaaaggccccgcgcccgccgcctttcctgtaaaaaacccaacctttagctagctaaccgctcctcttctccccctactccccttgcccaaatcagagaagatatttaacggaggaggggaaggagaggatatttagctgattgttgattggtggtccggggtacggtgttcttgagtcgtgaagcgaccgtacagtggctagggccgtctccgggttgcgtgcaggatggtcgtcagagatcgggagtgaggaggcagctcgtggtcgtggaggctaaatgtaccgcaagaacgactcggcactctcctgtttctacctcttcctcctctggttcttcttcttgaaatagaccagcgccagccaccaggtagctacctactagctagcagcccagttgcgactggggacgggctgctgcttgcaagttggaatcttggagcaggagcagaggagcgggagatggagctggatctgaacgtggccgaggtggcgccggagaagccatcggcggcgctggaggcgagcgactcggggtcctcgggctcgtcggtgctgaacgcggaggcggcatcggcgggcggcggggggcccgcgccgggggaggaggggtcaagctcgacgccggccgtgctcgagttcagcatcctcaggagcgacagcgacgcggccggcgcggacgccgacgacggcgacgccacgccgtcgccacctcgccaccaccagcagcagctcgtcacccgggagctcttcccggcgccgcagcattgggccgagctcggcttcttccgcgccggcccgcagcagcagccggacatcagggtcctgccgcacccgcacccgtacccgcccccgccgccgcccgcgcagccgcagcaggccaagaagagccgccgcggcccgcgctcccgcagctcgcagtaccgcggcgtcaccttctaccgccgcaccggccgctgggagtcccacatctgggattgcgggaagcaggtgtacttaggtggattcgacactgctcatgccgctgcaagggcgtacgaccgagcggcgatcaagttccgcggcgtcgacgccgacataaacttcaacctcagcgactacgacgacgatatgaagcagatgaagagcctgtccaaggaggagttcgttcacgccctgcggcggcagagcaccggcttctcccgcggcagctccaagtacaggggcgtcaccctgcacaagtgcggccgctgggaggcgcgcatggggcagttcctcggcaagaagtacatatatcttgggctattcgacagcgaagtagaggctgcaagggcgtacgacaaggccgcgatcaaatgcaacggtagagaggccgtgacgaacttcgagcccagcacgtacgacggggagctgctgctgactgctgaagctagcgcagaagttgctgacgacgttgatctgaacttgagcatctcgcaaccggcatcgtcccagagccccaaaagagacaagaactgccttggtccgcagctccaccaccaccatgggcggccgtttgacggctccgccgttctgaagaaaaccaagatcgatgctccgtctgagctgtcgtcggcgggccgccctcaccggtcgttcctccctcatctcgtggctgccgagcatctaccgcctcggtctcaccccttcttcatcacacaccatgagagtgatgcatcaagaagagatcccagctgggcagcagcagcagcatggaaggtgaccgcagctgcacctcctcctcctaccaccaccctgttgccgttgccgctgccgtcgacgtcgtccgctgcagcatcatcaggattctccaataccgccacgacagctgccgccgccccatcggccgcctcctcccgccggttcgacccgccgccaccgtcgtcgtcctcctcctcgagccatcaccaccaccaccaccgccgctgagaatcgaagaagccacactgtaaatctgccgggaagcggctggtggcatccggcccgctcctccctccgggcgccgcaacttttttcgatcggttttgcgccgcccgggacgggttgtagttgatcgattggattcttcataactgtatttgcgtactgcttacactacccaagtgaaatcgaaaatggcgccttctctcgttgaataaattgcacgtacgctactcgatccgctgcggctcttgctggagtggccgccgccgctatagatagaaggatcaagccaaggaatctgtcatgcatgggcatgtgaaggaggagcctcctgcaatgtttagtcttttttggtcgacgccc

SEQ ID NO: 57446 - DNA, 2601 bp, Zea Mays
ccggattggggtcccggggtggagaaatgacaaatccaggcccgcaggcggccacccaccaaatcggacgacgcagggtgcccaaatcaggaaggattttaaggttaaccggccaccggcggtgaccgacgccccaccccactctccttctcctattctatctatatatcacccgcctcttttttctccctcactccgccacaccttccctcttcttcctcagctccgtcgcccaccgccggagctccgaaaggccccgcgcccgccgcctttcctgtaaaaaacccaacctttagctagctaaccgctcctcttctccccctactccccttgcccaaatcagagaagatatttaacggaggaggggaaggagaggatatttagctgattgttgattggtggtccggggtacggtgttcttgagtcgtgaagcgaccgtacagtggctagggccgtctccgggttgcgtgcaggatggtcgtcagagatcgggagtgaggaggcagctcgtggtcgtggaggctaaatgtaccgcaagaacgactcggcactctcctgtttctacctcttcctcctctggttcttcttcttgaaatagaccagcgccagccaccaggtagctacctactagctagcagcccagttgcgactggggacgggctgctgcttgcaagttggaatcttggagcaggagcagaggagcgggagatggagctggatctgaacgtggccgaggtggcgccggagaagccatcggcggcgctggaggcgagcgactcggggtcctcgggctcgtcggtgctgaacgcggaggcggcatcggcgggcggcggggggcccgcgccgggggaggaggggtcaagctcgacgccggccgtgctcgagttcagcatcctcaggagcgacagcgacgcggccggcgcggacgccgacgacggcgacgccacgccgtcgccacctcgccaccaccagcagcagctcgtcacccgggagctcttcccggcgccgcagcattgggccgagctcggcttcttccgcgccggcccgcagcagcagccggacatcagggtcctgccgcacccgcacccgtacccgcccccgccgccgcccgcgcagccgcagcaggccaagaagagccgccgcggcccgcgctcccgcagctcgcagtaccgcggcgtcaccttctaccgccgcaccggccgctgggagtcccacatctgggattgcgggaagcaggtgtacttaggtggattcgacactgctcatgccgctgcaagggcgtacgaccgagcggcgatcaagttccgcggcgtcgacgccgacataaacttcaacctcagcgactacgacgacgatatgaagcagatgaagagcctgtccaaggaggagttcgttcacgccctgcggcggcagagcaccggcttctcccgcggcagctccaagtacaggggcgtcaccctgcacaagtgcggccgctgggaggcgcgcatggggcagttcctcggcaagaagtacatatatcttgggctattcgacagcgaagtagaggctgcaagggttgagtaccgactcgatattcgattctccctgccgtttcgtgaccccagggcgtacgacaaggccgcgatcaaatgcaacggtagagaggccgtgacgaacttcgagcccagcacgtacgacggggagctgctgctgactgctgaagctagcgcagaagttgctgacgacgttgatctgaacttgagcatctcgcaaccggcatcgtcccagagccccaaaagagacaagaactgccttggtccgcagctccaccaccaccatgggcggccgtttgacggctccgccgttctgaagaaaaccaagatcgatgctccgtctgagctgtcgtcggcgggccgccctcaccggtcgttcctccctcatctcgtggctgccgagcatctaccgcctcggtctcaccccttcttcatcacacaccatgagagtgatgcatcaagaagagatcccagctgggcagcagcagcagcatggaaggtgaccgcagctgcacctcctcctcctaccaccaccctgttgccgttgccgctgccgtcgacgtcgtccgctgcagcatcatcaggattctccaataccgccacgacagctgccgccgccccatcggccgcctcctcccgccggttcgacccgccgccaccgtcgtcgtcctcctcctcgagccatcaccaccaccaccaccgccgctgagaatcgaagaagccacactgtaaatctgccgggaagcggctggtggcatccggcccgctcctccctccgggcgccgcaacttttttcgatcggttttgcgccgcccgggacgggttgtagttgatcgattggattcttcataactgtatttgcgtactgcttacactacccaagtgaaatcgaaaatggcgccttctctcgttgaataaattgcacgtacgctactcgatccgctgcggctcttgctggagtggccgccgccgctatagatagaaggatcaagccaaggaatctgtcatgcatgggcatgtgaaggaggagcctcctgcaatgtttagtcttttttggtcgacgccc

SEQ ID NO: 57447 - DNA, 2420 bp, Zea Mays
atcaggaaggattttaaggttaaccggccaccggcggtgaccgacgccccaccccactctccttctcctattctatctatatatcacccgcctcttttttctccctcactccgccacaccttccctcttcttcctcagctccgtcgcccaccgccggagctccgaaaggccccgcgcccgccgcctttcctgtaaaaaacccaacctttagctagctaaccgctcctcttctccccctactccccttgcccaaatcagagaagatatttaacggaggaggggaaggagaggatatttagctgattgttgattggtggtccggggtacggtgttcttgagtcgtgaagcgaccgtacagtggctagggccgtctccgggttgcgtgcaggatggtcgtcagagatcgggagtgaggaggcagctcgtggtcgtggaggctaaatgtaccgcaagaacgactcggcactctcctgtttctacctcttcctcctctggttcttcttcttgaaatagaccagcgccagccaccaggtagctacctactagctagcagcccagttgcgactggggacgggctgctgcttgcaagttggaatcttggagcaggagcagaggagcgggagatggagctggatctgaacgtggccgaggtggcgccggagaagccatcggcggcgctggaggcgagcgactcggggtcctcgggctcgtcggtgctgaacgcggaggcggcatcggcgggcggcggggggcccgcgccgggggaggaggggtcaagctcgacgccggccgtgctcgagttcagcatcctcaggagcgacagcgacgcggccggcgcggacgccgacgacggcgacgccacgccgtcgccacctcgccaccaccagcagcagctcgtcacccgggagctcttcccggcgccgcagcattgggccgagctcggcttcttccgcgccggcccgcagcagcagccggacatcagggtcctgccgcacccgcacccgtacccgcccccgccgccgcccgcgcagccgcagcaggccaagaagagccgccgcggcccgcgctcccgcagctcgcagtaccgcggcgtcaccttctaccgccgcaccggccgctgggagtcccacatctgggattgcgggaagcaggtgtacttaggtggattcgacactgctcatgccgctgcaagggcgtacgaccgagcggcgatcaagttccgcggcgtcgacgccgacataaacttcaacctcagcgactacgacgacgatatgaagcagatgaagagcctgtccaaggaggagttcgttcacgccctgcggcggcagagcaccggcttctcccgcggcagctccaagtacaggggcgtcaccctgcacaagtgcggccgctgggaggcgcgcatggggcagttcctcggcaagaaggcgtacgacaaggccgcgatcaaatgcaacggtagagaggccgtgacgaacttcgagcccagcacgtacgacggggagctgctgctgactgctgaagctagcgcagaagttgctgacgacgttgatctgaacttgagcatctcgcaaccggcatcgtcccagagccccaaaagagacaagaactgccttggtccgcagctccaccaccaccatgggcggccgtttgacggctccgccgttctgaagaaaaccaagatcgatgctccgtctgagctgtcgtcggcgggccgccctcaccggtcgttcctccctcatctcgtggctgccgagcatctaccgcctcggtctcaccccttcttcatcacacaccatgagagtgatgcatcaagaagagatcccagctgggcagcagcagcagcatggaaggtgaccgcagctgcacctcctcctcctaccaccaccctgttgccgttgccgctgccgtcgacgtcgtccgctgcagcatcatcaggattctccaataccgccacgacagctgccgccgccccatcggccgcctcctcccgccggttcgacccgccgccaccgtcgtcgtcctcctcctcgagccatcaccaccaccaccaccgccgctgagaatcgaagaagccacactgtaaatctgccgggaagcggctggtggcatccggcccgctcctccctccgggcgccgcaacttttttcgatcggttttgcgccgcccgggacgggttgtagttgatcgattggattcttcataactgtatttgcgtactgcttacactacccaagtgaaatcgaaaatggcgccttctctcgttgaataaattgcacgtacgctactcgatccgctgcggctcttgctggagtggccgccgccgctatagatagaaggatcaagccaaggaatctgtcatgcatgggcatgtgaaggaggagcctcctgcaatgtttagtcttttttggtcgacgccc

SEQ ID NO: 57448 - DNA, 1937 bp, Zea Mays
cgccccaccccactctccttctcctattctatctatatatcacccgcctcttttttctccctcactccgccacaccttccctcttcttcctcagctccgtcgcccaccgccggagctccgaaaggccccgcgcccgccgcctttcctgtaaaaaacccaacctttagctagctaaccgctcctcttctccccctactccccttgcccaaatcagagaagatatttaacggaggaggggaaggagaggatatttagctgattgttgattggtggtccggggtacggtgttcttgagtcgtgaagcgaccgtacagtggctagggccgtctccgggttgcgtgcaggatggtcgtcagagatcgggagtgaggaggcagctcgtggtcgtggaggctaaatgtaccgcaagaacgactcggcactctcctgtttctacctcttcctcctctggttcttcttcttgaaatagaccagcgccagccaccaggtagctacctactagctagcagcccagttgcgactggggacgggctgctgcttgcaagttggaatcttggagcaggagcagaggagcgggagatggagctggatctgaacgtggccgaggtggcgccggagaagccatcggcggcgctggaggcgagcgactcggggtcctcgggctcgtcggtgctgaacgcggaggcggcatcggcgggcggcggggggcccgcgccgggggaggaggggtcaagctcgacgccggccgtgctcgagttcagcatcctcaggagcgacagcgacgcggccggcgcggacgccgacgacggcgacgccacgccgtcgccacctcgccaccaccagcagcagctcgtcacccgggagctcttcccggcgccgcagcattgggccgagctcggcttcttccgcgccggcccgcagcagcagccggacatcagggtcctgccgcacccgcacccgtacccgcccccgccgccgcccgcgcagccgcagcaggccaagaagagccgccgcggcccgcgctcccgcagctcgcagtaccgcggcgtcaccttctaccgccgcaccggccgctgggagtcccacatctgggattgcgggaagcaggtgtacttaggtggattcgacactgctcatgccgctgcaagggcgtacgaccgagcggcgatcaagttccgcggcgtcgacgccgacataaacttcaacctcagcgactacgacgacgatatgaagcaggtacatacacgagtgttcttgcagctagcaccgactgaaacatctgctgaacgtacacgcatggccctgtgcaccagatgaagagcctgtccaaggaggagttcgttcacgccctgcggcggcagagcaccggcttctcccgcggcagctccaagtacaggggcgtcaccctgcacaagtgcggccgctgggaggcgcgcatggggcagttcctcggcaagaaggcgtacgacaaggccgcgatcaaatgcaacggtagagaggccgtgacgaacttcgagcccagcacgtacgacggggagctgctgctgactgctgaagctagcgcagaagttgctgacgacgttgatctgaacttgagcatctcgcaaccggcatcgtcccagagccccaaaagagacaagaactgccttggtccgcagctccaccaccaccatgggcggccgtttgacggctccgccgttctgaagaaaaccaagatcgatgctccgtctgagctgtcgtcggcgggccgccctcaccggtcgttcctccctcatctcgtggctgccgagcatctaccgcctcggtctcaccccttcttcatcacacaccatgagcttccttgaaaaggaaaggtcctagacctagctaccggccagcagcgacacttcaactctaagggcatgtacagtggagagacgccaaaacggttctccaag

SEQ ID NO: 57449 - DNA, 2126 bp, Zea Mays
cactctccttctcctattctatctatatatcacccgcctcttttttctccctcactccgccacaccttccctcttcttcctcagctccgtcgcccaccgccggagctccgaaaggccccgcgcccgccgcctttcctgtaaaaaacccaacctttagctagctaaccgctcctcttctccccctactccccttgcccaaatcagagaagatatttaacggaggaggggaaggagaggatatttagctgattgttgattggtggtccggggtacggtgttcttgagtcgtgaagcgaccgtacagtggctagggccgtctccgggttgcgtgcaggatggtcgtcagagatcgggagtgaggaggcagctcgtggtcgtggaggctaaatgtaccgcaagaacgactcggcactctcctgtttctacctcttcctcctctggttcttcttcttgaaatagaccagcgccagccaccaggtagctacctactagctagcagcccagttgcgactggggacgggctgctgcttgcaagttggaatcttggagcaggagcagaggagcgggagatggagctggatctgaacgtggccgaggtggcgccggagaagccatcggcggcgctggaggcgagcgactcggggtcctcgggctcgtcggtgctgaacgcggaggcggcatcggcgggcggcggggggcccgcgccgggggaggaggggtcaagctcgacgccggccgtgctcgagttcagcatcctcaggagcgacagcgacgcggccggcgcggacgccgacgacggcgacgccacgccgtcgccacctcgccaccaccagcagcagctcgtcacccgggagctcttcccggcgccgcagcattgggccgagctcggcttcttccgcgccggcccgcagcagcagccggacatcagggtcctgccgcacccgcacccgtacccgcccccgccgccgcccgcgcagccgcagcaggccaagaagagccgccgcggcccgcgctcccgcagctcgcagtaccgcggcgtcaccttctaccgccgcaccggccgctgggagtcccacatctgggattgcgggaagcaggtgtacttaggtggattcgacactgctcatgccgctgcaagggcgtacgaccgagcggcgatcaagttccgcggcgtcgacgccgacataaacttcaacctcagcgactacgacgacgatatgaagcaggtacatacacgagtgttcttgcagctagcaccgactgaaacatctgctgaacgtacacgcatggccctgtgcaccagatgaagagcctgtccaaggaggagttcgttcacgccctgcggcggcagagcaccggcttctcccgcggcagctccaagtacaggggcgtcaccctgcacaagtgcggccgctgggaggcgcgcatggggcagttcctcggcaagaagtacatatatcttgggctattcgacagcgaagtagaggctgcaaggttgttcacctcggacgattctgccatttgttcatatacaccatgccttttgatttctctcttgcaatttctcttcttttatcatggcttttgattcccaaagggttgagtaccgactcgatattcgattctccctgccgtttcgtgaccccagggcgtacgacaaggccgcgatcaaatgcaacggtagagaggccgtgacgaacttcgagcccagcacgtacgacggggagctgctgctgactgctgaagctagcgcagaagttgctgacgacgttgatctgaacttgagcatctcgcaaccggcatcgtcccagagccccaaaagagacaagaactgccttggtccgcagctccaccaccaccatgggcggccgtttgacggctccgccgttctgaagaaaaccaagatcgatgctccgtctgagctgtcgtcggcgggccgccctcaccggtcgttcctccctcatctcgtggctgccgagcatctaccgcctcggtctcaccccttcttcatcacacaccatgagcttccttgaaaaggaaaggtcctagacctagctaccggccagcagcgacacttcaactctaagggcatgtacagtggagagacgccaaaacggttctccaag

SEQ ID NO: 57450 - DNA, 2114 bp, Zea Mays
ccttctcctattctatctatatatcacccgcctcttttttctccctcactccgccacaccttccctcttcttcctcagctccgtcgcccaccgccggagctccgaaaggccccgcgcccgccgcctttcctgtaaaaaacccaacctttagctagctaaccgctcctcttctccccctactccccttgcccaaatcagagaagatatttaacggaggaggggaaggagaggatatttagctgattgttgattggtggtccggggtacggtgttcttgagtcgtgaagcgaccgtacagtggctagggccgtctccgggttgcgtgcaggatggtcgtcagagatcgggagtgaggaggcagctcgtggtcgtggaggctaaatgtaccgcaagaacgactcggcactctcctgtttctacctcttcctcctctggttcttcttcttgaaatagaccagcgccagccaccaggtagctacctactagctagcagcccagttgcgactggggacgggctgctgcttgcaagttggaatcttggagcaggagcagaggagcgggagatggagctggatctgaacgtggccgaggtggcgccggagaagccatcggcggcgctggaggcgagcgactcggggtcctcgggctcgtcggtgctgaacgcggaggcggcatcggcgggcggcggggggcccgcgccgggggaggaggggtcaagctcgacgccggccgtgctcgagttcagcatcctcaggagcgacagcgacgcggccggcgcggacgccgacgacggcgacgccacgccgtcgccacctcgccaccaccagcagcagctcgtcacccgggagctcttcccggcgccgcagcattgggccgagctcggcttcttccgcgccggcccgcagcagcagccggacatcagggtcctgccgcacccgcacccgtacccgcccccgccgccgcccgcgcagccgcagcaggccaagaagagccgccgcggcccgcgctcccgcagctcgcagtaccgcggcgtcaccttctaccgccgcaccggccgctgggagtcccacatctgggattgcgggaagcaggtgtacttaggtggattcgacactgctcatgccgctgcaagggcgtacgaccgagcggcgatcaagttccgcggcgtcgacgccgacataaacttcaacctcagcgactacgacgacgatatgaagcagatgaagagcctgtccaaggaggagttcgttcacgccctgcggcggcagagcaccggcttctcccgcggcagctccaagtacaggggcgtcaccctgcacaagtgcggccgctgggaggcgcgcatggggcagttcctcggcaagaagtacatatatcttgggctattcgacagcgaagtagaggctgcaagggcgtacgacaaggccgcgatcaaatgcaacggtagagaggccgtgacgaacttcgagcccagcacgtacgacggggagctgctgctgactgctgaagctagcgcagaagttgctgacgacgttgatctgaacttgagcatctcgcaaccggcatcgtcccagagccccaaaagagacaagaactgccttggtccgcagctccaccaccaccatgggcggccgtttgacggctccgccgttctgaagaaaaccaagatcgatgctccgtctgagctgtcgtcggcgggccgccctcaccggtcgttcctccctcatctcgtggctgccgagcatctaccgcctcggtctcaccccttcttcatcacacaccatgaggttagacgacactatacagtactgaatcatttgcaaaggtttgtcaagctagctagattggcatcataatacacggatcaggtgtcagattgttcatgcagtgcagtatgcagcctgaaggtgtatgcagtttcagatagcagatttttagcagctggttaatttctctcttgcgtgcggctgtcagtcagtgtagctctcgtcgtcgcccgctttatttccttggattctagctagagtccgcctgtcgcccgtcgatttcagtgaagttaatgggatgcgcgaattttttttctcccccgtataggccggctgttgaatatatgt

SEQ ID NO: 57451 - DNA, 2069 bp, Zea Mays
ccttctcctattctatctatatatcacccgcctcttttttctccctcactccgccacaccttccctcttcttcctcagctccgtcgcccaccgccggagctccgaaaggccccgcgcccgccgcctttcctgtaaaaaacccaacctttagctagctaaccgctcctcttctccccctactccccttgcccaaatcagagaagatatttaacggaggaggggaaggagaggatatttagctgattgttgattggtggtccggggtacggtgttcttgagtcgtgaagcgaccgtacagtggctagggccgtctccgggttgcgtgcaggatggtcgtcagagatcgggagtgaggaggcagctcgtggtcgtggaggctaaatgtaccgcaagaacgactcggcactctcctgtttctacctcttcctcctctggttcttcttcttgaaatagaccagcgccagccaccaggtagctacctactagctagcagcccagttgcgactggggacgggctgctgcttgcaagttggaatcttggagcaggagcagaggagcgggagatggagctggatctgaacgtggccgaggtggcgccggagaagccatcggcggcgctggaggcgagcgactcggggtcctcgggctcgtcggtgctgaacgcggaggcggcatcggcgggcggcggggggcccgcgccgggggaggaggggtcaagctcgacgccggccgtgctcgagttcagcatcctcaggagcgacagcgacgcggccggcgcggacgccgacgacggcgacgccacgccgtcgccacctcgccaccaccagcagcagctcgtcacccgggagctcttcccggcgccgcagcattgggccgagctcggcttcttccgcgccggcccgcagcagcagccggacatcagggtcctgccgcacccgcacccgtacccgcccccgccgccgcccgcgcagccgcagcaggccaagaagagccgccgcggcccgcgctcccgcagctcgcagtaccgcggcgtcaccttctaccgccgcaccggccgctgggagtcccacatctgggattgcgggaagcaggtgtacttaggtggattcgacactgctcatgccgctgcaagggcgtacgaccgagcggcgatcaagttccgcggcgtcgacgccgacataaacttcaacctcagcgactacgacgacgatatgaagcagatgaagagcctgtccaaggaggagttcgttcacgccctgcggcggcagagcaccggcttctcccgcggcagctccaagtacaggggcgtcaccctgcacaagtgcggccgctgggaggcgcgcatggggcagttcctcggcaagaaggcgtacgacaaggccgcgatcaaatgcaacggtagagaggccgtgacgaacttcgagcccagcacgtacgacggggagctgctgctgactgctgaagctagcgcagaagttgctgacgacgttgatctgaacttgagcatctcgcaaccggcatcgtcccagagccccaaaagagacaagaactgccttggtccgcagctccaccaccaccatgggcggccgtttgacggctccgccgttctgaagaaaaccaagatcgatgctccgtctgagctgtcgtcggcgggccgccctcaccggtcgttcctccctcatctcgtggctgccgagcatctaccgcctcggtctcaccccttcttcatcacacaccatgaggttagacgacactatacagtactgaatcatttgcaaaggtttgtcaagctagctagattggcatcataatacacggatcaggtgtcagattgttcatgcagtgcagtatgcagcctgaaggtgtatgcagtttcagatagcagatttttagcagctggttaatttctctcttgcgtgcggctgtcagtcagtgtagctctcgtcgtcgcccgctttatttccttggattctagctagagtccgcctgtcgcccgtcgatttcagtgaagttaatgggatgcgcgaattttttttctcccccgtataggccggctgttgaatatatgt

SEQ ID NO: 57452 - DNA, 743 bp, Zea Mays
gctaaatcgatgctccgtctgagctgtcgtcggcgggccgccctcaccggtcgttcctccctcatctcgtggctgccgagcatctaccgcctcggtctcaccccttcttcatcacacaccatgagagtgatgcatcaagaagagatcccagctgggcagcagcagcagcatggaaggtgaccgcagctgcacctcctcctcctaccaccaccctgttgccgttgccgctgccgtcgacgtcgtccgctgcagcatcatcaggattctccaataccgccacgacagctgccgccgccccatcggccgcctcctcccgccggttcgacccgccgccaccgtcgtcgtcctcctcctcgagccatcaccaccaccaccaccgccgctgagaatcgaagaagccacactgtaaatctgccgggaagcggctggtggcatccggcccgctcctccctccgggcgccgcaacttttttcgatcggttttgcgccgcccgggacgggttgtagttgatcgattggattcttcataactgtatttgcgtactgcttacactacccaagtgaaatcgaaaatggcgccttctctcgttgaataaattgcacgtacgctactcgatccgctgcggctcttgctggagtggccgccgccgctatagatagaaggatcaagccaaggaatctgtcatgcatgggcatgtgaaggaggagcctcctgcaatgtttagtcttttttggtcgacgccc

SEQ ID NO: 57453 - DNA, 1535 bp, Zea Mays
gacgctgaagtgtgctccgctccgcctccgcccgcggccgtacgctcccgagctccacccgtcgcgccccgaccgagatcgtccccggcgatggcttccgcggtggccgcttcgaccgctacgcggttcctgccgcggcttccggacccgtggtggacgcgtcgtgcgcgagcggcgctcccgccgccgccgctcacgtggcggcctctcccgttcacggtgtccgccgcgtcgtcccgccctggggaagcggaaggaggacggcgcgggaggatgcggaggcggcgcgccaggagggcggaacaggaggaaggcgtctcgctaagctctgaaaaggagacggtaaattctactccacgtgctcaacccaaaaagggtgcagaacccgtagcggtgtccagcacgagtgggaaaggctctgccattagaagggtgacacttgtgattcttgctgccgtgctttttggagttagcattgccttgaaggacggggccgagaaggcatcggagtattttgctgggtgtatttattggaacagagtttgtcggtggacaatctctttgtttttgttctggtctttaagtatttcaaagtgccaaatgaataccagaatcgagtactttcttatggtattgctggagctgtggtcttccgggctgtgatgatcatcctaggaacagctaccatccagaaatttgaggcggtgaatttgttgttggctttgatcctgttattcacttcttacaagctctttgctgaagaagaagaagaatctgatctatctgataacttcattgtgaaaacatgccaaaagttcattccagtcactgattattatgatgataatcgttttttcacaaatcaagatggtgtatggaaaattgactcaataccagcagtttttggcgtcacaagggatccacttataatactatcatcaaatatttttgctatttctggtttgcggtcgctctatgtgctcgtttctgaaagcatgggtgaattggagtatctacagcctgccattggtattgtgttgggcttcattgggacaaagatgatctttgacttttttggttatcatataccaacagaagcttcgcttgcaattgtaactacatgtcttagtggaggcgtcatattaagtcttaggaaagcatcaaaagagaagggggacaagtagactgatgcaacaacacatgcaggcataggaatccagcttgctccatatttttggcagatagtcaagttacaaaaataattataataaacacttaaaagccaggtaaacatagtgttttcactaaactaattacttgtataaaaaaatctaacctgacagaatatcttttgatcagtatatgtagtcttagctaatgccttgttcatttaaaaatagattcaatagcttctttatgttctacatctgaggtgaatttagaagtcaccataacgaggataaaagtacgctggtgctacttcaaaattgtgctcttttttttagataatggaacacaaataaggtctcagcctc

SEQ ID NO: 57454 - DNA, 1574 bp, Zea Mays
gacgctgaagtgtgctccgctccgcctccgcccgcggccgtacgctcccgagctccacccgtcgcgccccgaccgagatcgtccccggcgatggcttccgcggtggccgcttcgaccgctacgcggttcctgccgcggcttccggacccgtggtggacgcgtcgtgcgcgagcggcgctcccgccgccgccgctcacgtggcggcctctcccgttcacggtgtccgccgcgtcgtcccgccctggggaagcggaaggaggacggcgcgggaggatgcggaggcggcgcgccaggagggcggaacaggaggaaggcgtctcgctaagctctgaaaaggagacggtaaattctactccacgtgctcaacccaaaaagggtgcagaacccgtagcggtgtccagcacgagtgggaaaggctctgccattagaagggtgacacttgtgattcttgctgccgtgctttttggagttagcattgccttgaaggacggggccgagaaggcatcggagtattttgctggagtttgtcggtggacaatctctttgtttttgttctggtctttaagtatttcaaagtgccaaatgaataccagaatcgagtactttcttatggtattgctggagctgtggtcttccgggctgtgatgatcatcctaggaacagctaccatccagaaatttgaggcggtgaatttgttgttggctttgatcctgttattcacttcttacaagctctttgctgaagaagaagaagaatctgatctatctgataacttcattgtgaaaacatgccaaaagttcattccagtcactgattattatgatgataatcgttttttcacaaatcaagatggtgtatggaaagctacaccattgctcttgactttggcagtgattgagctgagtgatattgcctttgctattgactcaataccagcagtttttggcgtcacaagggatccacttataatactatcatcaaatatttttgctatttctggtttgcggtcgctctatgtgctcgtttctgaaagcatgggtgaattggagtatctacagcctgccattggtattgtgttgggcttcattgggacaaagatgatctttgacttttttggttatcatataccaacagaagcttcgcttgcaattgtaactacatgtcttagtggaggcgtcatattaagtcttaggaaagcatcaaaagagaagggggacaagtagactgatgcaacaacacatgcaggcataggaatccagcttgctccatatttttggcagatagtcaagttacaaaaataattataataaacacttaaaagccaggtaaacatagtgttttcactaaactaattacttgtataaaaaaatctaacctgacagaatatcttttgatcagtatatgtagtcttagctaatgccttgttcatttaaaaatagattcaatagcttctttatgttctacatctgaggtgaatttagaagtcaccataacgaggataaaagtacgctggtgctacttcaaaattgtgctcttttttttagataatggaacacaaataaggtctcagcctc

SEQ ID NO: 57455 - DNA, 1656 bp, Zea Mays
gacgctgaagtgtgctccgctccgcctccgcccgcggccgtacgctcccgagctccacccgtcgcgccccgaccgagatcgtccccggcgatggcttccgcggtggccgcttcgaccgctacgcggttcctgccgcggcttccggacccgtggtggacgcgtcgtgcgcgagcggcgctcccgccgccgccgctcacgtggcggcctctcccgttcacggtgtccgccgcgtcgtcccgccctggggaagcggaaggaggacggcgcgggaggatgcggaggcggcgcgccaggagggcggaacaggaggaaggcgtctcgctaagctctgaaaaggagacggtaaattctactccacgtgctcaacccaaaaagggtgcagaacccgtagcggtgtccagcacgagtgggaaaggctctgccattagaagggtgacacttgtgattcttgctgccgtgctttttggagttagcattgccttgaaggacggggccgagaaggcatcggagtattttgctgggtgtatttattggaacagagtttgtcggtggacaatctctttgtttttgttctggtctttaagtatttcaaagtgccaaatgaataccagaatcgagtactttcttatggtattgctggagctgtggtcttccgggctgtgatgatcatcctaggaacagctaccatccagaaatttgaggcggtgaatttgttgttggctttgatcctgttattcacttcttacaagctctttgctgaagaagaagaagaatctgatctatctgataacttcattgtgaaaacatgccaaaagttcattccagtcactgattattatgatgataatcgttttttcacaaatcaagatggtgtatggaaagctacaccattgctcttgactttggcagtgattgagctgagtgatattgcctttgctattgactcaataccagcagtttttggcgtcacaagggatccacttataatactatcatcaaatatttttgctatttctgggtacagttgctgcacttctagataatgtcaagagctaacttgatggaattattgttatgtcaggtttgcggtcgctctatgtgctcgtttctgaaagcatgggtgaattggagtatctacagcctgccattggtattgtgttgggcttcattgggacaaagatgatctttgacttttttggttatcatataccaacagaagcttcgcttgcaattgtaactacatgtcttagtggaggcgtcatattaagtcttaggaaagcatcaaaagagaagggggacaagtagactgatgcaacaacacatgcaggcataggaatccagcttgctccatatttttggcagatagtcaagttacaaaaataattataataaacacttaaaagccaggtaaacatagtgttttcactaaactaattacttgtataaaaaaatctaacctgacagaatatcttttgatcagtatatgtagtcttagctaatgccttgttcatttaaaaatagattcaatagcttctttatgttctacatctgaggtgaatttagaagtcaccataacgaggataaaagtacgctggtgctacttcaaaattgtgctcttttttttagataatggaacacaaataaggtctcagcctc

SEQ ID NO: 57456 - DNA, 4097 bp, Zea Mays
ttactgtccagtgtccaattgtttttccccctctctctctccctcatgccggcttagtaaacaaacatggttgaaagctcgagcgcgtcggtgttacgaattgagctgcctccaaacaaaaggcaaagataaaaggcaaaagctggagagagagagggacgagggagggaggccattgatagagaccacgagctgttctagaagtcaccgcgctgcagcctgcagctcaggggggcctgttccctggatctcgccatcgccattgccgctgccccccacctactactcctgctcctagtcctacacccctcctactccaatccaagaggtgctttggatcgcattgcttcgtgctagagttcggtggtcagcctgcgtgtgggacagtgaatttgaaattggcggggctgttgttcaaagaattggagatggacaggaagaattgtcctccatcgccatcgccaagatcgaccgagaagtctggaagagaattgagatctggggaggccaatgtcagcacaaataccaatagcaacctcatcgcaaaaggtgacaaggagaaaggagtcaatgtgcaagtcattctaagatgcaggccgttgagtgatgaagaaacaaagtcgaatactcctgtggttatttcgtgcaatgaccgtcgccgggaagttgccgccactcaaattattgccaataagcagattgatcgcacatttgccttcgacaaggtttttggcccatcgtccaagcagaaagatttgtttgaacaatccatctcgccgatagtaaatgaggtccttgaaggttacaattgcactattttcgcttatgggcaaactggtaccgggaagacttacacaatggagggaggtgggactagaaagaccaagaatggtgaactcccaactgatgctggtgttatcccaagggctgtaaggcaaatctttgacattctcgagtctcagtgcgcagagtatagcatgaaagtcacctttcttgagctttacaatgaagaaatcactgatctgttggcacctgaagaaccaaaattccctgttcttgaagacaagacgaaaaaacctattgcccttatggaagatggaaagggatttgtttttgtgagaggtcttgaagaagaagttgtgtactcagctggcgaaatctacaagattcttgacaagggttctgcaaagaggcgtactgcagaaacattgctgaacaagcaaagtagtaggtcacactctatattctcaatcacaattcacattaaggaactcactcatgagggtgaggagatgatcaagattggaaagctcaatcttgtcgatctagctggttcagaaaatatatcacgctcaggtgctagagatggcagagcgagagaggctggagagatcaacaagagtttgctcacgcttggtcgtgttattaatgctctagtagagcactctggacatgtaccatacagagatagtaaactgacaaggttgctgagggattcattgggagggaaaacaaagacttgcattattgctacaatatcaccttcagtatattgtttggaagagacattgagcacacttgattatgcacaccgtgcaaaaaatatcaagaacaaaccagaggtaaatcaaaggatgatgaagtctgctgtgatcaaggacttgtactatgaaattgaccgcctcaaacaagaggtgtttgctgcaagagagaagaacggtatctatattccaagagagcgctacctccaagaagaagctgagaaaaaggccatgacagagaaaattgaacgactaggagctgatatggaggctagggataagcaattggttgaattaaaagagctttatgatgctgaacaacgtctgagtgcagagttgggtgaagaacttggaaagactcggaaagatctggaggacaccaagagagctctgcatgatctagaagaacaatacaaagaagcaaagtctactattaaagaaaaggaatatgtcatatttaatcttctgaaatcagaaaaatcattagtggactgtgcatataaccttcgtgcggagctagaaaatgcagcagcagatgtttctgggctattctccaaaatagagcgcaaagacaggatagaagatgggaacaggtcgatggtgcagagatttaggtctcaactgacccatcagctggatgcattgcataaaactgtatccagttctgtcatgcaacaggaggaccaccttaatgaaatggaacatgatatgcaatcctttgtttcttcaaaagatgaggctgcacaagggctaagagagggtgtgcaaaagctcaaagtcttgcatggttccggtatcactgctctggatgaattagcaggtgaaatcgacatgaactcgcggacaacatttgagagattaaattcacagatacagtcacacacatcagcccttgagaactgtttcggaggaatcgcttcggaagcagataacttgttagatgagcttcagcgcagcctatcgaaacaagaagagaggctagcccatttcgcagtgaagcagagggagggacacctgagagctgtggaagcgtcacgttccatctcaaagatcactgctgggttcttccactcgctagatgtccatgcatctaggctcaccagtattctggaagacacacacagcgtgcaagaccaacaacttcttgaccttgaaaagaaattcgaggagtgcgcagctaatgaagaaaaacagcttctagagaaggtggcggagatgctggcaagttccaacgcacggaagaagaagctggtccaaacagcagtgggcagcctccgggagagcgccgtgaacagaacgagccacctgcagaaagaaatctcgacggcccaggacttgacctcgtccgtgcgcgagaagtggggcttttacatggaagagaccgagaagaattacgctgaggataccaaagcagtcgacagcggaaggtcttgcctggccgaagtgcttgtagaatgcaaggcgaaggccaccgtgggtgcacagcaatggaagaacgcggaggattctctgttcagcctcggcaaaggaaacgtggagtcagtggattctatagtcaggaccgggacagaggccaacgaattgctgcgttccaaactgtcgtctgcggcatcggcaactcttgaagatatcgacgttgcaaacgaggctctcctttcttcaattgacagctcgctgaagcttgaccgcgacgcgtgcgcgaacatcggggcggtcctcacgccgtgccacggggagatgagggagctgaagggggagcatcaccacaaggtcgtggagatcagcgaaagcgccgggaagtgcctggaggaagagtatctggtggacgagccgtcgtgttcgacgcccaggagaaggcggatcgacctgccgggcgtggagtcgatagaggagctgcggaccccgggctacgccgagcttctcaagtcgttccgggaggcgagggggagctggaagctggcgaatggagacgtcacagggcatttgccagaggcggctcaggatccggcatcatcgccgccgccggccgtgggttcaagaacccctctcgtaggaagaaactagatttaccgaaaccatgtagaaagaaaaaggaaaaaaaaaggaggaagaagaggaaggcatgtgtctactagagtacctttttcgtattggtgttgatagtggtgttggttaactactgctgctgcttggttgattgtttgttcgttcttaggtggtctccttgtatagtgattagtgagtcatatatacttgccgtcacacatatgccggtgtacatcaggtgtgctcagcatgtctattctaaagcactagtgtttgtctctctctaggacccatcagttatttatccaactcttagagctcatttggtgacatgagaattagaggggattttaaaatttttaaaaaatcttctctaattttgttgtcaccaaaatagtcttttgggattgtttgtactaaagctaatagttagttggctaaaaattggaataaaattaactagctaatcgctaaaagtaagtaatagttgaactattcggttaattttag

SEQ ID NO: 57457 - DNA, 4151 bp, Zea Mays
ttactgtccagtgtccaattgtttttccccctctctctctccctcatgccggcttagtaaacaaacatggttgaaagctcgagcgcgtcggtgttacgaattgagctgcctccaaacaaaaggcaaagataaaaggcaaaagctggagagagagagggacgagggagggaggccattgatagagaccacgagctgttctagaagtcaccgcgctgcagcctgcagctcaggggggcctgttccctggatctcgccatcgccattgccgctgccccccacctactactcctgctcctagtcctacacccctcctactccaatccaagaggtgctttggatcgcattgcttcgtgctagagttcggtggtcagcctgcgtgtgggacagtgttcaactctttgaggatttggcaactgtattttaagcattaagcttcaacgcagaatttgaaattggcggggctgttgttcaaagaattggagatggacaggaagaattgtcctccatcgccatcgccaagatcgaccgagaagtctggaagagaattgagatctggggaggccaatgtcagcacaaataccaatagcaacctcatcgcaaaaggtgacaaggagaaaggagtcaatgtgcaagtcattctaagatgcaggccgttgagtgatgaagaaacaaagtcgaatactcctgtggttatttcgtgcaatgaccgtcgccgggaagttgccgccactcaaattattgccaataagcagattgatcgcacatttgccttcgacaaggtttttggcccatcgtccaagcagaaagatttgtttgaacaatccatctcgccgatagtaaatgaggtccttgaaggttacaattgcactattttcgcttatgggcaaactggtaccgggaagacttacacaatggagggaggtgggactagaaagaccaagaatggtgaactcccaactgatgctggtgttatcccaagggctgtaaggcaaatctttgacattctcgagtctcagtgcgcagagtatagcatgaaagtcacctttcttgagctttacaatgaagaaatcactgatctgttggcacctgaagaaccaaaattccctgttcttgaagacaagacgaaaaaacctattgcccttatggaagatggaaagggatttgtttttgtgagaggtcttgaagaagaagttgtgtactcagctggcgaaatctacaagattcttgacaagggttctgcaaagaggcgtactgcagaaacattgctgaacaagcaaagtagtaggtcacactctatattctcaatcacaattcacattaaggaactcactcatgagggtgaggagatgatcaagattggaaagctcaatcttgtcgatctagctggttcagaaaatatatcacgctcaggtgctagagatggcagagcgagagaggctggagagatcaacaagagtttgctcacgcttggtcgtgttattaatgctctagtagagcactctggacatgtaccatacagagatagtaaactgacaaggttgctgagggattcattgggagggaaaacaaagacttgcattattgctacaatatcaccttcagtatattgtttggaagagacattgagcacacttgattatgcacaccgtgcaaaaaatatcaagaacaaaccagaggtaaatcaaaggatgatgaagtctgctgtgatcaaggacttgtactatgaaattgaccgcctcaaacaagaggtgtttgctgcaagagagaagaacggtatctatattccaagagagcgctacctccaagaagaagctgagaaaaaggccatgacagagaaaattgaacgactaggagctgatatggaggctagggataagcaattggttgaattaaaagagctttatgatgctgaacaacgtctgagtgcagagttgggtgaagaacttggaaagactcggaaagatctggaggacaccaagagagctctgcatgatctagaagaacaatacaaagaagcaaagtctactattaaagaaaaggaatatgtcatatttaatcttctgaaatcagaaaaatcattagtggactgtgcatataaccttcgtgcggagctagaaaatgcagcagcagatgtttctgggctattctccaaaatagagcgcaaagacaggatagaagatgggaacaggtcgatggtgcagagatttaggtctcaactgacccatcagctggatgcattgcataaaactgtatccagttctgtcatgcaacaggaggaccaccttaatgaaatggaacatgatatgcaatcctttgtttcttcaaaagatgaggctgcacaagggctaagagagggtgtgcaaaagctcaaagtcttgcatggttccggtatcactgctctggatgaattagcaggtgaaatcgacatgaactcgcggacaacatttgagagattaaattcacagatacagtcacacacatcagcccttgagaactgtttcggaggaatcgcttcggaagcagataacttgttagatgagcttcagcgcagcctatcgaaacaagaagagaggctagcccatttcgcagtgaagcagagggagggacacctgagagctgtggaagcgtcacgttccatctcaaagatcactgctgggttcttccactcgctagatgtccatgcatctaggctcaccagtattctggaagacacacacagcgtgcaagaccaacaacttcttgaccttgaaaagaaattcgaggagtgcgcagctaatgaagaaaaacagcttctagagaaggtggcggagatgctggcaagttccaacgcacggaagaagaagctggtccaaacagcagtgggcagcctccgggagagcgccgtgaacagaacgagccacctgcagaaagaaatctcgacggcccaggacttgacctcgtccgtgcgcgagaagtggggcttttacatggaagagaccgagaagaattacgctgaggataccaaagcagtcgacagcggaaggtcttgcctggccgaagtgcttgtagaatgcaaggcgaaggccaccgtgggtgcacagcaatggaagaacgcggaggattctctgttcagcctcggcaaaggaaacgtggagtcagtggattctatagtcaggaccgggacagaggccaacgaattgctgcgttccaaactgtcgtctgcggcatcggcaactcttgaagatatcgacgttgcaaacgaggctctcctttcttcaattgacagctcgctgaagcttgaccgcgacgcgtgcgcgaacatcggggcggtcctcacgccgtgccacggggagatgagggagctgaagggggagcatcaccacaaggtcgtggagatcagcgaaagcgccgggaagtgcctggaggaagagtatctggtggacgagccgtcgtgttcgacgcccaggagaaggcggatcgacctgccgggcgtggagtcgatagaggagctgcggaccccgggctacgccgagcttctcaagtcgttccgggaggcgagggggagctggaagctggcgaatggagacgtcacagggcatttgccagaggcggctcaggatccggcatcatcgccgccgccggccgtgggttcaagaacccctctcgtaggaagaaactagatttaccgaaaccatgtagaaagaaaaaggaaaaaaaaaggaggaagaagaggaaggcatgtgtctactagagtacctttttcgtattggtgttgatagtggtgttggttaactactgctgctgcttggttgattgtttgttcgttcttaggtggtctccttgtatagtgattagtgagtcatatatacttgccgtcacacatatgccggtgtacatcaggtgtgctcagcatgtctattctaaagcactagtgtttgtctctctctaggacccatcagttatttatccaactcttagagctcatttggtgacatgagaattagaggggattttaaaatttttaaaaaatcttctctaattttgttgtcaccaaaatagtcttttgggattgtttgtactaaagctaatagttagttggctaaaaattggaataaaattaactagctaatcgctaaaagtaagtaatagttgaactattcggttaattttag

SEQ ID NO: 57458 - DNA, 4035 bp, Zea Mays
aaacaaacatggttgaaagctcgagcgcgtcggtgttacgaattgagctgcctccaaacaaaaggcaaagataaaaggcaaaagctggagagagagagggacgagggagggaggccattgatagagaccacgagctgttctagaagtcaccgcgctgcagcctgcagctcaggggggcctgttccctggatctcgccatcgccattgccgctgccccccacctactactcctgctcctagtcctacacccctcctactccaatccaagaggtgctttggatcgcattgcttcgtgctagagttcggtggtcagcctgcgtgtgggacagtgaatttgaaattggcggggctgttgttcaaagaattggagatggacaggaagaattgtcctccatcgccatcgccaagatcgaccgagaagtctggaagagaattgagatctggggaggccaatgtcagcacaaataccaatagcaacctcatcgcaaaaggtgacaaggagaaaggagtcaatgtgcaagtcattctaagatgccgttgagtgatgaagaaacaaagtcgaatactcctgtggttatttcgtgcaatgaccgtcgccgggaagttgccgccactcaaattattgccaataagcagattgatcgcacatttgccttcgacaaggtttttggcccatcgtccaagcagaaagatttgtttgaacaatccatctcgccgatagtaaatgaggtccttgaaggttacaattgcactattttcgcttatgggcaaactggtaccgggaagacttacacaatggagggaggtgggactagaaagaccaagaatggtgaactcccaactgatgctggtgttatcccaagggctgtaaggcaaatctttgacattctcgagtctcagtgcgcagagtatagcatgaaagtcacctttcttgagctttacaatgaagaaatcactgatctgttggcacctgaagaaccaaaattccctgttcttgaagacaagacgaaaaaacctattgcccttatggaagatggaaagggatttgtttttgtgagaggtcttgaagaagaagttgtgtactcagctggcgaaatctacaagattcttgacaagggttctgcaaagaggcgtactgcagaaacattgctgaacaagcaaagtagtaggtcacactctatattctcaatcacaattcacattaaggaactcactcatgagggtgaggagatgatcaagattggaaagctcaatcttgtcgatctagctggttcagaaaatatatcacgctcaggtgctagagatggcagagcgagagaggctggagagatcaacaagagtttgctcacgcttggtcgtgttattaatgctctagtagagcactctggacatgtaccatacagagatagtaaactgacaaggttgctgagggattcattgggagggaaaacaaagacttgcattattgctacaatatcaccttcagtatattgtttggaagagacattgagcacacttgattatgcacaccgtgcaaaaaatatcaagaacaaaccagaggtaaatcaaaggatgatgaagtctgctgtgatcaaggacttgtactatgaaattgaccgcctcaaacaagaggtgtttgctgcaagagagaagaacggtatctatattccaagagagcgctacctccaagaagaagctgagaaaaaggccatgacagagaaaattgaacgactaggagctgatatggaggctagggataagcaattggttgaattaaaagagctttatgatgctgaacaacgtctgagtgcagagttgggtgaagaacttggaaagactcggaaagatctggaggacaccaagagagctctgcatgatctagaagaacaatacaaagaagcaaagtctactattaaagaaaaggaatatgtcatatttaatcttctgaaatcagaaaaatcattagtggactgtgcatataaccttcgtgcggagctagaaaatgcagcagcagatgtttctgggctattctccaaaatagagcgcaaagacaggatagaagatgggaacaggtcgatggtgcagagatttaggtctcaactgacccatcagctggatgcattgcataaaactgtatccagttctgtcatgcaacaggaggaccaccttaatgaaatggaacatgatatgcaatcctttgtttcttcaaaagatgaggctgcacaagggctaagagagggtgtgcaaaagctcaaagtcttgcatggttccggtatcactgctctggatgaattagcaggtgaaatcgacatgaactcgcggacaacatttgagagattaaattcacagatacagtcacacacatcagcccttgagaactgtttcggaggaatcgcttcggaagcagataacttgttagatgagcttcagcgcagcctatcgaaacaagaagagaggctagcccatttcgcagtgaagcagagggagggacacctgagagctgtggaagcgtcacgttccatctcaaagatcactgctgggttcttccactcgctagatgtccatgcatctaggctcaccagtattctggaagacacacacagcgtgcaagaccaacaacttcttgaccttgaaaagaaattcgaggagtgcgcagctaatgaagaaaaacagcttctagagaaggtggcggagatgctggcaagttccaacgcacggaagaagaagctggtccaaacagcagtgggcagcctccgggagagcgccgtgaacagaacgagccacctgcagaaagaaatctcgacggcccaggacttgacctcgtccgtgcgcgagaagtggggcttttacatggaagagaccgagaagaattacgctgaggataccaaagcagtcgacagcggaaggtcttgcctggccgaagtgcttgtagaatgcaaggcgaaggccaccgtgggtgcacagcaatggaagaacgcggaggattctctgttcagcctcggcaaaggaaacgtggagtcagtggattctatagtcaggaccgggacagaggccaacgaattgctgcgttccaaactgtcgtctgcggcatcggcaactcttgaagatatcgacgttgcaaacgaggctctcctttcttcaattgacagctcgctgaagcttgaccgcgacgcgtgcgcgaacatcggggcggtcctcacgccgtgccacggggagatgagggagctgaagggggagcatcaccacaaggtcgtggagatcagcgaaagcgccgggaagtgcctggaggaagagtatctggtggacgagccgtcgtgttcgacgcccaggagaaggcggatcgacctgccgggcgtggagtcgatagaggagctgcggaccccgggctacgccgagcttctcaagtcgttccgggaggcgagggggagctggaagctggcgaatggagacgtcacagggcatttgccagaggcggctcaggatccggcatcatcgccgccgccggccgtgggttcaagaacccctctcgtaggaagaaactagatttaccgaaaccatgtagaaagaaaaaggaaaaaaaaaggaggaagaagaggaaggcatgtgtctactagagtacctttttcgtattggtgttgatagtggtgttggttaactactgctgctgcttggttgattgtttgttcgttcttaggtggtctccttgtatagtgattagtgagtcatatatacttgccgtcacacatatgccggtgtacatcaggtgtgctcagcatgtctattctaaagcactagtgtttgtctctctctaggacccatcagttatttatccaactcttagagctcatttggtgacatgagaattagaggggattttaaaatttttaaaaaatcttctctaattttgttgtcaccaaaatagtcttttgggattgtttgtactaaagctaatagttagttggctaaaaattggaataaaattaactagctaatcgctaaaagtaagtaatagttgaactattcggttaattttag

SEQ ID NO: 57459 - DNA, 4006 bp, Zea Mays
gtcggtgttacgaattgagctgcctccaaacaaaaggcaaagataaaaggcaaaagctggagagagagagggacgagggagggaggccattgatagagaccacgagctgttctagaagtcaccgcgctgcagcctgcagctcaggggggcctgttccctggatctcgccatcgccattgccgctgccccccacctactactcctgctcctagtcctacacccctcctactccaatccaagaggtgctttggatcgcattgcttcgtgctagagttcggtggtcagcctgcgtgtgggacagtgaatttgaaattggcggggctgttgttcaaagaattggagatggacaggaagaattgtcctccatcgccatcgccaagatcgaccgagaagtctggaagagaattgagatctggggaggccaatgtcagcacaaataccaatagcaacctcatcgcaaaaggtgacaaggagaaaggagtcaatgtgcaagtcattctaagatgcaggccgttgagtgatgaagaaacaaagtcgaatactcctgtggttatttcgtgcaatgaccgtcgccgggaagttgccgccactcaaattattgccaataagcagattgatcgcacatttgccttcgacaaggtttttggcccatcgtccaagcagaaagatttgtttgaacaatccatctcgccgatagtaaatgaggtccttgaaggttacaattgcactattttcgcttatgggcaaactggtaccgggaagacttacacaatggagggaggtgggactagaaagaccaagaatggtgaactcccaactgatgctggtgttatcccaagggctgtaaggcaaatctttgacattctcgagtctcagtgcgcagagtatagcatgaaagtcacctttcttgagctttacaatgaagaaatcactgatctgttggcacctgaagaaccaaaattccctgttcttgaagacaagacgaaaaaacctattgcccttatggaagatggaaagggatttgtttttgtgagaggtcttgaagaagaagttgtgtactcagctggcgaaatctacaagattcttgacaagggttctgcaaagaggcgtactgcagaaacattgctgaacaagcaaagtagtaggtcacactctatattctcaatcacaattcacattaaggaactcactcatgagggtgaggagatgatcaagattggaaagctcaatcttgtcgatctagctggttcagaaaatatatcacgctcaggtgctagagatagcgagagaggctggagagatcaacaagagtttgctcacgcttggtcgtgttattaatgctctagtagagcactctggacatgtaccatacagagatagtaaactgacaaggttgctgagggattcattgggagggaaaacaaagacttgcattattgctacaatatcaccttcagtatattgtttggaagagacattgagcacacttgattatgcacaccgtgcaaaaaatatcaagaacaaaccagaggtaaatcaaaggatgatgaagtctgctgtgatcaaggacttgtactatgaaattgaccgcctcaaacaagaggtgtttgctgcaagagagaagaacggtatctatattccaagagagcgctacctccaagaagaagctgagaaaaaggccatgacagagaaaattgaacgactaggagctgatatggaggctagggataagcaattggttgaattaaaagagctttatgatgctgaacaacgtctgagtgcagagttgggtgaagaacttggaaagactcggaaagatctggaggacaccaagagagctctgcatgatctagaagaacaatacaaagaagcaaagtctactattaaagaaaaggaatatgtcatatttaatcttctgaaatcagaaaaatcattagtggactgtgcatataaccttcgtgcggagctagaaaatgcagcagcagatgtttctgggctattctccaaaatagagcgcaaagacaggatagaagatgggaacaggtcgatggtgcagagatttaggtctcaactgacccatcagctggatgcattgcataaaactgtatccagttctgtcatgcaacaggaggaccaccttaatgaaatggaacatgatatgcaatcctttgtttcttcaaaagatgaggctgcacaagggctaagagagggtgtgcaaaagctcaaagtcttgcatggttccggtatcactgctctggatgaattagcaggtgaaatcgacatgaactcgcggacaacatttgagagattaaattcacagatacagtcacacacatcagcccttgagaactgtttcggaggaatcgcttcggaagcagataacttgttagatgagcttcagcgcagcctatcgaaacaagaagagaggctagcccatttcgcagtgaagcagagggagggacacctgagagctgtggaagcgtcacgttccatctcaaagatcactgctgggttcttccactcgctagatgtccatgcatctaggctcaccagtattctggaagacacacacagcgtgcaagaccaacaacttcttgaccttgaaaagaaattcgaggagtgcgcagctaatgaagaaaaacagcttctagagaaggtggcggagatgctggcaagttccaacgcacggaagaagaagctggtccaaacagcagtgggcagcctccgggagagcgccgtgaacagaacgagccacctgcagaaagaaatctcgacggcccaggacttgacctcgtccgtgcgcgagaagtggggcttttacatggaagagaccgagaagaattacgctgaggataccaaagcagtcgacagcggaaggtcttgcctggccgaagtgcttgtagaatgcaaggcgaaggccaccgtgggtgcacagcaatggaagaacgcggaggattctctgttcagcctcggcaaaggaaacgtggagtcagtggattctatagtcaggaccgggacagaggccaacgaattgctgcgttccaaactgtcgtctgcggcatcggcaactcttgaagatatcgacgttgcaaacgaggctctcctttcttcaattgacagctcgctgaagcttgaccgcgacgcgtgcgcgaacatcggggcggtcctcacgccgtgccacggggagatgagggagctgaagggggagcatcaccacaaggtcgtggagatcagcgaaagcgccgggaagtgcctggaggaagagtatctggtggacgagccgtcgtgttcgacgcccaggagaaggcggatcgacctgccgggcgtggagtcgatagaggagctgcggaccccgggctacgccgagcttctcaagtcgttccgggaggcgagggggagctggaagctggcgaatggagacgtcacagggcatttgccagaggcggctcaggatccggcatcatcgccgccgccggccgtgggttcaagaacccctctcgtaggaagaaactagatttaccgaaaccatgtagaaagaaaaaggaaaaaaaaaggaggaagaagaggaaggcatgtgtctactagagtacctttttcgtattggtgttgatagtggtgttggttaactactgctgctgcttggttgattgtttgttcgttcttaggtggtctccttgtatagtgattagtgagtcatatatacttgccgtcacacatatgccggtgtacatcaggtgtgctcagcatgtctattctaaagcactagtgtttgtctctctctaggacccatcagttatttatccaactcttagagctcatttggtgacatgagaattagaggggattttaaaatttttaaaaaatcttctctaattttgttgtcaccaaaatagtcttttgggattgtttgtactaaagctaatagttagttggctaaaaattggaataaaattaactagctaatcgctaaaagtaagtaatagttgaactattcggttaattttag

SEQ ID NO: 57460 - DNA, 3922 bp, Zea Mays
gagggaggccattgatagagaccacgagctgttctagaagtcaccgcgctgcagcctgcagctcaggggggcctgttccctggatctcgccatcgccattgccgctgccccccacctactactcctgctcctagtcctacacccctcctactccaatccaagaggtgctttggatcgcattgcttcgtgctagagttcggtggtcagcctgcgtgtgggacagtgaatttgaaattggcggggctgttgttcaaagaattggagatggacaggaagaattgtcctccatcgccatcgccaagatcgaccgagaagtctggaagagaattgagatctggggaggccaatgtcagcacaaataccaatagcaacctcatcgcaaaaggtgacaaggagaaaggagtcaatgtgcaagtcattctaagatgcaggccgttgagtgatgaagaaacaaagtcgaatactcctgtggttatttcgtgcaatgaccgtcgccgggaagttgccgccactcaaattattgccaataagcagattgatcgcacatttgccttcgacaaggtttttggcccatcgtccaagcagaaagatttgtttgaacaatccatctcgccgatagtaaatgaggtccttgaaggttacaattgcactattttcgcttatgggcaaactggtaccgggaagacttacacaatggagggaggtgggactagaaagaccaagaatggtgaactcccaactgatgctggtgttatcccaagggctgtaaggcaaatctttgacattctcgagtctcagtgcgcagagtatagcatgaaagtcacctttcttgagctttacaatgaagaaatcactgatctgttggcacctgaagaaccaaaattccctgttcttgaagacaagacgaaaaaacctattgcccttatggaagatggaaagggatttgtttttgtgagaggtcttgaagaagaagttgtgtactcagctggcgaaatctacaagattcttgacaagggttctgcaaagaggcgtactgcagaaacattgctgaacaagcaaagtagtaggtcacactctatattctcaatcacaattcacattaaggaactcactcatgagggtgaggagatgatcaagattggaaagctcaatcttgtcgatctagctggttcagaaaatatatcacgctcagggcagagcgagagaggctggagagatcaacaagagtttgctcacgcttggtcgtgttattaatgctctagtagagcactctggacatgtaccatacagagatagtaaactgacaaggttgctgagggattcattgggagggaaaacaaagacttgcattattgctacaatatcaccttcagtatattgtttggaagagacattgagcacacttgattatgcacaccgtgcaaaaaatatcaagaacaaaccagaggtaaatcaaaggatgatgaagtctgctgtgatcaaggacttgtactatgaaattgaccgcctcaaacaagaggtgtttgctgcaagagagaagaacggtatctatattccaagagagcgctacctccaagaagaagctgagaaaaaggccatgacagagaaaattgaacgactaggagctgatatggaggctagggataagcaattggttgaattaaaagagctttatgatgctgaacaacgtctgagtgcagagttgggtgaagaacttggaaagactcggaaagatctggaggacaccaagagagctctgcatgatctagaagaacaatacaaagaagcaaagtctactattaaagaaaaggaatatgtcatatttaatcttctgaaatcagaaaaatcattagtggactgtgcatataaccttcgtgcggagctagaaaatgcagcagcagatgtttctgggctattctccaaaatagagcgcaaagacaggatagaagatgggaacaggtcgatggtgcagagatttaggtctcaactgacccatcagctggatgcattgcataaaactgtatccagttctgtcatgcaacaggaggaccaccttaatgaaatggaacatgatatgcaatcctttgtttcttcaaaagatgaggctgcacaagggctaagagagggtgtgcaaaagctcaaagtcttgcatggttccggtatcactgctctggatgaattagcaggtgaaatcgacatgaactcgcggacaacatttgagagattaaattcacagatacagtcacacacatcagcccttgagaactgtttcggaggaatcgcttcggaagcagataacttgttagatgagcttcagcgcagcctatcgaaacaagaagagaggctagcccatttcgcagtgaagcagagggagggacacctgagagctgtggaagcgtcacgttccatctcaaagatcactgctgggttcttccactcgctagatgtccatgcatctaggctcaccagtattctggaagacacacacagcgtgcaagaccaacaacttcttgaccttgaaaagaaattcgaggagtgcgcagctaatgaagaaaaacagcttctagagaaggtggcggagatgctggcaagttccaacgcacggaagaagaagctggtccaaacagcagtgggcagcctccgggagagcgccgtgaacagaacgagccacctgcagaaagaaatctcgacggcccaggacttgacctcgtccgtgcgcgagaagtggggcttttacatggaagagaccgagaagaattacgctgaggataccaaagcagtcgacagcggaaggtcttgcctggccgaagtgcttgtagaatgcaaggcgaaggccaccgtgggtgcacagcaatggaagaacgcggaggattctctgttcagcctcggcaaaggaaacgtggagtcagtggattctatagtcaggaccgggacagaggccaacgaattgctgcgttccaaactgtcgtctgcggcatcggcaactcttgaagatatcgacgttgcaaacgaggctctcctttcttcaattgacagctcgctgaagcttgaccgcgacgcgtgcgcgaacatcggggcggtcctcacgccgtgccacggggagatgagggagctgaagggggagcatcaccacaaggtcgtggagatcagcgaaagcgccgggaagtgcctggaggaagagtatctggtggacgagccgtcgtgttcgacgcccaggagaaggcggatcgacctgccgggcgtggagtcgatagaggagctgcggaccccgggctacgccgagcttctcaagtcgttccgggaggcgagggggagctggaagctggcgaatggagacgtcacagggcatttgccagaggcggctcaggatccggcatcatcgccgccgccggccgtgggttcaagaacccctctcgtaggaagaaactagatttaccgaaaccatgtagaaagaaaaaggaaaaaaaaaggaggaagaagaggaaggcatgtgtctactagagtacctttttcgtattggtgttgatagtggtgttggttaactactgctgctgcttggttgattgtttgttcgttcttaggtggtctccttgtatagtgattagtgagtcatatatacttgccgtcacacatatgccggtgtacatcaggtgtgctcagcatgtctattctaaagcactagtgtttgtctctctctaggacccatcagttatttatccaactcttagagctcatttggtgacatgagaattagaggggattttaaaatttttaaaaaatcttctctaattttgttgtcaccaaaatagtcttttgggattgtttgtactaaagctaatagttagttggctaaaaattggaataaaattaactagctaatcgctaaaagtaagtaatagttgaactattcggttaattttag

SEQ ID NO: 57461 - DNA, 3939 bp, Zea Mays
gggaggccattgatagagaccacgagctgttctagaagtcaccgcgctgcagcctgcagctcaggggggcctgttccctggatctcgccatcgccattgccgctgccccccacctactactcctgctcctagtcctacacccctcctactccaatccaagaggtgctttggatcgcattgcttcgtgctagagttcggtggtcagcctgcgtgtgggacagtgttcaactctttgaggatttggcaactgtattttaagcattaagcttcaacgcagaatttgaaattggcggggctgttgttcaaagaattggagatggacaggaagaattgtcctccatcgccatcgccaagatcgaccgagaagtctggaagagaattgagatctggggaggccaatgtcagcacaaataccaatagcaacctcatcgcaaaaggccgttgagtgatgaagaaacaaagtcgaatactcctgtggttatttcgtgcaatgaccgtcgccgggaagttgccgccactcaaattattgccaataagcagattgatcgcacatttgccttcgacaaggtttttggcccatcgtccaagcagaaagatttgtttgaacaatccatctcgccgatagtaaatgaggtccttgaaggttacaattgcactattttcgcttatgggcaaactggtaccgggaagacttacacaatggagggaggtgggactagaaagaccaagaatggtgaactcccaactgatgctggtgttatcccaagggctgtaaggcaaatctttgacattctcgagtctcagtgcgcagagtatagcatgaaagtcacctttcttgagctttacaatgaagaaatcactgatctgttggcacctgaagaaccaaaattccctgttcttgaagacaagacgaaaaaacctattgcccttatggaagatggaaagggatttgtttttgtgagaggtcttgaagaagaagttgtgtactcagctggcgaaatctacaagattcttgacaagggttctgcaaagaggcgtactgcagaaacattgctgaacaagcaaagtagtaggtcacactctatattctcaatcacaattcacattaaggaactcactcatgagggtgaggagatgatcaagattggaaagctcaatcttgtcgatctagctggttcagaaaatatatcacgctcaggtgctagagatggcagagcgagagaggctggagagatcaacaagagtttgctcacgcttggtcgtgttattaatgctctagtagagcactctggacatgtaccatacagagatagtaaactgacaaggttgctgagggattcattgggagggaaaacaaagacttgcattattgctacaatatcaccttcagtatattgtttggaagagacattgagcacacttgattatgcacaccgtgcaaaaaatatcaagaacaaaccagaggtaaatcaaaggatgatgaagtctgctgtgatcaaggacttgtactatgaaattgaccgcctcaaacaagaggtgtttgctgcaagagagaagaacggtatctatattccaagagagcgctacctccaagaagaagctgagaaaaaggccatgacagagaaaattgaacgactaggagctgatatggaggctagggataagcaattggttgaattaaaagagctttatgatgctgaacaacgtctgagtgcagagttgggtgaagaacttggaaagactcggaaagatctggaggacaccaagagagctctgcatgatctagaagaacaatacaaagaagcaaagtctactattaaagaaaaggaatatgtcatatttaatcttctgaaatcagaaaaatcattagtggactgtgcatataaccttcgtgcggagctagaaaatgcagcagcagatgtttctgggctattctccaaaatagagcgcaaagacaggatagaagatgggaacaggtcgatggtgcagagatttaggtctcaactgacccatcagctggatgcattgcataaaactgtatccagttctgtcatgcaacaggaggaccaccttaatgaaatggaacatgatatgcaatcctttgtttcttcaaaagatgaggctgcacaagggctaagagagggtgtgcaaaagctcaaagtcttgcatggttccggtatcactgctctggatgaattagcaggtgaaatcgacatgaactcgcggacaacatttgagagattaaattcacagatacagtcacacacatcagcccttgagaactgtttcggaggaatcgcttcggaagcagataacttgttagatgagcttcagcgcagcctatcgaaacaagaagagaggctagcccatttcgcagtgaagcagagggagggacacctgagagctgtggaagcgtcacgttccatctcaaagatcactgctgggttcttccactcgctagatgtccatgcatctaggctcaccagtattctggaagacacacacagcgtgcaagaccaacaacttcttgaccttgaaaagaaattcgaggagtgcgcagctaatgaagaaaaacagcttctagagaaggtggcggagatgctggcaagttccaacgcacggaagaagaagctggtccaaacagcagtgggcagcctccgggagagcgccgtgaacagaacgagccacctgcagaaagaaatctcgacggcccaggacttgacctcgtccgtgcgcgagaagtggggcttttacatggaagagaccgagaagaattacgctgaggataccaaagcagtcgacagcggaaggtcttgcctggccgaagtgcttgtagaatgcaaggcgaaggccaccgtgggtgcacagcaatggaagaacgcggaggattctctgttcagcctcggcaaaggaaacgtggagtcagtggattctatagtcaggaccgggacagaggccaacgaattgctgcgttccaaactgtcgtctgcggcatcggcaactcttgaagatatcgacgttgcaaacgaggctctcctttcttcaattgacagctcgctgaagcttgaccgcgacgcgtgcgcgaacatcggggcggtcctcacgccgtgccacggggagatgagggagctgaagggggagcatcaccacaaggtcgtggagatcagcgaaagcgccgggaagtgcctggaggaagagtatctggtggacgagccgtcgtgttcgacgcccaggagaaggcggatcgacctgccgggcgtggagtcgatagaggagctgcggaccccgggctacgccgagcttctcaagtcgttccgggaggcgagggggagctggaagctggcgaatggagacgtcacagggcatttgccagaggcggctcaggatccggcatcatcgccgccgccggccgtgggttcaagaacccctctcgtaggaagaaactagatttaccgaaaccatgtagaaagaaaaaggaaaaaaaaaggaggaagaagaggaaggcatgtgtctactagagtacctttttcgtattggtgttgatagtggtgttggttaactactgctgctgcttggttgattgtttgttcgttcttaggtggtctccttgtatagtgattagtgagtcatatatacttgccgtcacacatatgccggtgtacatcaggtgtgctcagcatgtctattctaaagcactagtgtttgtctctctctaggacccatcagttatttatccaactcttagagctcatttggtgacatgagaattagaggggattttaaaatttttaaaaaatcttctctaattttgttgtcaccaaaatagtcttttgggattgtttgtactaaagctaatagttagttggctaaaaattggaataaaattaactagctaatcgctaaaagtaagtaatagttgaactattcggttaattttag

SEQ ID NO: 57462 - DNA, 595 bp, Zea Mays
ctgcgagctgccgcaacaaccgcgccaagaccctactggtgcctaaaaatcccaaggcaccgacccctgcggctattcacaggcactcctttcgcctcatagagagtaatcaccatggggagagaaggtagaagggagtagaggtctagggcgttgccgacgtcgtcttctgccatcacgtcatccagtgctcgtgtggaggtcctggggaaccaacgtgccgtaagggacctgggcgaacctctctcgtgcaaggattcggccgggctcgccgggaatttctcactgacgcaagccactgccgtggatcgagctctgctgtggccggagcgctacgcgacagaccctctggtgaagagcaggtggcctcggaggaacactactacgaggagtttgacgaggtctaggagtcgtctcccagtcgacttaatggcgtcaaggaaataatattagttcattttatttttatcagttattttgtaagacattctcgttatgtaataatgtttgtgacatttatctctatacacttggtcattgtatgtgttcttcttctttggcacatatgagacgcacccgagtttacccccttaaa

SEQ ID NO: 57463 - DNA, 1236 bp, Zea Mays
attatcattaacattattattttatttaatgcacaaacatataaactccaacatgatgcatttttatcatttgtttgaattaaactctaaattttgtgtatgctctttttaggatgcaaatgaggcacacaaaatgaggagatccactatatcctttgtacacaaatttgagtattacacctggactacggttcccgcccgaggctgggctcgggcgaggcgagatcgcgtcccttgagtagacgaagccttgacctgaattgcgcccatcagtctttgcagcttgtgctgatggtggttaccagccgtgtttaggagcattgggggtacctctaattacggtacccgacagacgcgtttggctgattaattaggaaagatagtagagtactaccttatccaaaagggacaggggaggtaggggagttgtcggtatagggaggttctcgggtttatcatgctgcaatggcttttcagacggaggattcctatatggctctccttagaaaccgtagtgggttttctgaagctagtgcaactttgtaaaggcctcgtagtgctaccctgccttgcctcctcggtagaggtgtatggggtctgtacaaccctgtggcagatgggtaaaacgacttgtgggtaaagatgcacaacctctgaagagtgtaaaactggtatatcagtcgtgctcacggtcatgagtggctcggaccctcacatgagtaacttatggaattaaacttaattggtcatttgcattgcattgtggttttattattcattatgatctctcatttatttgggttgatatttacttatacttagtaactgctaataaaatttaaccaacttattataagcaatgctttaccttaaccattatttgttgatcagcctgacactatacatgagaccccactgtgttgagctaatgcacattattccccacacttgctgagcgataaacttttgtgagctcactcttgcgataaaccccccccccccacaggtgaagagcaggtggcctcggaggaacactactacgaggagtttgacgaggtctaggagtcgtctcccagtcgacttaatggcgtcaaggaaataatattagttcattttatttttatcagttattttgtaagacattctcgttatgtaataatgtttgtgacatttatctctatacacttggtcattgtatgtgttcttcttctttggcacatatgagacgcacccgag

SEQ ID NO: 57464 - DNA, 494 bp, Zea Mays
atatcgccggggcattgtgctatgccaaactgctcgcctcgctaaatccgctccattccctcgccctcgccgatcgccggatctctccctccgcctcgcttccgccgcacgccagggcgcacggcttcttcctccgctccctcgcctcagcgcagttcctatggggttcctgcaaagcactttttcgctgttgatcggcaccggctgcggcatctacattgcccagaactacgacgtcccaaacataaagaagctcatgaggagcctggtgggcaaggccaaggaggttgaggagtcatacaagaagacgggcaacagcaagaacaaggataacgaatagcgttgacccgcagtctgcggtccaccatctaggaaagctaattgttgcaagattattctgattattggagaaaatatgagatggcatactggaactgcggcctactcttgccccggattgaatctgtctagatgtggcaatacaatttttgagg

SEQ ID NO: 57465 - DNA, 484 bp, Zea Mays
atatcgccggggcattgtgctatgccaaactgctcgcctcgctaaatccgctccattccctcgccctcgccgatcgccggatctctccctccgcctcgcttccgccgcacgccagggcgcacggcttcttcctccgctccctcgcctcagttcctatggggttcctgcaaagcactttttcgctgttgatcggcaccggctgcggcatctacattgcccagaactacgacgtcccaaacataaagaagctcatgaggagcctggtgggcaaggccaaggaggttgaggagtcatacaagaagacgggcaacagcaagaacaaggataacgaatagcgttgacccgcagtctgcggtccaccatctaggaaagctaattgttgcaagattattctgattattggagaggcccttttcatgacggcatcatgatcaagtgtgggatgaacgatgtgtgggcatattgttatttatttattgaaaag

SEQ ID NO: 57466 - DNA, 632 bp, Zea Mays
atatcgccggggcattgtgctatgccaaactgctcgcctcgctaaatccgctccattccctcgccctcgccgatcgccggatctctccctccgcctcgcttccgccgcacgccagggcgcacggcttcttcctccgctccctcgcctcagttcctatggggttcctgcaaagcactttttcgctgttgatcggcaccggctgcggcatctacattgcccagaactacgacgtcccaaacataaagaagctcatgaggagcctggtgggcaaggccaaggaggttgaggagtcatacaagaagacgggcaacagcaagaacaaggataacgaatagcgttgacccgcagtctgcggtccaccatctaggaaagctaattgttgcaagattattctgattattggaggtatactaccttgtacgttgtaccttggttagtaccttctgtctacttatttttttctcttaaagaaaatatgagatggcatactggaactgcggcctactcttgccccggattgaatctgtctagatgtggcaatacaatttttgagaggcccttttcatgacggcatcatgatcaagtgtgggatgaacgatgtgtgggcatattgttatttatttattgaaaag

SEQ ID NO: 57467 - DNA, 478 bp, Zea Mays
cgctgaaaaggtattactggcaacacatgtcctggaagcctgagttcagctacgatcaaccatggagggcacatcacttccacttcttgaacttgccgccgccgaacttgccgtgcccgtgcttgaacttgccgtggtggccgtgaccatgcttgaacttgccgtggccaccatacccgtggccgtaaccaccgtgaccatagcctccaaaggccccatgtccaccgtgtccgctatggccatgagaaagcttgtgtgctccataagcggcagcggccgcggcagcacctcccgctagcattgcccccgtccccatgtggcccccgtggcccccatcataccctggtgagatgagccggggtagcctgcaggaggatatccaccttgaggtgggtagccacctggctgagggtacccatattgtggtgggtatgccccaggtggaggaggatatgcccctggaggaggaggatacgcc

SEQ ID NO: 57468 - DNA, 2033 bp, Zea Mays
ctgagacaactcgtccgagaaattttaattgcgctccaattcactggtaaattatctgtggctgtggagccagttgttcgcggatgaaattattgacttcaaatcaaatggaacacagtccgaaatactattctgatttgttccgattacgtctcgtgccaatctaaaaatcttggctcaaaatatcagtgattctctatttaaaaaaaagagagaaagaaataaacaaaacaaaaaaaaaatccgcaggatccctatccttaccgccgccccctttgatttttcatccaccgttcttatcccagcgtgtgcacgtcggctcctcgttaaaatatctccaccgctcagcggctccctgaaaaaaaaatattgtatgcgtcttctgtttttttatccttatcctgagtacgatcaactcttggaaaattattttagccatcttcatttcttgagcacgtacatctccctagatatattcttcaatgtactcatcctgatctccacgcgttgagctctctggggactcttttccctcacgtcatccctcccatctctcattctccaatatatcctatgcacatatattcaagagttcccccacgcactcactatctcacgcaagcctctctgccatgctctagctctcagacatgctgcttgcctccagcgatctcctcgtcgctcaactttgccaggactcacccaggcctgtgttccctccgcagttgctcgttcttctcgccaggtcttcttcgccctcagccatggcactggccgtgtgccccagcgccggtcgctcctccctgcttgccctccagctcgacctggccgcgcgccctccagctcggtgctcccctgctcggttttccctgcgtcgcgcgcgttccgtcatcccctgctgtgaccccgccgtggagctcccctgcagcgcgtccctgtttccttgttgctgctcatgcgatggggttcgtcctctgggccacgtcggcatgtgtagtcgttccctgcctctgaaccccggctggtctatgctgcaactcgccgtcgaatcgcctgctccgctgtatgaagtcggcttgtgtcgcacgtctggtgcttgacgaaaagctcgaacatgagaccgtcatcgatcctgccgtcgtccatctcgccaacatcgacttcgtctcaaatatcacctcgactttgcgacagcagtccgatgtttctgatgtcgccctgagcttattccgtgtgccacgacgtcttgtttacctccacgccaaggcatcaccgaggtacgtgaattaaccacgtgatgcggaagacgagccaagtcaaccccaagcgcgggctaatccgcaggatgaagctgataaactaatctgaagatggatagacgaaacaagatcagaacaaaagatgatcgtcaagtggacatcgtctaacaaacactaacctagtgtttcttccaggcaagccccggtgcatgcaaccccttccttgtgtttttaaattatttttacacactttaagtctagtgaaatgtgcattaagtttataggagttgcttggaaccctttgatgcattgccttccttgatatccatacctttatagatacttctgatgaagtatctgttggggacttgttctcaaatgctatgaattaagaacaaggcaacataaaatgttaaatgaaattgtccttcgtccgcgaagcattattcctttgaggataatgaatcccggacgaaggttgataagagtcttattacgaagttgaaccttcgtaataaactttcaataagcattataaaataatacaaaataaaagatatgagatggataaatgtctcacagatacatcaaatcatattcatttaatatattgagtcattaaataccaataatacctatgccttgacaaaggttgtattccgagagatgcgattgcaaataccagaatgcgtgaacagtaatggaatactgttcactatttatagacacaggacgcagcctgtgaggaattacaagtatgccccttataaaaac

SEQ ID NO: 57469 - DNA, 1687 bp, Zea Mays
accgcctccggcttcagttccccgaggctagaattcggatccctcccaccacatccatccccttcccttcccttccctcgtgccccgccggctctccagcgcgccgtctctgcccagatccaggagatatgcctcgctatgatgatcgctatggaggcacgcgcttgtatgttggcagattggccccccgtactcgttctcgtgatttagaatatctcttcggcaaatatggaagaatacgagaagtggagttgaagcgcgactatgcatttattgagttcagtgaacatcgtgatgccgatgaagctcggtaccaactagatggcagggatgtcgatggaagtcgcattgttgttgagtttgctaaaggggtcccacgtggtccaggtggctcacgtgaatatatgggaagaggccctccaccaggcacaggtcgttgtttcaactgtggaatggatggtcactgggcaagagactgtaaggctggtgactggaaaaataaatgctaccgttgtggagaaagagggcatatagaaagaaattgccagaacagtcctaggagcgtcagttactcacgctccccatctccacgccgtggaagaggtcgcagtccaagctatagcaggagcaggagccggagccggagccggagctatagccgatcgaggtccctatctggatctcctaggggaggccgccgtgaccgtgatgataggagatcgaggagtcttagctacagcaggagccccatgcggtcgccacctgcaaaggaaaaggagcgcagtcccacacctggcggaagcaggagcccaaggagccgcagcccacaggatcaggtgatgagcccaccacctaaggataacggcgacaggaatggttcagaccgtggcgacagccccagagggagggaaaacagcaggagccgcagccgcagccgcagcccatccggtggtaaccgcagccctgcagctaatgggcgtagcccgagccccagaggtgaccgtaccccgagccccatggctgaccgtagcccgagcccaaagggcaatggtaacaacgatggtggtgatgatgatactggccgtggtggttcccccacaggaagcaagtcaccctgaacgctgcaccgtctcagttcttaggtgcttcgtgatgcagtgggcaaacataccaaagacgtgatagctgtatcgtttccctatctgagacgtggacttatttagcttgctttgatattggtgtcttatttctcttatgaataatgtggacacgcatgttgtgtcgccctatgttggtatttacctgcaatgctatagcgtcagtcttgttgaggcctgagcaaaaacaaccagataccccctttgaaaggtactgctttgttgtgggtgaatcggggactcggggtggcataggttcacggcagagtcgttttccgcgactcgtgctgccggttagccgagtcctgctcgctagtcttcagcctgttttgctttaaatcgtaccggcttttactacttataaagtgtttgttttatctctatggatcccaattgtacctgtccaaacagttggcttccaacagctgccaacacatttacgctgtgcagttgtcacagcacggtacagagcgcccgagttggtcctgcagttcttgctgatcttgctgttcttgctgatcacatggact

SEQ ID NO: 57470 - DNA, 1691 bp, Zea Mays
accgcctccggcttcagttccccgaggctagaattcggatccctcccaccacatccatccccttcccttcccttccctcgtgccccgccggctctccagcgcgccgtctctgcccagatccaggagatatgcctcgctatgatgatcgctatggaggcacgcgcttgtatgttggcagattggccccccgtactcgttctcgtgatttagaatatctcttcggcaaatatggaagaatacgagaagtggagttgaagcgcgactatgcatttatttgaacatcgtgatgccgatgaagctcggtaccaactagatggcagggatgtcgatggaagtcgcattgttgttgagtttgctaaaggggtcccacgtggtccaggtggctcacgtgaatatatgggaagaggccctccaccaggcacaggtcgttgtttcaactgtggaatggatggtcactgggcaagagactgtaaggctggtgactggaaaaataaatgctaccgttgtggagaaagagggcatatagaaagaaattgccagaacagtcctaggagcgtcaggcgtgaaagaagttactcacgctccccatctccacgccgtggaagaggtcgcagtccaagctatagcaggagcaggagccggagccggagccggagctatagccgatcgaggtccctatctggatctcctaggggaggccgccgtgaccgtgatgataggagatcgaggagtcttagctacagcaggagccccatgcggtcgccacctgcaaaggaaaaggagcgcagtcccacacctggcggaagcaggagcccaaggagccgcagcccacaggatcaggtgatgagcccaccacctaaggataacggcgacaggaatggttcagaccgtggcgacagccccagagggagggaaaacagcaggagccgcagccgcagccgcagcccatccggtggtaaccgcagccctgcagctaatgggcgtagcccgagccccagaggtgaccgtaccccgagccccatggctgaccgtagcccgagcccaaagggcaatggtaacaacgatggtggtgatgatgatactggccgtggtggttcccccacaggaagcaagtcaccctgaacgctgcaccgtctcagttcttaggtgcttcgtgatgcagtgggcaaacataccaaagacgtgatagctgtatcgtttccctatctgagacgtggacttatttagcttgctttgatattggtgtcttatttctcttatgaataatgtggacacgcatgttgtgtcgccctatgttggtatttacctgcaatgctatagcgtcagtcttgttgaggcctgagcaaaaacaaccagataccccctttgaaaggtactgctttgttgtgggtgaatcggggactcggggtggcataggttcacggcagagtcgttttccgcgactcgtgctgccggttagccgagtcctgctcgctagtcttcagcctgttttgctttaaatcgtaccggcttttactacttataaagtgtttgttttatctctatggatcccaattgtacctgtccaaacagttggcttccaacagctgccaacacatttacgctgtgcagttgtcacagcacggtacagagcgcccgagttggtcctgcagttcttgctgatcttgctgttcttgctgatcacatggact

SEQ ID NO: 57471 - DNA, 1775 bp, Zea Mays
accgcctccggcttcagttccccgaggctagaattcggatccctcccaccacatccatccccttcccttcccttccctcgtgccccgccggctctccagcgcgccgtctctgcccagatccaggagatatgcctcgctatgatgatcgctatggaggcacgcgcttgtatgttggcagattggccccccgtactcgttctcgtgatttagaatatctcttcggcaaatatggaaggtttttcggtttttaccgggaggtctttggtggaagggtgcccttggtggacctggtgaccatttggtgaagggtgcccttggtaatacgagaagtggagttgaagcgcgactatgcatttatttgaacatcgtgatgccgatgaagctcggtaccaactagatggcagggatgtcgatggaagtcgcattgttgttgagtttgctaaaggggtcccacgtggtccaggtggctcacgtgaatatatgggaagaggccctccaccaggcacaggtcgttgtttcaactgtggaatggatggtcactgggcaagagactgtaaggctggtgactggaaaaataaatgctaccgttgtggagaaagagggcatatagaaagaaattgccagaacagtcctaggagcgtcaggcgtgaaagaagttactcacgctccccatctccacgccgtggaagaggtcgcagtccaagctatagcaggagcaggagccggagccggagccggagctatagccgatcgaggtccctatctggatctcctaggggaggccgccgtgaccgtgatgataggagatcgaggagtcttagctacagcaggagccccatgcggtcgccacctgcaaaggaaaaggagcgcagtcccacacctggcggaagcaggagcccaaggagccgcagcccacaggatcaggtgatgagcccaccacctaaggataacggcgacaggaatggttcagaccgtggcgacagccccagagggagggaaaacagcaggagccgcagccgcagccgcagcccatccggtggtaaccgcagccctgcagctaatgggcgtagcccgagccccagaggtgaccgtaccccgagccccatggctgaccgtagcccgagcccaaagggcaatggtaacaacgatggtggtgatgatgatactggccgtggtggttcccccacaggaagcaagtcaccctgaacgctgcaccgtctcagttcttaggtgcttcgtgatgcagtgggcaaacataccaaagacgtgatagctgtatcgtttccctatctgagacgtggacttatttagcttgctttgatattggtgtcttatttctcttatgaataatgtggacacgcatgttgtgtcgccctatgttggtatttacctgcaatgctatagcgtcagtcttgttgaggcctgagcaaaaacaaccagataccccctttgaaaggtactgctttgttgtgggtgaatcggggactcggggtggcataggttcacggcagagtcgttttccgcgactcgtgctgccggttagccgagtcctgctcgctagtcttcagcctgttttgctttaaatcgtaccggcttttactacttataaagtgtttgttttatctctatggatcccaattgtacctgtccaaacagttggcttccaacagctgccaacacatttacgctgtgcagttgtcacagcacggtacagagcgcccgagttggtcctgcagttcttgctgatcttgctgttcttgctgatcacatggact

SEQ ID NO: 57472 - DNA, 1019 bp, Zea Mays
attatatagagagaaatggatctaaaactttcgccagtccgtcgaaagttaatattatgtccggcgcgcggaatcagccgttatacaattcaacttttgactgcttgaaattaatgttaacatccggcggcggcggcggcggcggctctagaaaccttcatggccgtcggatttctggaggtttcctgttgtgactcccctggcttcaccacacagtccacaggcacacgggaaggaagcttgtggcgtcctcgtccctgcagtctccgctatgccgcattcacgagcattcacttatttcatataatatgtggcctcaaacatatactacatccattcttttttatttatcgtgatttagttaaaatataaactaacagacgataaatatttaaaaataaagatagtataatctattattatcgcctatcttctacacagagacggaggcagcggtgggcacgggcggggctcgagctcctcctactgctgccgagtacattgagccctactagagcatcttcaaagatttttagcgtacatatataatgcaggagggactcggcggttctcgaggcgcgcggcggcaacggctcccccaggcacgcaacggcgacagttctcaaggggcgcacatggcatcctcaggagacgtgagaggcggcgatggccagaggcgtgcacgggaagcggcaccaccctgatgtgcacgtgacgccgaggccctcctacctccaactattcttcgagttccaacgggtcgggcgcctctgcgacagcatggatcgttcgacgacgacctccgatccggtggctttagggcatcctccgacaacgaccttatctaatccatgtgttatgcatttcatgatattttttatgtcgaccactgcattttatgcattccatttgaggatttttatgatgatgaatatgtcgtctaacatttatgctacatctgctattattttaagagcaaacttgatggtttttatgctgataagtacaacatatctgag

SEQ ID NO: 57473 - DNA, 731 bp, Zea Mays
cgaaagttaatattatgtccggcgcgcggaatcagccgttatacaattcaacttttgactgcttgaaattaatgttaacatccggcggcggcggcggcggcggctctagaaaccttcatggccgtcggatttctggaggagggactcggcggttctcgaggcgcgcggcggcaacggctcccccaggcacgcaacggcgacagttctcaaggggcgcacatggcatcctcaggagacgtgagaggcggcgatggccagaggcgtgcacgggaagcggcaccaccctgatgtgcacgtgacgccgaggccctcctacctccaactattcttcgagttccaacgggtcgggcgcctctgcgacagcatggatcgttcgacgacgacctccgatccggtggctttagggcatcctccgacaacgaccttatctaatccatgtgttatgcatttcatgatattttttatgtcgaccactgcattttatgcattccatttgaggatttttatgatgatgaatatgtcgtctaacatttatgctacatctgctattattttaagagcaaacttgatggtttttatgctgataagtacaacatatctgagttatcaacacctctcactttggctcattttttacgggcaaaactgaggatatttgcgctaaaggttaaaggattttacgcaaatctagaggtgcaccaccaatctcgtatgcatattttccgcgtgca

SEQ ID NO: 57474 - DNA, 662 bp, Zea Mays
cgagtaggtgcatggtcacgctagctgtagctttttgcagagcgtcgtctgtaaatacgtagcccttccacaagcgaggcaaggggggagagagtatcgtcagctagcagagagagtgcgtagcaactagcaatggcggagaaccctgctccgagttccccgctagtgacttctcccgacgccgctgcgccgcctctgccagcggagttcaccaagctcaccttccgtagcctgtacatccgtcggacaggtccaggcagccgggagatgactgtggacgggaggccgtctgaccagctgggacgacggttcgtgagcgactttcccatatacgatggccgtggctccggcgcccacctcgtcgctcgcttgcagggagtcactgtccaaatcggcagctcgcaccagctagtcagcatcgtcttcgaggccgagaggcttaagggctccacgctgctcaccaacggagtgataacggatgggtcagacgagtgggccatctacggtggcaccggggtgttcgccatggccaccggtgtcatacgaagaaggtttctcgccggtagcaacgacgggaactctgatgagcttaccagcatcgaagttttctgcccggcgtttggctcggcacaacaacagccaaacaagcagctggatgcacg

SEQ ID NO: 57475 - DNA, 4256 bp, Zea Mays
cgcgccagccatcagccgcgtcccttcgcacaactaccagatccatttgtgcgttcacatcttctctcctccctggcaactgcttccatcatctccatcaccgtccccacgttctcctccctccgcctctcgctctgcgcacatccccatgcccacgccgagcgcttgcgcctcaccacccccgtcgcagccgcggccgtggcggcgtcgacgacctcccccgactttcccgccgtgggcgccgtcctggggaagcccacagtgctcgtgggtagtggccgagaagatcggagccgcggggttcatgctgaaggaggtggtgcgatgtccagctcccaggtcgtcgtcctcacgctcctggagttttggtcagtgagatgttcgtcttcgtgctcagcctcgtcctcgagtcgtcgcgcaaacagcgagagcagcgtgggtctcatcatcaggatcacaccaacagggacggagatctgtcgtcgaagaccacctgactgtttctcatggcaggcttgcttgcactagcttggcacaataagccacttcaggcttcagtcggttatgtgatcaccggaacattatgggctctagagtaggacttttgagaaatgctaggcgatggtgcatgcatgatgaagctgctgtccattatattgacatgattgatcagaccacgcttggtcaccggatgatcaagaaacaattcaacaagactccaagagctggctggcaaatcgattgcttggaacagagcttggcttcgattctttgcattttgcaagaatcgattaccaagataagaaaaggcgtaaagctggcaaaggcttgaggttatatggcgtggctcaagaactttcggttcatcttcacagatatttacaaatgtatttcgtgtcgattatagccctccagatggctttggctttgaagttttagatgaaaatatcttgcctgtccaggatgacatgccgatgtttgactataatgttgaagaacaagttaatgattttgttgctgcagccatagaacagaatcttggttccggaatatggacaaacttatctatcgcgtgaacaaggatgcacgtaaaatagaatttttagtaggtaggaggagttccttagggctgttcacgaccagcttggaagacccaatggcaattgcccagcatcatgatgcggtctcaggtatagcaaaacaacacacgacagatgactactcgaaatgccttgctcttggagcatctaagaatgaaagcattaatggtatatagttggatatttcattcagagaggctcaagtgatagctgcaagtagttctaccttgtgcccagttttcttgttcttttaggtcaatgaaagttcccatttttgtggcgttgcttagatggttggtcctttcctcaaaaaaaaaagatggttggtcctgttgactaccaaaatgacttgaacttttggtgcatggacaaatggactagaagctttcctgtaacgtggcacatcataagatgttggttgattctcctgaaagcagattttattttactttaaccaaaggagaaccaagttggctgtcgtctcccactgtggcactattttttgggttaaaagtataacaccatcgtgagttgaaactcttgagacatagagataaaaaccaataaaactcacatccgacgtgattagcatgaccattactcatcaaaaatagttgaaataaattcttcactccaatctaatccaaataccagatcttcataagaagagcatgccaatgacattgttttggcaatcagttcatggttacacgacactactatgacagacttattttgaaacatagaacaatgcttattcaacattattatacaatcaagatcctaactttttgggggggttgcaacaatggagagtggagacaacatggagacctgagctgagcttaacccgcaaaagatcatacaccattctgtgatgcttcacaaggttccgcacctcaaattttggtgaaactgccttgttgttgtcttcatatctagcgcactggcatcccatgtagactgcagtttttgtcaaaaatgattttttttgaataagtagacattatatccttcaagatttttatatggaaatcctaaattgtgggcatattgatttttactctatttcttaaatgtaaagttgtaaacttgaatcacctagaaggaaccgtgttaagaagaaataagcaactatgtcttttcttctggaaagataaaatgtgtttatatttgaaagctagaaacatagctttctattatgtcacatcagtctaaaccagaatttaatcattttttataatgcacgtgcaatgagataaaaccaaaacaccttataatttggaatagagacttaacattttgttggctgggacattgggctatattttgcagcctcctcacttggcacagataacttcatttgttttccagagactgtattaatactttgcaggaataaacattgtgtcttgttatccattgcaatatacaacacttaagcccttggctgatagagtgattgtaaagattaactcttccgaggagaagacaactggtggaattttgcttccaacgactgctcagtctagacctcagggtggcaaggtagttgctattggaaaaggaatgataattggggacaataaagttgatgtcaacatttagtaataactataagctctctgtgagccaattcttgagatgatgtccaacatgctcatttaagttgtgcctaagttggtgtcagaaatacgtcaaggaaaaatgtcgaacaactcagaagataaattcaagaactggttgcttcaacaagagtctgtccatgaggatggcatgcaacattacttgcccttcgattgagataggtggctacggtgatgctttgttgaacctgatatacgcatctccatcaagccagttcgaagagctcagtttagaatgtgagctagatgctacaggcaatcattctagagtgaaggatgctcaagttcatggctcacctatacctgagagtaatggaagattatcgacaactgctcagactaaaatgatgtccacagtctcagaagatgcaattcttgttggctcatctttcagataccaaagtagcctaggtaacaacaataagagggttgggctttttgatatgggtgatggaagtagtgagcctgctgctgaggacaacaatcaaatgcatcagatttcacgatgctgatatgtgctaagcatggaaacagaattgttctcacatgtatagttggtctaagtgatggcaaaagattgacacttgtggagttttttctgtgccagacatggagtcccttggaaaaaccgaatggtctatcatgggttttattctgcatacgataatacaactctactatatgagatcctgaagtctattaaatgggcaagaaaaacatatgtaaatcgacctgtaaatgttgttggacactccattggaggggatctagcttcattttgtgcccttgatctatttgacgttgagctcatgacttttggacagcctcggttaggcaatcctgcatttgttgtatgccttggctaacaagtcccaagaacaatccatgtgacccataaaaacgatattgtgccgcaattaccaccgtattattattacttaagtaaatggacataccaccacttcgctagagaggtttgacttcatgagagcatagatggaaatgtagttgccagaaatgagattgtatgtgatgattctggtgaggacccgacctatagcagaagtgggtcatgggatgagcgtagcagataatcttgagtactacagtgtcacactacatgttgactcaaggggaacctgtcagttcgtgattggtacagccaaccaagtatacaactacattcgtgaagttgatggatccatcatcttgttaagatatatatgcaagaaccatgagctctagaatcaatgtgactttgtatgccacgaaatgcacccttgtacaatatttttattttcaatttgtgtacagctcatgaaatactgttgtgtacaactcatgaaatactgggctctccagagggtaaggactaaggagagactcacctttttaaatgcacccctttgaccaagtgacattcgatacattgtaagctccataagattgccgcacaattcaatttgtgtatatcaataacactatgtattaccaagttatgcaagtatta

SEQ ID NO: 57476 - DNA, 4143 bp, Zea Mays
cagatccatttgtgcgttcacatcttctctcctccctggcaactgcttccatcatctccatcaccgtccccacgttctcctccctccgcctctcgctctgcgcacatccccatgcccacgccgagcgcttgcgcctcaccacccccgtcgcagccgcggccgtggcggcgtcgacgacctcccccgactttcccgccgtgggcgccgtcctggggaagcccacagtgctcgtgggtagtggccgagaagatcggagccgcggggttcatgctgaaggaggtggtgcgatgtccagctcccaggtcgtcgtcctcacgctcctggagttttggtcagtgagatgttcgtcttcgtgctcagcctcgtcctcgagtcgtcgcgcaaacagcgagagcagcgtgggtctcatcatcaggatcacaccaacagggacggagatctgtcgtcgaagaccacctgactgtttctcatggcaggcttgcttgcactagcttggcacaataagccacttcaggcttcagtcggttatgtgatcaccggaacattatgggctctagagtaggacttttgaggtattttgatgccaaaatttttagacatgccatcattgaagttgctccggtctttacaagatttacagagcttcaactaagtcaacttgttgagtcgcttgttacatatcttttgcatatgggaaaatagtagataagaaatgctaggcgatggtgcatgcatgatgaagctgctgtccattatattgacatgattgatcagaccacgcttggtcaccggatgatcaagaaacaattcaacaagactccaagagctggctggcaaatcgattgcttggaacagagcttggcttcgattctttgcattttgcaagaatcgattaccaagataagaaaaggcgtaaagctggcaaaggcttgaggttatatggcgtggctcaagaactttcggttcatcttcacagatatttacaaatgtatttcgtgtcgattatagccctccagatggctttggctttgaagttttagatgaaaatatcttgcctgtccagaatcttggttccggaatatggacaaacttatctatcgcgtgaacaaggatgcacgtaaaatagaatttttagtaggtaggaggagttccttagggctgttcacgaccagcttggaagacccaatggcaattgcccagcatcatgatgcggtctcaggtatagcaaaacaacacacgacagatgactactcgaaatgccttgctcttggagcatctaagaatgaaagcattaatggtatatagttggatatttcattcagagaggctcaagtgatagctgcaagtagttctaccttgtgcccagttttcttgttcttttaggtcaatgaaagttcccatttttgtggcgttgcttagatggttggtcctttcctcaaaaaaaaaagatggttggtcctgttgactaccaaaatgacttgaacttttggtgcatggacaaatggactagaagctttcctgtaacgtggcacatcataagatgttggttgattctcctgaaagcagattttattttactttaaccaaaggagaaccaagttggctgtcgtctcccactgtggcactattttttgggttaaaagtataacaccatcgtgagttgaaactcttgagacatagagataaaaaccaataaaactcacatccgacgtgattagcatgaccattactcatcaaaaatagttgaaataaattcttcactccaatctaatccaaataccagatcttcataagaagagcatgccaatgacattgttttggcaatcagttcatggttacacgacactactatgacagacttattttgaaacatagaacaatgcttattcaacattattatacaatcaagatcctaactttttgggggggttgcaacaatggagagtggagacaacatggagacctgagctgagcttaacccgcaaaagatcatacaccattctgtgatgcttcacaaggttccgcacctcaaattttggtgaaactgccttgttgttgtcttcatatctagcgcactggcatcccatgtagactgcagtttttgtcaaaaatgattttttttgaataagtagacattatatccttcaagatttttatatggaaatcctaaattgtgggcatattgatttttactctatttcttaaatgtaaagttgtaaacttgaatcacctagaaggaaccgtgttaagaagaaataagcaactatgtcttttcttctggaaagataaaatgtgtttatatttgaaagctagaaacatagctttctattatgtcacatcagtctaaaccagaatttaatcattttttataatgcacgtgcaatgagataaaaccaaaacaccttataatttggaatagagacttaacattttgttggctgggacattgggctatattttgcagcctcctcacttggcacagataacttcatttgttttccagagactgtattaatactttgcaggaataaacattgtgtcttgttatccattgcaatatacaacacttaagcccttggctgatagagtgattgtaaagattaactcttccgaggagaagacaactggtggaattttgcttccaacgactgctcagtctagacctcagggtggcaagaaatacgtcaaggaaaaatgtcgaacaactcagaagataaattcaagaactggttgcttcaacaagagtctgtccatgaggatggcatgcaacattacttgcccttcgattgagataggtggctacggtgatgctttgttgaacctgatatacgcatctccatcaagccagttcgaagagctcagtttagaatgtgagctagatgctacaggcaatcattctagagtgaaggatgctcaagttcatggctcacctatacctgagagtaatggaagattatcgacaactgctcagactaaaatgatgtccacagtctcagaagatgcaattcttgttggctcatctttcagataccaaagtagcctaggtaacaacaataagagggttgggctttttgatatgggtgatggaagtagtgagcctgctgctgaggacaacaatcaaatgcatcagatttcacgatgctgatatgtgctaagcatggaaacagaattgttctcacatgtatagttggtctaagtgatggcaaaagattgacacttgtggagttttttctgtgccagacatggagtcccttggaaaaaccgaatggtctatcatgggttttattctgcatacgataatacaactctactatatgagatcctgaagtctattaaatgggcaagaaaaacatatgtaaatcgacctgtaaatgttgttggacactccattggaggggatctagcttcattttgtgcccttgatctatttgacgttgagctcatgacttttggacagcctcggttaggcaatcctgcatttgttgtatgccttggctaacaagtcccaagaacaatccatgtgacccataaaaacgatattgtgccgcaattaccaccgtattattattacttaagtaaatggacataccaccacttcgctagagaggtttgacttcatgagagcatagatggaaatgtagttgccagaaatgagattgtatgtgatgattctggtgaggacccgacctatagcagaagtgggtcatgggatgagcgtagcagataatcttgagtactacagtgtcacactacatgttgactcaaggggaacctgtcagttcgtgattggtacagccaaccaagtatacaactacattcgtgaagttgatggatccatcatcttgttaagatatatatgcaagaaccatgagctctagaatcaatgtgactttgtatgccacgaaatgcacccttgtacaatatttttattttcaatttgtgtacagctcatgaaatactgttgtgtacaactcatgaaatactgggctctccagagggtaaggactaaggagagactcacctttttaaatgcacccctttgaccaagtgacattcgatacattgtaagctccataagattgccgcacaattcaatttgtgtatatcaataacactatgtattaccaagttatgcaagtatta

SEQ ID NO: 57477 - DNA, 2519 bp, Zea Mays
tttgtgcgttcacatcttctctcctccctggcaactgcttccatcatctccatcaccgtccccacgttctcctccctccgcctctcgctctgcgcacatccccatgcccacgccgagcgcttgcgcctcaccacccccgtcgcagccgcggccgtggcggcgtcgacgacctcccccgactttcccgccgtgggcgccgtcctggggaagcccacagtgctcgtgggtagtggccgagaagatcggagccgcggggttcatgctgaaggaggtggtgcgatgtccagctcccaggtcgtcgtcctcacgctcctggagttttggtcagtgagatgttcgtcttcgtgctcagcctcgtcctcgagtcgtcgcgcaaacagcgagagcagcgtgggtctcatcatcaggatcacaccaacaggaaatgctaggcgatgaccacgcttggtcaccggatgatcaagaaacaattcaacaagactccaagagctggctggcaaatcgattgcttggaacagagggaatttgactctgtggtggttaaattgcagatatttacaaatgtatttcgtgtcgattatagccctccagatggctttggctttgaagttttagatgaaaatatcttgcctgtccaggatgacatgccgatgtttgactataatgttgaagaacaagttaatgattttgttgctgcagccatagaacaggatgcacgtaaaatagaatttttagtaggtaggaggagttccttagggctgttcacgaccagcttggaagacccaatggcaattgcccagcatcatgatgcggtctcaggtatagcaaaacaacacacgacagatgactactcgaaatgccttgctcttggagcatctaagaatgaaagcattaatggaataaacattgtgtcttgttatccattgcaatatacaacacttaagcccttggctgatagagtgattgtaaagattaactcttccgaggagaagacaactggtggaattttgcttccaacgactgctcagtctagacctcagggtggcaaggtagttgctattggaaaaggaatgataattggggacaataaagttgatgtcaacatttagtaataactataagctctctgtgagccaattcttgagatgatgtccaacatgctcatttaagttgtgcctaagttggtgtcagaaatacgtcaaggaaaaatgtcgaacaactcagaagataaattcaagaactggttgcttcaacaagagtctgtccatgaggatggcatgcaacattacttgcccttcgattgagataggtggctacggtgatgctttgttgaacctgatatacgcatctccatcaagccagttcgaagagctcagtttagaatgtgagctagatgctacaggcaatcattctagagtgaaggatgctcaagttcatggctcacctatacctgagagtaatggaagattatcgacaactgctcagactaaaatgatgtccacagtctcagaagatgcaattcttgttggctcatctttcagataccaaagtagcctaggtaacaacaataagagggttgggctttttgatatgggtgatggaagtagtgagcctgctgctgaggacaacaatcaaatgcatcaggtctatcatgggttttattctgcatacgataatacaactctactatatgagatcctgaagtctattaaatgggcaagaaaaacatatgtaaatcgacctgtaaatgttgttggacactccattggaggggatctagcttcattttgtgcccttgatctatttgacgttgagctcatgacttttggacagcctcggttaggcaatcctgcatttgttgtatgccttggctaacaagtcccaagaacaatccatgtgacccataaaaacgatattgtgccgcaattaccaccgtattattattacttaagtaaatggacataccaccacttcgctagagaggtttgacttcatgagagcatagatggaaatgtagttgccagaaatgagattgtatgtgatgattctggtgaggacccgacctatagcagaagtgggtcatgggatgagcgtagcagataatcttgagtactacagtgtcacactacatgttgactcaaggggaacctgtcagttcgtgattggtacagccaaccaagtatacaactacattcgtgaagttgatggatccatcatcttgttaagatatatatgcaagaaccatgagctctagaatcaatgtgactttgtatgccacgaaatgcacccttgtacaatatttttattttcaatttgtgtacagctcatgaaatactgttgtgtacaactcatgaaatactgggctctccagagggtaaggactaaggagagactcacctttttaaatgcacccctttgaccaagtgacattcgatacattgtaagctccataagattgccgcacaattcaatttgtgtatatcaataacactatgtattaccaagttatgcaagtatta

SEQ ID NO: 57478 - DNA, 4198 bp, Zea Mays
gttcacatcttctctcctccctggcaactgcttccatcatctccatcaccgtccccacgttctcctccctccgcctctcgctctgcgcacatccccatgcccacgccgagcgcttgcgcctcaccacccccgtcgcagccgcggccgtggcggcgtcgacgacctcccccgactttcccgccgtgggcgccgtcctggggaagcccacagtgctcgtgggtagtggccgagaagatcggagccgcggggttcatgctgaaggaggtggtgcgatgtccagctcccaggtcgtcgtcctcacgctcctggagttttggtcagtgagatgttcgtcttcgtgctcagcctcgtcctcgagtcgtcgcgcaaacagcgagagcagcgtgggtctcatcatcaggatcacaccaacaggaaatgctaggcgatggtgcatgcatgatgaagctgctgtccattatattgacatgattgatcagaccacgcttggtcaccggatgatcaagaaacaattcaacaagactccaagagctggctggcaaatcgattgcttggaacagagcttggcttcgattctttgcattttgcaagaatcgattaccaagataagaaaaggcgtaaagctggcaaaggcttgaggttatatggcgtggctcaagaactttcggttcatcttcacagatatttacaaatgtatttcgtgtcgattatagccctccagatggctttggctttgaagttttagatgaaaatatcttgcctgtccaggatgacatgccgatgtttgactataatgttgaagaacaagttaatgattttgttgctgcagccatagaacagaatcttggttccggaatatggacaaacttatctatcgcgtgaacaaggatgcacgtaaaatagaatttttagtaggtaggaggagttccttagggctgttcacgaccagcttggaagacccaatggcaattgcccagcatcatgatgcggtctcaggtatagcaaaacaacacacgacagatgactactcgaaatgccttgctcttggagcatctaagaatgaaagcattaatggtatatagttggatatttcattcagagaggctcaagtgatagctgcaagtagttctaccttgtgcccagttttcttgttcttttaggtcaatgaaagttcccatttttgtggcgttgcttagatggttggtcctttcctcaaaaaaaaaagatggttggtcctgttgactaccaaaatgacttgaacttttggtgcatggacaaatggactagaagctttcctgtaacgtggcacatcataagatgttggttgattctcctgaaagcagattttattttactttaaccaaaggagaaccaagttggctgtcgtctcccactgtggcactattttttgggttaaaagtataacaccatcgtgagttgaaactcttgagacatagagataaaaaccaataaaactcacatccgacgtgattagcatgaccattactcatcaaaaatagttgaaataaattcttcactccaatctaatccaaataccagatcttcataagaagagcatgccaatgacattgttttggcaatcagttcatggttacacgacactactatgacagacttattttgaaacatagaacaatgcttattcaacattattatacaatcaagatcctaactttttgggggggttgcaacaatggagagtggagacaacatggagacctgagctgagcttaacccgcaaaagatcatacaccattctgtgatgcttcacaaggttccgcacctcaaattttggtgaaactgccttgttgttgtcttcatatctagcgcactggcatcccatgtagactgcagtttttgtcaaaaatgattttttttgaataagtagacattatatccttcaagatttttatatggaaatcctaaattgtgggcatattgatttttactctatttcttaaatgtaaagttgtaaacttgaatcacctagaaggaaccgtgttaagaagaaataagcaactatgtcttttcttctggaaagataaaatgtgtttatatttgaaagctagaaacatagctttctattatgtcacatcagtctaaaccagaatttaatcattttttataatgcacgtgcaatgagataaaaccaaaacaccttataatttggaatagagacttaacattttgttggctgggacattgggctatattttgcagcctcctcacttggcacagataacttcatttgttttccagagactgtattaatactttgcaggaataaacattgtgtcttgttatccattgcaatatacaacacttaagcccttggctgatagagtgattgtaaagattaactcttccgaggagaagacaactggtggaattttgcttccaacgactgctcagtctagacctcagggtggcaagaaatacgtcaaggaaaaatgtcgaacaactcagaagataaattcaagaactggttgcttcaacaagagtctgtccatgaggatggcatgcaacattacttgcccttcgattgagataggtggctacggtgatgctttgttgaacctgatatacgcatctccatcaagccagttcgaagagctcagtttagaatgtgagctagatgctacaggcaatcattctagagtgaaggatgctcaagttcatggctcacctatacctgagagtaatggaagattatcgacaactgctcagactaaaatgatgtccacagtctcagaagatgcaattcttgttggctcatctttcagataccaaagtagcctaggtaacaacaataagagggttgggctttttgatatgggtgatggaagtagtgagcctgctgctgaggacaacaatcaaatgcatcagatttcacgatgctgatatgtgctaagcatggaaacagaattgttctcacatgtatagttggtctaagtgatggcaaaagattgacacttgtggagttttttctgtgccagacatggagtcccttggaaaaaccgaatggtctatcatgggttttattctgcatacgataatacaactctactatatgagatcctgaagtctattaaatgggcaagaaaaacatatgtaaatcgacctgtaaatgttgttggacactccattggaggggatctagcttcattttgtgcccttgatctatttgtaagtatttttaatgtacttgatttattataccaaatttcaatatatgctctacaaataacctgtacttgttttgtgataccatcacatgtattgttaatatatcagatggttggcttcattgatatctctacattttttacatatatcagatggttggcttcattgatatctctacattttttacatgttaaattcggatcataggacgttgagctcatgacttttggacagcctcggttaggcaatcctgcatttgttgtatgccttggctaacaagtcccaagaacaatccatgtgacccataaaaacgatattgtgccgcaattaccaccgtattattattacttaagtaaatggacataccaccacttcgctagagaggtttgacttcatgagagcatagatggaaatgtagttgccagaaatgagattgtatgtgatgattctggtgaggacccgacctatagcaggtacatatcagtctatctattttgtacatttatttcctatgtgtgtttcatattatttgtgttttctgaagaagtgggtcatgggatgagcgtagcagataatcttgagtactacagtgtcacactacatgttgactcaaggggaacctgtcagttcgtgattggtacagccaaccaagtatacaactacattcgtgaagttgatggatccatcatcttgttaagatatatatgcaagaaccatgagctctagaatcaatgtgactttgtatgccacgaaatgcacccttgtacaatatttttattttcaatttgtgtacagctcatgaaatactgttgtgtacaactcatgaaatactgggctctccagagggtaaggactaaggagagactcacctttttaaatgcacccctttgaccaagtgacattcgatacattgtaagctccataagattgccgcacaattcaatttgtgtatatcaataacactatgtattaccaagttatgcaagtatta

SEQ ID NO: 57479 - DNA, 1285 bp, Zea Mays
tccatcaccgtccccacgttctcctccctccgcctctcgctctgcgcacatccccatgcccacgccgagcgcttgcgcctcaccacccccgtcgcagccgcggccgtggcggcgtcgacgacctcccccgactttcccgccgtgggcgccgtcctggggaagcccacagtgctcgtgggtagtggccgagaagatcggagccgcggggttcatgctgaaggaggtggtgcgatgtccagctcccaggtcgtcgtcctcacgctcctggagttttggtcagtgagatgttcgtcttcgtgctcagcctcgtcctcgagtcgtcgcgcaaacagcgagagcagcgtgggtctcatcatcaggatcacaccaacaggaaatgctaggcgatggtgcatgcatgatgaagctgctgtccattatattgacatgattgatcagaccacgcttggtcaccggatgatcaagaaacaattcaacaagactccaagagctggctggcaaatcgattgcttggaacagagcttggcttcgattctttgcattttgcaagaatcgattaccaagataagaaaaggcgtaaagctggcaaaggcttgaggttatatggcgtggctcaagaactttcggttcatcttcacagatatttacaaatgtatttcgtgtcgattatagccctccagatggctttggctttgaagttttagatgaaaatatcttgcctgtccaggatgacatgccgatgtttgactataatgttgaagaacaagttaatgattttgttgctgcagccatagaacagaatcttggttccggaatatggacaaacttatctatcgcgtgaacaaggatgcacgtaaaatagaatttttagtaggtaggaggagttccttagggctgttcacgaccagcttggaagacccaatggcaattgcccagcatcatgatgcggtctcagaatgaaagcattaatggtatatagttggatatttcattcagagaggctcaagtgatagctgcaagtagttctaccttgtgcccagttttcttgttcttttaggtcaatgaaagttcccatttttgtggcgttgcttagatggttggtcctttcctcaaaaaaaaaagatggttggtcctgttgactaccaaaatgacttgaacttttggtgcatggacaaatggactagaagctttcctgtaacgtggcacatcataagatgttggttgattctcctgaaagcagattttattttactttaaccaaaggagaaccaagttggctgtcgtc

SEQ ID NO: 57480 - DNA, 1163 bp, Zea Mays
tccatcaccgtccccacgttctcctccctccgcctctcgctctgcgcacatccccatgcccacgccgagcgcttgcgcctcaccacccccgtcgcagccgcggccgtggcggcgtcgacgacctcccccgactttcccgccgtgggcgccgtcctggggaagcccacagtgctcgtgggtagtggccgagaagatcggagccgcggggttcatgctgaaggaggtggtgcgatgtccagctcccaggtcgtcgtcctcacgctcctggagttttggtcagtgagatgttcgtcttcgtgctcagcctcgtcctcgagtcgtcgcgcaaacagcgagagcagcgtgggtctcatcatcaggatcacaccaacaggaaatgctaggcgatgaccacgcttggtcaccggatgatcaagaaacaattcaacaagactccaagagctggctggcaaatcgattgcttggaacagagggaatttgactctgtggtggttaaattgcagatatttacaaatgtatttcgtgtcgattatagccctccagatggctttggctttgaagttttagatgaaaatatcttgcctgtccaggatgacatgccgatgtttgactataatgttgaagaacaagttaatgattttgttgctgcagccatagaacaggatgcacgtaaaatagaatttttagtaggtaggaggagttccttagggctgttcacgaccagcttggaagacccaatggcaattgcccagcatcatgatgcggtctcaggtatagcaaaacaacacacgacagatgactactcgaaatgccttgctcttggagcatctaagaatgaaagcattaatggtatatagttggatatttcattcagagaggctcaagtgatagctgcaagtagttctaccttgtgcccagttttcttgttcttttaggtcaatgaaagttcccatttttgtggcgttgcttagatggttggtcctttcctcaaaaaaaaaagatggttggtcctgttgactaccaaaatgacttgaacttttggtgcatggacaaatggactagaagctttcctgtaacgtggcacatcataagatgttggttgattctcctgaaagcagattttattttactttaaccaaaggagaaccaagttggctgtcgtc

SEQ ID NO: 57481 - DNA, 1352 bp, Zea Mays
tccatcaccgtccccacgttctcctccctccgcctctcgctctgcgcacatccccatgcccacgccgagcgcttgcgcctcaccacccccgtcgcagccgcggccgtggcggcgtcgacgacctcccccgactttcccgccgtgggcgccgtcctggggaagcccacagtgctcgtgggtagtggccgagaagatcggagccgcggggttcatgctgaaggaggtggtgcgatgtccagctcccaggtcgtcgtcctcacgctcctggagttttggtcagtgagatgttcgtcttcgtgctcagcctcgtcctcgagtcgtcgcgcaaacagcgagagcagcgtgggtctcatcatcaggatcacaccaacagggacggagatctgtcgtcgaagaccacctgactgtttctcatggcaggcttgcttgcactagcttggcacaataagccacttcaggcttcagtcggttatgtgatcaccggaacattatgggctctagagtaggacttttgagaaatgctaggcgatgaccacgcttggtcaccggatgatcaagaaacaattcaacaagactccaagagctggctggcaaatcgattgcttggaacagagggaatttgactctgtggtggttaaattgcagatatttacaaatgtatttcgtgtcgattatagccctccagatggctttggctttgaagttttagatgaaaatatcttgcctgtccaggatgacatgccgatgtttgactataatgttgaagaacaagttaatgattttgttgctgcagccatagaacagaatcttggttccggaatatggacaaacttatctatcgcgtgaacaaggatgcacgtaaaatagaatttttagtaggtaggaggagttccttagggctgttcacgaccagcttggaagacccaatggcaattgcccagcatcatgatgcggtctcaggtatagcaaaacaacacacgacagatgactactcgaaatgccttgctcttggagcatctaagaatgaaagcattaatggtatatagttggatatttcattcagagaggctcaagtgatagctgcaagtagttctaccttgtgcccagttttcttgttcttttaggtcaatgaaagttcccatttttgtggcgttgcttagatggttggtcctttcctcaaaaaaaaaagatggttggtcctgttgactaccaaaatgacttgaacttttggtgcatggacaaatggactagaagctttcctgtaacgtggcacatcataagatgttggttgattctcctgaaagcagattttattttactttaaccaaaggagaaccaagttggctgtcgtc

SEQ ID NO: 57482 - DNA, 1902 bp, Zea Mays
tccatcaccgtccccacgttctcctccctccgcctctcgctctgcgcacatccccatgcccacgccgagcgcttgcgcctcaccacccccgtcgcagccgcggccgtggcggcgtcgacgacctcccccgactttcccgccgtgggcgccgtcctggggaagcccacagtgctcgtgggtagtggccgagaagatcggagccgcggggttcatgctgaaggaggtggtgcgatgtccagctcccaggtcgtcgtcctcacgctcctggagttttggtcagtgagatgttcgtcttcgtgctcagcctcgtcctcgagtcgtcgcgcaaacagcgagagcagcgtgggtctcatcatcaggatcacaccaacagggacggagatctgtcgtcgaagaccacctgactgtttctcatggcaggcttgcttgcactagcttggcacaataagccacttcaggcttcagtcggttatgtgatcaccggaacattatgggctctagagtaggacttttgagaaatgctaggcgatggtgcatgcatgatgaagctgctgtccattatattgacatgattgatcagaccacgcttggtcaccggatgatcaagaaacaattcaacaagactccaagagctggctggcaaatcgattgcttggaacagagcttggcttcgattctttgcattttgcaagaatcgattaccaagataagaaaaggcgtaaagctggcaaaggcttgaggttatatggcgtggctcaagaactttcggttcatcttcacagatatttacaaatgtatttcgtgtcgattatagccctccagatggctttggctttgaagttttagatgaaaatatcttgcctgtccaggatgacatgccgatgtttgactataatgttgaagaacaagttaatgattttgttgctgcagccatagaacagaatcttggttccggaatatggacaaacttatctatcgcgtgaacaaggatgcacgtaaaatagaatttttagtaggtaggaggagttccttagggctgttcacgaccagcttggaagacccaatggcaattgcccagcatcatgatgcggtctcaggtatagcaaaacaacacacgacagatgactactcgaaatgccttgctcttggagcatctaagaatgaaagcattaatggaataaacattgtgtcttgttatccattgcaatatacaacacttaagcccttggctgatagagtgattgtaaagattaactcttccgaggagaagacaactggtggaattttgcttccaacgactgctcagtctagacctcagggtggcaagaaatacgtcaaggaaaaatgtcgaacaactcagaagataaattcaagaactggttgcttcaacaagagtctgtccatgaggatggcatgcaacattacttgcccttcgattgagataggtggctacggtgatgctttgttgaacctgatatacgcatctccatcaagccagttcgaagagctcagtttagaatgtgagctagatgctacaggcaatcattctagagtgaaggatgctcaagttcatggctcacctatacctgagagtaatggaagattatcgacaactgctcagactaaaatgatgtccacagtctcagaagatgcaattcttgttggctcatctttcagataccaaagtagcctaggtaacaacaataagagggttgggctttttgatatgggtgatggaagtagtgagcctgctgctgaggacaacaatcaaatgcatcagatttcacgatgctgatatgtgctaagcatggaaacagaattgttctcacatgtatagttggtctaagtgatggcaaaagattgacacttgtggagttttttctgtgccagacatggagtccc

SEQ ID NO: 57483 - DNA, 2604 bp, Zea Mays
tccatcaccgtccccacgttctcctccctccgcctctcgctctgcgcacatccccatgcccacgccgagcgcttgcgcctcaccacccccgtcgcagccgcggccgtggcggcgtcgacgacctcccccgactttcccgccgtgggcgccgtcctggggaagcccacagtgctcgtgggtagtggccgagaagatcggagccgcggggttcatgctgaaggaggtggtgcgatgtccagctcccaggtcgtcgtcctcacgctcctggagttttggtcagtgagatgttcgtcttcgtgctcagcctcgtcctcgagtcgtcgcgcaaacagcgagagcagcgtgggtctcatcatcaggatcacaccaacaggaaatgctaggcgatggtgcatgcatgatgaagctgctgtccattatattgacatgattgatcagaccacgcttggtcaccggatgatcaagaaacaattcaacaagactccaagagctggctggcaaatcgattgcttggaacagagcttggcttcgattctttgcattttgcaagaatcgattaccaagataagaaaaggcgtaaagctggcaaaggcttgaggttatatggcgtggctcaagaactttcggttcatcttcacagatatttacaaatgtatttcgtgtcgattatagccctccagatggctttggctttgaagttttagatgaaaatatcttgcctgtccaggatgacatgccgatgtttgactataatgttgaagaacaagttaatgattttgttgctgcagccatagaacaggatgcacgtaaaatagaatttttagtaggtaggaggagttccttagggctgttcacgaccagcttggaagacccaatggcaattgcccagcatcatgatgcggtctcaggtatagcaaaacaacacacgacagatgactactcgaaatgccttgctcttggagcatctaagaatgaaagcattaatggaataaacattgtgtcttgttatccattgcaatatacaacacttaagcccttggctgatagagtgattgtaaagattaactcttccgaggagaagacaactggtggaattttgcttccaacgactgctcagtctagacctcagggtggcaagaaatacgtcaaggaaaaatgtcgaacaactcagaagataaattcaagaactggttgcttcaacaagagtctgtccatgaggatggcatgcaacattacttgcccttcgattgagataggtggctacggtgatgctttgttgaacctgatatacgcatctccatcaagccagttcgaagagctcagtttagaatgtgagctagatgctacaggcaatcattctagagtgaaggatgctcaagttcatggctcacctatacctgagagtaatggaagattatcgacaactgctcagactaaaatgatgtccacagtctcagaagatgcaattcttgttggctcatctttcagataccaaagtagcctaggtaacaacaataagagggttgggctttttgatatgggtgatggaagtagtgagcctgctgctgaggacaacaatcaaatgcatcagatttcacgatgctgatatgtgctaagcatggaaacagaattgttctcacatgtatagttggtctaagtgatggcaaaagattgacacttgtggagttttttctgtgccagacatggagtcccttggaaaaaccgaatggtctatcatgggttttattctgcatacgataatacaactctactatatgagatcctgaagtctattaaatgggcaagaaaaacatatgtaaatcgacctgtaaatgttgttggacactccattggaggggatctagcttcattttgtgcccttgatctatttgacgttgagctcatgacttttggacagcctcggttaggcaatcctgcatttgttgtatgccttggctaacaagtcccaagaacaatccatgtgacccataaaaacgatattgtgccgcaattaccaccgtattattattacttaagtaaatggacataccaccacttcgctagagaggtttgacttcatgagagcatagatggaaatgtagttgccagaaatgagattgtatgtgatgattctggtgaggacccgacctatagcagaagtgggtcatgggatgagcgtagcagataatcttgagtactacagtgtcacactacatgttgactcaaggggaacctgtcagttcgtgattggtacagccaaccaagtatacaactacattcgtgaagttgatggatccatcatcttgttaagatatatatgcaagaaccatgagctctagaatcaatgtgactttgtatgccacgaaatgcacccttgtacaatatttttattttcaatttgtgtacagctcatgaaatactgttgtgtacaactcatgaaatactgggctctccagagggtaaggactaaggagagactcacctttttaaatgcacccctttgaccaagtgacattcgatacattgtaagctccataagattgccgcacaattcaatttgtgtatatcaataacactatgtattaccaagttatgcaagtatta

SEQ ID NO: 57484 - DNA, 3113 bp, Zea Mays
tccatcaccgtccccacgttctcctccctccgcctctcgctctgcgcacatccccatgcccacgccgagcgcttgcgcctcaccacccccgtcgcagccgcggccgtggcggcgtcgacgacctcccccgactttcccgccgtgggcgccgtcctggggaagcccacagtgctcgtgggtagtggccgagaagatcggagccgcggggttcatgctgaaggaggtggtgcgatgtccagctcccaggtcgtcgtcctcacgctcctggagttttggtcagtgagatgttcgtcttcgtgctcagcctcgtcctcgagtcgtcgcgcaaacagcgagagcagcgtgggtctcatcatcaggatcacaccaacaggaaatgctaggcgatgaccacgcttggtcaccggatgatcaagaaacaattcaacaagactccaagagctggctggcaaatcgattgcttggaacagagggaatttgactctgtggtggttaaattgcagatatttacaaatgtatttcgtgtcgattatagccctccagatggctttggctttgaagttttagatgaaaatatcttgcctgtccaggatgacatgccgatgtttgactataatgttgaagaacaagttaatgattttgttgctgcagccatagaacagaatcttggttccggaatatggacaaacttatctatcgcgtgaacaaggatgcacgtaaaatagaatttttagtaggtaggaggagttccttagggctgttcacgaccagcttggaagacccaatggcaattgcccagcatcatgatgcggtctcaggtatagcaaaacaacacacgacagatgactactcgaaatgccttgctcttggagcatctaagaatgaaagcattaatggtatatagttggatatttcattcagagaggctcaagtgatagctgcaagtagttctaccttgtgcccagttttcttgttcttttagcctcctcacttggcacagataacttcatttgttttccagagactgtattaatactttgcaggaataaacattgtgtcttgttatccattgcaatatacaacacttaagcccttggctgatagagtgattgtaaagattaactcttccgaggagaagacaactggtggaattttgcttccaacgactgctcagtctagacctcagggtggcaaggtagttgctattggaaaaggaatgataattggggacaataaagttgatgtcaacatttagtaataactataagctctctgtgagccaattcttgagatgatgtccaacatgctcatttaagttgtgcctaagttggtgtcagaaatacgtcaaggaaaaatgtcgaacaactcagaagataaattcaagaactggttgcttcaacaagagtctgtccatgaggatggcatgcaacattacttgcccttcgattgagataggtggctacggtgatgctttgttgaacctgatatacgcatctccatcaagccagttcgaagagctcagtttagaatgtgagctagatgctacaggcaatcattctagagtgaaggatgctcaagttcatggctcacctatacctgagagtaatggaagattatcgacaactgctcagactaaaatgatgtccacagtctcagaagatgcaattcttgttggctcatctttcagataccaaagtagcctaggtaacaacaataagagggttgggctttttgatatgggtgatggaagtagtgagcctgctgctgaggacaacaatcaaatgcatcagatttcacgatgctgatatgtgctaagcatggaaacagaattgttctcacatgtatagttggtctaagtgatggcaaaagattgacacttgtggagttttttctgtgccagacatggagtcccttggaaaaaccgaatggtttgggatagcatatatgcatctttgaatatttcactctttactatcatttttcctgtgccagacttgtgtttgcctgttgcttgtctgtctaatgttgcaggtctatcatgggttttattctgcatacgataatacaactctactatatgagatcctgaagtctattaaatgggcaagaaaaacatatgtaaatcgacctgtaaatgttgttggacactccattggaggggatctagcttcattttgtgcccttgatctatttgtaagtatttttaatgtacttgatttattataccaaatttcaatatatgctctacaaataacctgtacttgttttgtgataccatcacatgtattgttaatatatcagatggttggcttcattgatatctctacattttttacatatatcagatggttggcttcattgatatctctacattttttacatgttaaattcggatcataggacgttgagctcatgacttttggacagcctcggttaggcaatcctgcatttgttgtatgccttggctaacaagtcccaagaacaatccatgtgacccataaaaacgatattgtgccgcaattaccaccgtattattattacttaagtaaatggacataccaccacttcgctagagaggtttgacttcatgagagcatagatggaaatgtagttgccagaaatgagattgtatgtgatgattctggtgaggacccgacctatagcagaagtgggtcatgggatgagcgtagcagataatcttgagtactacagtgtcacactacatgttgactcaaggggaacctgtcagttcgtgattggtacagccaaccaagtatacaactacattcgtgaagttgatggatccatcatcttgttaagatatatatgcaagaaccatgagctctagaatcaatgtgactttgtatgccacgaaatgcacccttgtacaatatttttattttcaatttgtgtacagctcatgaaatactgttgtgtacaactcatgaaatactgggctctccagagggtaaggactaaggagagactcacctttttaaatgcacccctttgaccaagtgacattcgatacattgtaagctccataagattgccgcacaattcaatttgtgtatatcaataacactatgtattaccaagttatgcaagtatta

SEQ ID NO: 57485 - DNA, 3056 bp, Zea Mays
tccatcaccgtccccacgttctcctccctccgcctctcgctctgcgcacatccccatgcccacgccgagcgcttgcgcctcaccacccccgtcgcagccgcggccgtggcggcgtcgacgacctcccccgactttcccgccgtgggcgccgtcctggggaagcccacagtgctcgtgggtagtggccgagaagatcggagccgcggggttcatgctgaaggaggtggtgcgatgtccagctcccaggtcgtcgtcctcacgctcctggagttttggtcagtgagatgttcgtcttcgtgctcagcctcgtcctcgagtcgtcgcgcaaacagcgagagcagcgtgggtctcatcatcaggatcacaccaacaggaaatgctaggcgatggtgcatgcatgatgaagctgctgtccattatattgacatgattgatcagaccacgcttggtcaccggatgatcaagaaacaattcaacaagactccaagagctggctggcaaatcgattgcttggaacagagcttggcttcgattctttgcattttgcaagaatcgattaccaagataagaaaaggcgtaaagctggcaaaggcttgaggttatatggcgtggctcaagaactttcggttcatcttcacagatatttacaaatgtatttcgtgtcgattatagccctccagatggctttggctttgaagttttagatgaaaatatcttgcctgtccaggatgacatgccgatgtttgactataatgttgaagaacaagttaatgattttgttgctgcagccatagaacaggatgcacgtaaaatagaatttttagtaggtaggaggagttccttagggctgttcacgaccagcttggaagacccaatggcaattgcccagcatcatgatgcggtctcaggtatagcaaaacaacacacgacagatgactactcgaaatgccttgctcttggagcatctaagaatgaaagcattaatggaataaacattgtgtcttgttatccattgcaatatacaacacttaagcccttggctgatagagtgattgtaaagattaactcttccgaggagaagacaactggtggaattttgcttccaacgactgctcagtctagacctcagggtggcaaggtagttgctattggaaaaggaatgataattggggacaataaagttgatgtcaacatttagtaataactataagctctctgtgagccaattcttgagatgatgtccaacatgctcatttaagttgtgcctaagttggtgtcagaaatacgtcaaggaaaaatgtcgaacaactcagaagataaattcaagaactggttgcttcaacaagagtctgtccatgaggatggcatgcaacattacttgcccttcgattgagataggtggctacggtgatgctttgttgaacctgatatacgcatctccatcaagccagttcgaagagctcagtttagaatgtgagctagatgctacaggcaatcattctagagtgaaggatgctcaagttcatggctcacctatacctgagagtaatggaagattatcgacaactgctcagactaaaatgatgtccacagtctcagaagatgcaattcttgttggctcatctttcagataccaaagtagcctaggtaacaacaataagagggttgggctttttgatatgggtgatggaagtagtgagcctgctgctgaggacaacaatcaaatgcatcagatttcacgatgctgatatgtgctaagcatggaaacagaattgttctcacatgtatagttggtctaagtgatggcaaaagattgacacttgtggagttttttctgtgccagacatggagtcccttggaaaaaccgaatggtttgggatagcatatatgcatctttgaatatttcactctttactatcatttttcctgtgccagacttgtgtttgcctgttgcttgtctgtctaatgttgcaggtctatcatgggttttattctgcatacgataatacaactctactatatgagatcctgaagtctattaaatgggcaagaaaaacatatgtaaatcgacctgtaaatgttgttggacactccattggaggggatctagcttcattttgtgcccttgatctatttgtaagtatttttaatgtacttgatttattataccaaatttcaatatatgctctacaaataacctgtacttgttttgtgataccatcacatgtattgttaatatatcagatggttggcttcattgatatctctacattttttacatatatcagatggttggcttcattgatatctctacattttttacatgttaaattcggatcataggacgttgagctcatgacttttggacagcctcggttaggcaatcctgcatttgttgtatgccttggctaacaagtcccaagaacaatccatgtgacccataaaaacgatattgtgccgcaattaccaccgtattattattacttaagtaaatggacataccaccacttcgctagagaggtttgacttcatgagagcatagatggaaatgtagttgccagaaatgagattgtatgtgatgattctggtgaggacccgacctatagcagaagtgggtcatgggatgagcgtagcagataatcttgagtactacagtgtcacactacatgttgactcaaggggaacctgtcagttcgtgattggtacagccaaccaagtatacaactacattcgtgaagttgatggatccatcatcttgttaagatatatatgcaagaaccatgagctctagaatcaatgtgactttgtatgccacgaaatgcacccttgtacaatatttttattttcaatttgtgtacagctcatgaaatactgttgtgtacaactcatgaaatactgggctctccagagggtaaggactaaggagagactcacctttttaaatgcacccctttgaccaagtgacattcgatacattgtaagctccataagattgccgcacaattcaatttgtgtatatcaataacactatgtattaccaagttatgcaagtatta

SEQ ID NO: 57486 - DNA, 3179 bp, Zea Mays
tccatcaccgtccccacgttctcctccctccgcctctcgctctgcgcacatccccatgcccacgccgagcgcttgcgcctcaccacccccgtcgcagccgcggccgtggcggcgtcgacgacctcccccgactttcccgccgtgggcgccgtcctggggaagcccacagtgctcgtgggtagtggccgagaagatcggagccgcggggttcatgctgaaggaggtggtgcgatgtccagctcccaggtcgtcgtcctcacgctcctggagttttggtcagtgagatgttcgtcttcgtgctcagcctcgtcctcgagtcgtcgcgcaaacagcgagagcagcgtgggtctcatcatcaggatcacaccaacagggacggagatctgtcgtcgaagaccacctgactgtttctcatggcaggcttgcttgcactagcttggcacaataagccacttcaggcttcagtcggttatgtgatcaccggaacattatgggctctagagtaggacttttgagaaatgctaggcgatggtgcatgcatgatgaagctgctgtccattatattgacatgattgatcagaccacgcttggtcaccggatgatcaagaaacaattcaacaagactccaagagctggctggcaaatcgattgcttggaacagagcttggcttcgattctttgcattttgcaagaatcgattaccaagataagaaaaggcgtaaagctggcaaaggcttgaggttatatggcgtggctcaagaactttcggttcatcttcacagatatttacaaatgtatttcgtgtcgattatagccctccagatggctttggctttgaagttttagatgaaaatatcttgcctgtccaggatgacatgccgatgtttgactataatgttgaagaacaagttaatgattttgttgctgcagccatagaacagaatcttggttccggaatatggacaaacttatctatcgcgtgaacaaggatgcacgtaaaatagaatttttagtaggtaggaggagttccttagggctgttcacgaccagcttggaagacccaatggcaattgcccagcatcatgatgcggtctcaggtatagcaaaacaacacacgacagatgactactcgaaatgccttgctcttggagcatctaagaatgaaagcattaatggtatatagttggatatttcattcagagaggctcaagtgatagctgcaagtagttctaccttgtgcccagttttcttgttcttttaggaataaacattgtgtcttgttatccattgcaatatacaacacttaagcccttggctgatagagtgattgtaaagattaactcttccgaggagaagacaactggtggaattttgcttccaacgactgctcagtctagacctcagggtggcaaggtagttgctattggaaaaggaatgataattggggacaataaagttgatgtcaacatttagtaataactataagctctctgtgagccaattcttgagatgatgtccaacatgctcatttaagttgtgcctaagttggtgtcagaaatacgtcaaggaaaaatgtcgaacaactcagaagataaattcaagaactggttgcttcaacaagagtctgtccatgaggatggcatgcaacattacttgcccttcgattgagataggtggctacggtgatgctttgttgaacctgatatacgcatctccatcaagccagttcgaagagctcagtttagaatgtgagctagatgctacaggcaatcattctagagtgaaggatgctcaagttcatggctcacctatacctgagagtaatggaagattatcgacaactgctcagactaaaatgatgtccacagtctcagaagatgcaattcttgttggctcatctttcagataccaaagtagcctaggtaacaacaataagagggttgggctttttgatatgggtgatggaagtagtgagcctgctgctgaggacaacaatcaaatgcatcagatttcacgatgctgatatgtgctaagcatggaaacagaattgttctcacatgtatagttggtctaagtgatggcaaaagattgacacttgtggagttttttctgtgccagacatggagtcccttggaaaaaccgaatggtttgggatagcatatatgcatctttgaatatttcactctttactatcatttttcctgtgccagacttgtgtttgcctgttgcttgtctgtctaatgttgcaggtctatcatgggttttattctgcatacgataatacaactctactatatgagatcctgaagtctattaaatgggcaagaaaaacatatgtaaatcgacctgtaaatgttgttggacactccattggaggggatctagcttcattttgtgcccttgatctatttatggttggcttcattgatatctctacattttttacatgttaaattcggatcataggacgttgagctcatgacttttggacagcctcggttaggcaatcctgcatttgttgtatgccttggctaacaagtcccaagaacaatccatgtgacccataaaaacgatattgtgccgcaattaccaccgtattattattacttaagtaaatggacataccaccacttcgctagagaggtttgacttcatgagagcatagatggaaatgtagttgccagaaatgagattgtatgtgatgattctggtgaggacccgacctatagcagaagtgggtcatgggatgagcgtagcagataatcttgagtactacagtgtcacactacatgttgactcaaggggaacctgtcagttcgtgattggtacagccaaccaagtatacaactacattcgtgaagttgatggatccatcatcttgttaagatatatatgcaagaaccatgagctctagaatcaatgtgactttgtatgccacgaaatgcacccttgtacaatatttttattttcaatttgtgtacagctcatgaaatactgttgtgtacaactcatgaaatactgggctctccagagggtaaggactaaggagagactcacctttttaaatgcacccctttgaccaagtgacattcgatacattgtaagctccataagattgccgcacaattcaatttgtgtatatcaataacactatgtattaccaagttatgcaagtatta

SEQ ID NO: 57487 - DNA, 3023 bp, Zea Mays
tccatcaccgtccccacgttctcctccctccgcctctcgctctgcgcacatccccatgcccacgccgagcgcttgcgcctcaccacccccgtcgcagccgcggccgtggcggcgtcgacgacctcccccgactttcccgccgtgggcgccgtcctggggaagcccacagtgctcgtgggtagtggccgagaagatcggagccgcggggttcatgctgaaggaggtggtgcgatgtccagctcccaggtcgtcgtcctcacgctcctggagttttggtcagtgagatgttcgtcttcgtgctcagcctcgtcctcgagtcgtcgcgcaaacagcgagagcagcgtgggtctcatcatcaggatcacaccaacagggacggagatctgtcgtcgaagaccacctgactgtttctcatggcaggcttgcttgcactagcttggcacaataagccacttcaggcttcagtcggttatgtgatcaccggaacattatgggctctagagtaggacttttgagaaatgctaggcgatggtgcatgcatgatgaagctgctgtccattatattgacatgattgatcagaccacgcttggtcaccggatgatcaagaaacaattcaacaagactccaagagctggctggcaaatcgattgcttggaacagagcttggcttcgattctttgcattttgcaagaatcgattaccaagataagaaaaggcgtaaagctggcaaaggcttgaggttatatggcgtggctcaagaactttcggttcatcttcacagatatttacaaatgtatttcgtgtcgattatagccctccagatggctttggctttgaagttttagatgaaaatatcttgcctgtccaggatgacatgccgatgtttgactataatgttgaagaacaagttaatgattttgttgctgcagccatagaacagaatcttggttccggaatatggacaaacttatctatcgcgtgaacaaggatgcacgtaaaatagaatttttagtaggtaggaggagttccttagggctgttcacgaccagcttggaagacccaatggcaattgcccagcatcatgatgcggtctcaggtatagcaaaacaacacacgacagatgactactcgaaatgccttgctcttggagcatctaagaatgaaagcattaatggtatatagttggatatttcattcagagaggctcaagtgatagctgcaagtagttctaccttgtgcccagttttcttgttcttttagattaactcttccgaggagaagacaactggtggaattttgcttccaacgactgctcagtctagacctcagggtggcaaggtagttgctattggaaaaggaatgataattggggacaataaagttgatgtcaacatttagaaatacgtcaaggaaaaatgtcgaacaactcagaagataaattcaagaactggttgcttcaacaagagtctgtccatgaggatggcatgcaacattacttgcccttcgattgagataggtggctacggtgatgctttgttgaacctgatatacgcatctccatcaagccagttcgaagagctcagtttagaatgtgagctagatgctacaggcaatcattctagagtgaaggatgctcaagttcatggctcacctatacctgagagtaatggaagattatcgacaactgctcagactaaaatgatgtccacagtctcagaagatgcaattcttgttggctcatctttcagataccaaagtagcctaggtaacaacaataagagggttgggctttttgatatgggtgatggaagtagtgagcctgctgctgaggacaacaatcaaatgcatcagatttcacgatgctgatatgtgctaagcatggaaacagaattgttctcacatgtatagttggtctaagtgatggcaaaagattgacacttgtggagttttttctgtgccagacatggagtcccttggaaaaaccgaatggtttgggatagcatatatgcatctttgaatatttcactctttactatcatttttcctgtgccagacttgtgtttgcctgttgcttgtctgtctaatgttgcaggtctatcatgggttttattctgcatacgataatacaactctactatatgagatcctgaagtctattaaatgggcaagaaaaacatatgtaaatcgacctgtaaatgttgttggacactccattggaggggatctagcttcattttgtgcccttgatctatttatggttggcttcattgatatctctacattttttacatgttaaattcggatcataggacgttgagctcatgacttttggacagcctcggttaggcaatcctgcatttgttgtatgccttggctaacaagtcccaagaacaatccatgtgacccataaaaacgatattgtgccgcaattaccaccgtattattattacttaagtaaatggacataccaccacttcgctagagaggtttgacttcatgagagcatagatggaaatgtagttgccagaaatgagattgtatgtgatgattctggtgaggacccgacctatagcagaagtgggtcatgggatgagcgtagcagataatcttgagtactacagtgtcacactacatgttgactcaaggggaacctgtcagttcgtgattggtacagccaaccaagtatacaactacattcgtgaagttgatggatccatcatcttgttaagatatatatgcaagaaccatgagctctagaatcaatgtgactttgtatgccacgaaatgcacccttgtacaatatttttattttcaatttgtgtacagctcatgaaatactgttgtgtacaactcatgaaatactgggctctccagagggtaaggactaaggagagactcacctttttaaatgcacccctttgaccaagtgacattcgatacattgtaagctccataagattgccgcacaattcaatttgtgtatatcaataacactatgtattaccaagttatgcaagtatta

SEQ ID NO: 57488 - DNA, 3250 bp, Zea Mays
gtcagtaaaatatgatgattatttcccgatgcacgtaaaatagaatttttagtaggtaggaggagttccttagggctgttcacgaccagcttggaagacccaatggcaattgcccagcatcatgatgcggtctcaggtatagcaaaacaacacacgacagatgactactcgaaatgccttgctcttggagcatctaagaatgaaagcattaatggtatatagttggatatttcattcagagaggctcaagtgatagctgcaagtagttctaccttgtgcccagttttcttgttcttttaggtcaatgaaagttcccatttttgtggcgttgcttagatggttggtcctttcctcaaaaaaaaaagatggttggtcctgttgactaccaaaatgacttgaacttttggtgcatggacaaatggactagaagctttcctgtaacgtggcacatcataagatgttggttgattctcctgaaagcagattttattttactttaaccaaaggagaaccaagttggctgtcgtctcccactgtggcactattttttgggttaaaagtataacaccatcgtgagttgaaactcttgagacatagagataaaaaccaataaaactcacatccgacgtgattagcatgaccattactcatcaaaaatagttgaaataaattcttcactccaatctaatccaaataccagatcttcataagaagagcatgccaatgacattgttttggcaatcagttcatggttacacgacactactatgacagacttattttgaaacatagaacaatgcttattcaacattattatacaatcaagatcctaactttttgggggggttgcaacaatggagagtggagacaacatggagacctgagctgagcttaacccgcaaaagatcatacaccattctgtgatgcttcacaaggttccgcacctcaaattttggtgaaactgccttgttgttgtcttcatatctagcgcactggcatcccatgtagactgcagtttttgtcaaaaatgattttttttgaataagtagacattatatccttcaagatttttatatggaaatcctaaattgtgggcatattgatttttactctatttcttaaatgtaaagttgtaaacttgaatcacctagaaggaaccgtgttaagaagaaataagcaactatgtcttttcttctggaaagataaaatgtgtttatatttgaaagctagaaacatagctttctattatgtcacatcagtctaaaccagaatttaatcattttttataatgcacgtgcaatgagataaaaccaaaacaccttataatttggaatagagacttaacattttgttggctgggacattgggctatattttgcagcctcctcacttggcacagataacttcatttgttttccagagactgtattaatactttgcaggaataaacattgtgtcttgttatccattgcaatatacaacacttaagcccttggctgatagagtgattgtaaagattaactcttccgaggagaagacaactggtggaattttgcttccaacgactgctcagtctagacctcagggtggcaaggtagttgctattggaaaaggaatgataattggggacaataaagttgatgtcaacatttagtaataactataagctctctgtgagccaattcttgagatgatgtccaacatgctcatttaagttgtgcctaagttggtgtcagaaatacgtcaaggaaaaatgtcgaacaactcagaagataaattcaagaactggttgcttcaacaagagtctgtccatgaggatggcatgcaacattacttgcccttcgattgagataggtggctacggtgatgctttgttgaacctgatatacgcatctccatcaagccagttcgaagagctcagtttagaatgtgagctagatgctacaggcaatcattctagagtgaaggatgctcaagttcatggctcacctatacctgagagtaatggaagattatcgacaactgctcagactaaaatgatgtccacagtctcagaagatgcaattcttgttggctcatctttcaggtggaagcgcaagctgacttattttattaccatgaagcctgaagatgtataccaaagtagcctaggtaacaacaataagagggttgggctttttgatatgggtgatggaagtagtgagcctgctgctgaggacaacaatcaaatgcatcagatttcacgatgctgatatgtgctaagcatggaaacagaattgttctcacatgtatagttggtctaagtgatggcaaaagattgacacttgtggagttttttctgtgccagacatggagtcccttggaaaaaccgaatggtctatcatgggttttattctgcatacgataatacaactctactatatgagatcctgaagtctattaaatgggcaagaaaaacatatgtaaatcgacctgtaaatgttgttggacactccattggaggggatctagcttcattttgtgcccttgatctatttgacgttgagctcatgacttttggacagcctcggttaggcaatcctgcatttgttgtatgccttggctaacaagtcccaagaacaatccatgtgacccataaaaacgatattgtgccgcaattaccaccgtattattattacttaagtaaatggacataccaccacttcgctagagaggtttgacttcatgagagcatagatggaaatgtagttgccagaaatgagattgtatgtgatgattctggtgaggacccgacctatagcagaagtgggtcatgggatgagcgtagcagataatcttgagtactacagtgtcacactacatgttgactcaaggggaacctgtcagttcgtgattggtacagccaaccaagtatacaactacattcgtgaagttgatggatccatcatcttgttaagatatatatgcaagaaccatgagctctagaatcaatgtgactttgtatgccacgaaatgcacccttgtacaatatttttattttcaatttgtgtacagctcatgaaatactgttgtgtacaactcatgaaatactgggctctccagagggtaaggactaaggagagactcacctttttaaatgcacccctttgaccaagtgacattcgatacattgtaagctccataagattgccgcacaattcaatttgtgtatatcaataacactatgtattaccaagttatgcaagtatta

SEQ ID NO: 57489 - DNA, 2280 bp, Zea Mays
caacaatggagagtggagacaacatggagacctgagctgagcttaacccgcaaaagatcatacaccattctgtgatgcttcacaaggttccgcacctcaaattttggtgaaactgccttgttgttgtcttcatatctagcgcactggcatcccatgtagactgcagtttttgtcaaaaatgattttttttgaataagtagacattatatccttcaagatttttatatggaaatcctaaattgtgggcatattgatttttactctatttcttaaatgtaaagttgtaaacttgaatcacctagaaggaaccgtgttaagaagaaataagcaactatgtcttttcttctggaaagataaaatgtgtttatatttgaaagctagaaacatagctttctattatgtcacatcagtctaaaccagaatttaatcattttttataatgcacgtgcaatgagataaaaccaaaacaccttataatttggaatagagacttaacattttgttggctgggacattgggctatattttgcagcctcctcacttggcacagataacttcatttgttttccagagactgtattaatactttgcaggaataaacattgtgtcttgttatccattgcaatatacaacacttaagcccttggctgatagagtgattgtaaagattaactcttccgaggagaagacaactggtggaattttgcttccaacgactgctcagtctagacctcagggtggcaagaaatacgtcaaggaaaaatgtcgaacaactcagaagataaattcaagaactggttgcttcaacaagagtctgtccatgaggatggcatgcaacattacttgcccttcgattgagataggtggctacggtgatgctttgttgaacctgatatacgcatctccatcaagccagttcgaagagctcagtttagaatgtgagctagatgctacaggcaatcattctagagtgaaggatgctcaagttcatggctcacctatacctgagagtaatggaagattatcgacaactgctcagactaaaatgatgtccacagtctcagaagatgcaattcttgttggctcatctttcagataccaaagtagcctaggtaacaacaataagagggttgggctttttgatatgggtgatggaagtagtgagcctgctgctgaggacaacaatcaaatgcatcaggtctatcatgggttttattctgcatacgataatacaactctactatatgagatcctgaagtctattaaatgggcaagaaaaacatatgtaaatcgacctgtaaatgttgttggacactccattggaggggatctagcttcattttgtgcccttgatctatttgtaagtatttttaatgtacttgatttattataccaaatttcaatatatgctctacaaataacctgtacttgttttgtgataccatcacatgtattgttaatatatcagatggttggcttcattgatatctctacattttttacatatatcagatggttggcttcattgatatctctacattttttacatgttaaattcggatcataggacgttgagctcatgacttttggacagcctcggttaggcaatcctgcatttgttgtatgccttggctaacaagtcccaagaacaatccatgtgacccataaaaacgatattgtgccgcaattaccaccgtattattattacttaagtaaatggacataccaccacttcgctagagaggtttgacttcatgagagcatagatggaaatgtagttgccagaaatgagattgtatgtgatgattctggtgaggacccgacctatagcagaagtgggtcatgggatgagcgtagcagataatcttgagtactacagtgtcacactacatgttgactcaaggggaacctgtcagttcgtgattggtacagccaaccaagtatacaactacattcgtgaagttgatggatccatcatcttgttaagatatatatgcaagaaccatgagctctagaatcaatgtgactttgtatgccacgaaatgcacccttgtacaatatttttattttcaatttgtgtacagctcatgaaatactgttgtgtacaactcatgaaatactgggctctccagagggtaaggactaaggagagactcacctttttaaatgcacccctttgaccaagtgacattcgatacattgtaagctccataagattgccgcacaattcaatttgtgtatatcaataacactatgtattaccaagttatgcaagtatta

SEQ ID NO: 57490 - DNA, 2033 bp, Zea Mays
tccgcacctcaaattttggtgaaactgccttgttgttgtcttcatatctagcgcactggcatcccatgtagactgcagtttttgtcaaaaatgattttttttgaataagtagacattatatccttcaagatttttatatggaaatcctaaattgtgggcatattgatttttactctatttcttaaatgtaaagttgtaaacttgaatcacctagaaggaaccgtgttaagaagaaataagcaactatgtcttttcttctggaaagataaaatgtgtttatatttgaaagctagaaacatagctttctattatgtcacatcagtctaaaccagaatttaatcattttttataatgcacgtgcaatgagataaaaccaaaacaccttataatttggaatagagacttaacattttgttggctgggacattgggctatattttgcagcctcctcacttggcacagataacttcatttgttttccagagactgtattaatactttgcaggaataaacattgtgtcttgttatccattgcaatatacaacacttaagcccttggctgatagagtgattgtaaagattaactcttccgaggagaagacaactggtggaattttgcttccaacgactgctcagtctagacctcagggtggcaagaaatacgtcaaggaaaaatgtcgaacaactcagaagataaattcaagaactggttgcttcaacaagagtctgtccatgaggatggcatgcaacattacttgcccttcgattgagataggtggctacggtgatgctttgttgaacctgatatacgcatctccatcaagccagttcgaagagctcagtttagaatgtgagctagatgctacaggcaatcattctagagtgaaggatgctcaagttcatggctcacctatacctgagagtaatggaagattatcgacaactgctcagactaaaatgatgtccacagtctcagaagatgcaattcttgttggctcatctttcaggtggaagcgcaagctgacttattttattaccatgaagcctgaagatgtataccaaagtagcctaggtaacaacaataagagggttgggctttttgatatgggtgatggaagtagtgagcctgctgctgaggacaacaatcaaatgcatcaggtctatcatgggttttattctgcatacgataatacaactctactatatgagatcctgaagtctattaaatgggcaagaaaaacatatgtaaatcgacctgtaaatgttgttggacactccattggaggggatctagcttcattttgtgcccttgatctatttgacgttgagctcatgacttttggacagcctcggttaggcaatcctgcatttgttgtatgccttggctaacaagtcccaagaacaatccatgtgacccataaaaacgatattgtgccgcaattaccaccgtattattattacttaagtaaatggacataccaccacttcgctagagaggtttgacttcatgagagcatagatggaaatgtagttgccagaaatgagattgtatgtgatgattctggtgaggacccgacctatagcagaagtgggtcatgggatgagcgtagcagataatcttgagtactacagtgtcacactacatgttgactcaaggggaacctgtcagttcgtgattggtacagccaaccaagtatacaactacattcgtgaagttgatggatccatcatcttgttaagatatatatgcaagaaccatgagctctagaatcaatgtgactttgtatgccacgaaatgcacccttgtacaatatttttattttcaatttgtgtacagctcatgaaatactgttgtgtacaactcatgaaatactgggctctccagagggtaaggactaaggagagactcacctttttaaatgcacccctttgaccaagtgacattcgatacattgtaagctccataagattgccgcacaattcaatttgtgtatatcaataacactatgtattaccaagttatgcaagtatta

SEQ ID NO: 57491 - DNA, 547 bp, Zea Mays
gggtggtacagttgtcgtggcagcgtccaagctcggtaagatggggggcctgagcaccctgcggtcgaagcgagggagggatcctcaagggcccaactgggtcttatcaaggcgctgccaccgagatgtggtgccaaagggccttcgtcagagctcttggcaaaagccttcgtgtgcggaggaccgcctccgagctcttgacgctgagcacttcggacagtctacgaccattgacctcgtgtgcgggcatcttagggttccacggtcaggggaattgtccgcccagatctcccggatgacgctcatcgtcggatgcatttgtgaactggaggtccgtcctctcgatgaggactcgatcgagcgggattgagtacgatacaacgagctcaaagacctaggagcgttggtgggactcgtcacgctgtgcctaggtcacccagttttcacatttcctagagagaaaatgtagaggattaattttgtgctatttaaactcatacccttagttttgccaccttcctcatttttacccttggttgtatttttt

SEQ ID NO: 57492 - DNA, 677 bp, Zea Mays
gtctcgtgaaaccctacccattttccccgtttctctcagccgtgcgcctctcgcctgaaaccctaggcaatctcctcgtcgcttctgttcaccggcgaggtggaggactgatccggcgtccattgttgcgctgtcgtcgaactccccgccggcgagcgctttcctgcgagggcgccgccgtcggtgagatcctcggcggtgcttctgcacttgcaaggaggtacggcgtcggcctgagggttgcgaactgtgaactaccgacggcaagaccacggattgattgtggtgagatgtgctgtctggattacgagcaggaaattcggcattcttcagtttcatgttcttctacgaatcaacaccactgagatgatttgcagtactgaaaaacaaaccggatctgaagatgaagcaactgagcggtgtcccgatagggtgcccgtaagggcgccttatgtctgcttgtagaaatgcatcgcgcacttagaggaataatgcccagtttcagtttgaaaaaggtacaacgctcaggaaatgtaaaaaatcaatcgccatattacttatgtatgtctttgaatgtaaaaaatgttaatcgagtgtttcaaggattcaagtgggaggtcatatattatctaatttggcgagttcagtcacatatacaatgaggatatgagataaat

SEQ ID NO: 57493 - DNA, 3519 bp, Zea Mays
tctttttttacttactttagttctttagttttgggaaaataaatagggggtacttcttttctttcatattgggtgtcaaatggatcctgtaagaattcccacttcatagatacggggtataaagtttatccaaaaagttccaatttcaaaacacatatgagtaatgagtagtaggggcatatcctgaatgtgcctgatagacaagattttttcatgaaaataaagatattaaatttgactggaattgacactctattttttgttttctgagaaagaaaaaaaatgcttagaaatgcatctaatctacgagttcaatacactgcacgaacagttgatctgatagcatggtgtgctcctagaatcgatggcggcacccaacgaccccaatctattccaccatgcatcgcagctctctccgtgggcacggccgtaccatcctggccgcgtcgtcctggtacaatggtcgccgccacctcgtagttggtacaagctcaactttgatggatccgtctaccatgatggctcagcgcgagccagtatcggtggcgccatctgtgacagcgacggctgtgtcgtgctcgcattcgctgagctcacggagcactccacggtgggcatagtggaggcgcgctcgatggctcgtggcctttgcctggcgcttgggcttaacctgcagcgtgtggtggttgagggcgacgatctcgtgcttgtgcggctgctccgcggcgaggacacgcagacacgaatccctgtggcgctgcaggaggagatccacgagttgcttcgctgttttgaagcgtgcgatgtgaggcatgtgtaccgggaggggaacaaggtggcgcacaccctttgccgtcaggcctaccactgccccggcgtgtgggtagggactgtaccgtttctcgtgtttgacaaggccgaggaggaccgacatggcgtgttgcatgagcgcgcggtggtccgatgattggccgggcatacaaagttctggacgagaaatttgcaagatcaccaccctggaaaggtggcttcgctgcattgccaccgttgattgtgaccacgctgaagtgacaatatcaatcacttgctgttcttatgccatcatgcctcattcacgagttcttttcaactgtgcaacccaaaaaaacggccctgcccttggctgtgcttgcgggctttggcttgacatttggccaaaaaacagaactagacagcctgcaattgctctccaggcaaccgccatcagttttggcatcatgcttgttctctatactgctgacaccaatctcctgtgccatgaaccttgatgcgtggtgaacaaatccttacaagatatatatgcacaacacccatacatgtttaagacaagcaaacatctttaagacaagcacccatactgaatatatcagccataaaatatctcagtttaggactatagaatccaaaacaaactgcacaattaaacatgtgacacagtttatcactacagccacaaatatttcagtttaggactacaaccacaaatagaatcctaagagttatttttttcttccttggggtcagtttcttttgaactgtcttcttggttggcgttgttatcttggttggagttgaagtaggcatagtggtctgagaagaattgctttctaacagagcagcaagtcgcctgcacaaagacattgctaatggtattgaaaaagaacatatttcaaactagagtgcttgtaaaatttttggaattacctccttgtcattgttgctccagggcgctcttgaattatggtttccctagttgttattagcctataaggtgttgacatctgacttttaccacttgatttagtactattcttcctaggctttctcttccttttctttgtaccattgagtgggcatttgtaactaacttctgtgtgacccaatgtaccacatcttttgcacctacgtttcctcttatcatcgttttgggcttttcttgttcagtttgttttgcctttgaactgctgccaccttcatcatgttttgtctctgaactgttgcgccttcaaggaaacttttgaacctcaacattctctgtctgccaacagttcttttgcaaattggtgcacccatatcaaatgaaagttctactgtgggccattgtgacttgtcaggcagtggctctatcgatcttttatatgcctctctgaactttgcaacagagtagtattcatgaacaaatcctcaagcttcacatttctgttttttactgcggctagcaaggccaatgcatgctcgcaaggcttgcccgtatgttgctactcttcacaagtacagtcatgtaaatgtgccttgatagcatgtcgatcatgataattgtggctgctgttgtacacctctgcatcatgtatgtcaactttcacaacatttgagtgtcccaaccctctagttcttgcattcaattggtgtaggacagctgttagtatcttgccttgaagtcgttctccaatttttctcatcttctcccatagaatcattatcatttcccttatcaacatgatcagtcactggcaagtcctttatgtctctactctctaatccaattgttgaaacactccgctagattgttagtaatataatcacacttaatttcttggttgaagtcacatctcatccatttcagtgaatgatgttcatcaaggtacttgaacacatcattgctacctgagaacatttgggtcatgtggtactgaaatttgtccttcttgtaagcctcaacagcagggtacatacgtgaataaatgctcttaataaagttttgcatgaggtgcctaaaacattccctttgatcaacataaggaaacacttgtaccactgctttttctaatcctttacaagcatctgtgcaaattgctagttgaggcatgtctcctatagccctacacaactgcttcataaaccaaacccagttatcctctggttcagattgtattaatccaaatgcaacatgatacatccagttatgaccgtctatatctgttactgatgccaattggccattctacctaccatttagtgcagttgagtctacactaagataaggcctacatcctgctaaaaaaccctcaatgcaaggagcaagtgcacaataaaatcgagttagaggggcgacctatcttttgttagcaactcaaacagctgaaatatttaaacaaaaccacatagcagaatagattatataccttaggttcatgtcccaagagttggagttgggttccatgtccaaatctggtatagcaccacctctccaagggcaatggatcacagatttagagccaacatcacaaaatctattggttcatgcgtccaaaaaaacaagggattttagaaatcgaaggaggataacagaaaatgagggaatacaactggaacaccattcttacctcaaatctgctgcctgtgggcttggaggagaacaaaatgttgagttatgcgtgcttgagtgtccaaccctctatgcgccgccggggagaactcaac

SEQ ID NO: 57494 - DNA, 1741 bp, Zea Mays
tatcactcaaacccgtaggtttttatccacgtgccgccgcaccggccaaccccgcgcccctcgaccgtctccgtcgccgcgccacccgcaccgggacccagtatggccgcctccggcgcatatccgggcacggcgttcaagatactcctctcctgccccgacggcctccctcgctcccgcgtttcggtgaagtttggtcggtcattcgacaggattccccatcctgatgcagccttggaggaatctataagtgaggtgtgggaccaaagccttcagcggaacccatatctatacagcggtacaaagtttcgggtatgtatttttagctctaccttggtatgctcgtttttttctgctccgttgatacttgaagtcctgaagatgctacaatttactggtaaacacgtatttaactaaagaaaactggaagcttcttgcatgttaagtgatttggtgcatgctttatagaaagacaatctctctgtatatgtatctgttctactgcattcaccagcaggtagtagaatgtaaatactgacaacaatcaagaatttcagtatggaggaaatgccttgcactacaaagatgactcagatcatgatcttgagtactgtgtctcacttcatttgggtctcacagactacaggacatttgtgggaacaaatctcaatccattgtgggaattttttttggttccatctgaagatgattctgtacattgccaacacttgtcagatgcactgggaaatggtgctatagttgaaacatctgacaaaaagattattgtattgcaaaggagctacaatgtggcggactatccaggatactatgttttccctggaggacactcggagccgcaagaaattggaatcatgggtcatcaaactgatgaagaagactttgctagtctcactgaacgagtttcacaagaaatgtttgacggagtcatccgtgaagtggttgaggaaactggagttcctgctagctccctaactgatcctgtcttcattggagtttcccgccgagaagttaacgttaggccgactgcgttcttttttacaaaatgtaacattgattccagtggcgtaagcgagctttattctagagctcaagatggctatgaatctactaaactctacacagtatccgttgaagagctacaaggaatgaggcagcggatgcctggatgccacaacggtggtattgctctgtatgagttgatgaggaatgctgcaaaaaaaagtgaagatgtcattgatgaatagttctgatggtgttattacaccacaaacaagtgtggaggtattcgcatctcgtacaaacacccgtgcagaacactgcatgtgacatccatcagattgctgttctttgcagtagatatgtgccatttccatgtttgttgagcctgacataggtctccttagaccgctgcataagtgcccacaaagagcatgaagcttaaagtttcctctgaatactaccggaataaatttcatctccggatgtaccaccaaaggaggcacaccagagcggcatcatgatgctaatctacatggagtatgtaggaaccgaaggtgaagcttacattactttgctctgagaacgtttatatacttgttacctttggtatggatatactagttcgtgctagggtatggattctacatatttcatcttgacttttatcgcttcacacaattgccatcttggtgaattcgagtatagcctgtggatgtttctt

SEQ ID NO: 57495 - DNA, 898 bp, Zea Mays
actcaaacccgtaggtttttatccacgtgccgccgcaccggccaaccccgcgcccctcgaccgtctccgtcgccgcgccacccgcaccgggacccagtatggccgcctccggcgcatatccgggcacggcgttcaagatactcctctcctgccccgacggcctccctcgctcccgcgtttcggtgaagtttggtcggtcattcgacaggattccccatcctgatgcagccttggaggaatctataagtgaggtgtgggaccaaagccttcagcggaacccatatctatacagcggtacaaagtttcgggtatgtatttttagctctaccttggtatgctcgtttttttctgctccgttgatacttgaagtcctgaagatgctacaatttactggtaaacacgtatttaactaaagaaaactggaagcttcttgcatgttaagtgatttggtgcatgctttatagaaagacaatctctctgtatatgtatctgttctactgcattcaccagcaggtagtagaatgtaaatactgacaacaatcaagaatttcagtatggaggaaatgccttgcactacaaagatgactcagatcatgatcttgagtactgtgtctcacttcatttgggtctcacagactacaggacatttgtgggaacaaatctcaatccattgtgggaattttttttggttccatctgaagatgattctgtacattgccaacacttgtcagatgcactgggaaatggtgctatagttgaaacatctgacaaaaagattattgtattgcaaaggagctacaatgtggcggactatccaggatactatgttttccctggaggacactcggaggctgcagtactgtgggatctagtggtttcttctgccagtgagcatgct

SEQ ID NO: 57496 - DNA, 1881 bp, Zea Mays
aaactcttccccctcttcctcctccccctcgcctccgtccccatcccgattgcatggtccatttggttgcacggaacggcgtctcctccatcggtccgaccaccgcgcgggcggcaacaccgacttttgcatcggtttccccagatcctggatgacaagcttagccccaagtgtttggatgtgctgctgctgccatcaactgccgtgatgtttcggtgaagtttggtcggtcattcgacaggattccccatcctgatgcagccttggaggaatctataagtgaggtgtgggaccaaagccttcagcggaacccatatctatacagcggtacaaagtttcgggtatgtatttttagctctaccttggtatgctcgtttttttctgctccgttgatacttgaagtcctgaagatgctacaatttactggtaaacacgtatttaactaaagaaaactggaagcttcttgcatgttaagtgatttggtgcatgctttatagaaagacaatctctctgtatatgtatctgttctactgcattcaccagcaggtagtagaatgtaaatactgacaacaatcaagaatttcagtatggaggaaatgccttgcactacaaagatgactcagatcatgatcttgagtactgtgtctcacttcatttgggtctcacagactacaggacatttgtgggaacaaatctcaatccattgtgggaattttttttggttccatctgaagatgattctgtacattgccaacacttgtcagatgcactgggaaatggtgctatagttgaaacatctgacaaaaagattattgtattgcaaaggagctacaatgtggcggactatccaggatactatgttttccctggaggacactcggagccgcaagaaattggaatcatgggtcatcaaactgatgaagaagactttgctagtctcactgaacgagtttcacaagaaatgtttgacggagtcatccgtgaagtggttgaggaaactggagttcctgctagctccctaactgatcctgtcttcattggagtttcccgccgagaagttaacgttaggccgactgcgttcttttttacaaaatgtaacattgattccagtggcgtaagcgagctttattctagagctcaagatggctatgaatctactaaactctacacagtatccgttgaagagctacaaggaatgaggcagcggatgcctggatgccacaacggtggtattgctctgtatgagttgatgaggaatgctgcaaaaaaaagtgaagatgtcattgatgaatagttctgatggtgttattacaccacaaacaagtgtggaggtattcgcatctcgtacaaacacccgtgcagaacactgcatgtgacatccatcagattgctgttctttgcagtagatatgtgccatttccatgtttgttgagcctgacataggtctccttagaccgctgcataagtgcccacaaagagcatgaagcttaaagtttcctctgaatactaccggaataaatttcatctccggatgtaccaccaaaggaggcacaccagagcggcatcatgatgctaatctacatggtgagatgacccgtggattgtaatgttctttcaggattgaatttcctgggcaagtgatgcctgaatctgtcagctgttcttctgttggtttctgctgtagcggtgtactaggagtatgtaggaaccgaaggtgaagcttacattactttgctctgagaacgtttatatacttgttacctttggtatggatatactagttcgtgctagggtatggattctacatatttcatcttgacttttatcgcttcacacaattgccatcttggtgaattcgagtatagcctgtggatgtttctt

SEQ ID NO: 57497 - DNA, 1631 bp, Zea Mays
cttccccctcttcctcctccccctcgcctccgtccccatcccgattgcatggtccatttggttgcacggaacggcgtctcctccatcggtccgaccaccgcgcgggcggcaacaccgacttttgcatcggtttccccagatcctggatgacaagcttagccccaagtgtttggatgtgctgctgctgccatcaactgccgtgatgtttcggtgaagtttggtcggtcattcgacaggattccccatcctgatgcagccttggaggaatctataagtgaggtgtgggaccaaagccttcagcggaacccatatctatacagcggtacaaagtttcggtatggaggaaatgccttgcactacaaagatgactcagatcatgatcttgagtactgtgtctcacttcatttgggtctcacagactacaggacatttgtgggaacaaatctcaatccattgtgggaattttttttggttccatctgaagatgattctgtacattgccaacacttgtcagatgcactgggaaatggtgctatagttgaaacatctgacaaaaagattattgtattgcaaaggagctacaatgtggcggactatccaggatactatgttttccctggaggacactcggagccgcaagaaattggaatcatgggtcatcaaactgatgaagaagactttgctagtctcactgaacgagtttcacaagaaatgtttgacggagtcatccgtgaagtggttgaggaaactggagttcctgctagctccctaactgatcctgtcttcattggagtttcccgccgagaagttaacgttaggccgactgcgttcttttttacaaaatgtaacattgattccagtggcgtaagcgagctttattctagagctcaagatggctatgaatctactaaactctacacagtatccgttgaagagctacaaggaatgaggcagcggatgcctggatgccacaacggtggtattgctctgtatgagttgatgaggaatgctgcaaaaaaaagtgaagatgtcattgatgaatagttctgatggtgttattacaccacaaacaagtgtggaggtattcgcatctcgtacaaacacccgtgcagaacactgcatgtgacatccatcagattgctgttctttgcagtagatatgtgccatttccatgtttgttgagcctgacataggtctccttagaccgctgcataagtgcccacaaagagcatgaagcttaaagtttcctctgaatactaccggaataaatttcatctccggatgtaccaccaaaggaggcacaccagagcggcatcatgatgctaatctacatggtgagatgacccgtggattgtaatgttctttcaggattgaatttcctgggcaagtgatgcctgaatctgtcagctgttcttctgttggtttctgctgtagcggtgtactaggagtatgtaggaaccgaaggtgaagcttacattactttgctctgagaacgtttatatacttgttacctttggtatggatatactagttcgtgctagggtatggattctacatatttcatcttgacttttatcgcttcacacaattgccatcttggtgaattcgagtatagcctgtggatgtttctt

SEQ ID NO: 57498 - DNA, 1557 bp, Zea Mays
ctttagctcgttcaggagtgtgtggggtgctaataactgatgttatatttctgtagcgcggccagaaacagtacaacaggcgctcgtatattaggcctgtgggagctgtctggccaggcaaatttgtcaggtttcggtgaagtttggtcggtcattcgacaggattccccatcctgatgcagccttggaggaatctataagtgaggtgtgggaccaaagccttcagcggaacccatatctatacagcggtacaaagtttcggtatggaggaaatgccttgcactacaaagatgactcagatcatgatcttgagtactgtgtctcacttcatttgggtctcacagactacaggacatttgtgggaacaaatctcaatccattgtgggaattttttttggttccatctgaagatgattctgtacattgccaacacttgtcagatgcactgggaaatggtgctatagttgaaacatctgacaaaaagattattgtattgcaaaggagctacaatgtggcggactatccaggatactatgttttccctggaggacactcggagccgcaagaaattggaatcatgggtcatcaaactgatgaagaagactttgctagtctcactgaacgagtttcacaagaaatgtttgacggagtcatccgtgaagtggttgaggaaactggagttcctgctagctccctaactgatcctgtcttcattggagtttcccgccgagaagttaacgttaggccgactgcgttcttttttacaaaatgtaacattgattccagtggcgtaagcgagctttattctagagctcaagatggctatgaatctactaaactctacacagtatccgttgaagagctacaaggaatgaggcagcggatgcctggatgccacaacggtggtattgctctgtatgagttgatgaggaatgctgcaaaaaaaagtgaagatgtcattgatgaatagttctgatggtgttattacaccacaaacaagtgtggaggtattcgcatctcgtacaaacacccgtgcagaacactgcatgtgacatccatcagattgctgttctttgcagtagatatgtgccatttccatgtttgttgagcctgacataggtctccttagaccgctgcataagtgcccacaaagagcatgaagcttaaagtttcctctgaatactaccggaataaatttcatctccggatgtaccaccaaaggaggcacaccagagcggcatcatgatgctaatctacatggtgagatgacccgtggattgtaatgttctttcaggattgaatttcctgggcaagtgatgcctgaatctgtcagctgttcttctgttggtttctgctgtagcggtgtactaggagtatgtaggaaccgaaggtgaagcttacattactttgctctgagaacgtttatatacttgttacctttggtatggatatactagttcgtgctagggtatggattctacatatttcatcttgacttttatcgcttcacacaattgccatcttggtgaattcgagtatagcctgtggatgtttctt

SEQ ID NO: 57499 - DNA, 1725 bp, Zea Mays
aggcgctcgtatattaggcctgtgggagctgtctggccaggcaaatttgtcaggtttcggtgaagtttggtcggtcattcgacaggattccccatcctgatgcagccttggaggaatctataagtgaggtgtgggaccaaagccttcagcggaacccatatctatacagcggtacaaagtttcgggtatgtatttttagctctaccttggtatgctcgtttttttctgctccgttgatacttgaagtcctgaagatgctacaatttactggtaaacacgtatttaactaaagaaaactggaagcttcttgcatgttaagtgatttggtgcatgctttatagaaagacaatctctctgtatatgtatctgttctactgcattcaccagcaggtagtagaatgtaaatactgacaacaatcaagaatttcagtatggaggaaatgccttgcactacaaagatgactcagatcatgatcttgagtactgtgtctcacttcatttgggtctcacagactacaggacatttgtgggaacaaatctcaatccattgtgggaattttttttggttccatctgaagatgattctgtacattgccaacacttgtcagatgcactgggaaatggtgctatagttgaaacatctgacaaaaagattattgtattgcaaaggagctacaatgtggcggactatccaggatactatgttttccctggaggacactcggagccgcaagaaattggaatcatgggtcatcaaactgatgaagaagactttgctagtctcactgaacgagtttcacaagaaatgtttgacggagtcatccgtgaagtggttgaggaaactggagttcctgctagctccctaactgatcctgtcttcattggagtttcccgccgagaagttaacgttaggccgactgcgttcttttttacaaaatgtaacattgattccagtggcgtaagcgagctttattctagagctcaagatggctatgaatctactaaactctacacagtatccgttgaagagctacaaggaatgaggcagcggatgcctggatgccacaacggtggtattgctctgtatgagttgatgaggaatgctgcaaaaaaaagtgaagatgtcattgatgaatagttctgatggtgttattacaccacaaacaagtgtggaggtattcgcatctcgtacaaacacccgtgcagaacactgcatgtgacatccatcagattgctgttctttgcagtagatatgtgccatttccatgtttgttgagcctgacataggtctccttagaccgctgcataagtgcccacaaagagcatgaagcttaaagtttcctctgaatactaccggaataaatttcatctccggatgtaccaccaaaggaggcacaccagagcggcatcatgatgctaatctacatggtgagatgacccgtggattgtaatgttctttcaggattgaatttcctgggcaagtgatgcctgaatctgtcagctgttcttctgttggtttctgctgtagcggtgtactaggagtatgtaggaaccgaaggtgaagcttacattactttgctctgagaacgtttatatacttgttacctttggtatggatatactagttcgtgctagggtatggattctacatatttcatcttgacttttatcgcttcacacaattgccatcttggtgaattcgagtatagcctgtggatgtttctt

SEQ ID NO: 57500 - DNA, 1694 bp, Zea Mays
ataggccctcaaatattatgaagtttcggtgaagtttggtcggtcattcgacaggattccccatcctgatgcagccttggaggaatctataagtgaggtgtgggaccaaagccttcagcggaacccatatctatacagcggtacaaagtttcgggtatgtatttttagctctaccttggtatgctcgtttttttctgctccgttgatacttgaagtcctgaagatgctacaatttactggtaaacacgtatttaactaaagaaaactggaagcttcttgcatgttaagtgatttggtgcatgctttatagaaagacaatctctctgtatatgtatctgttctactgcattcaccagcaggtagtagaatgtaaatactgacaacaatcaagaatttcagtatggaggaaatgccttgcactacaaagatgactcagatcatgatcttgagtactgtgtctcacttcatttgggtctcacagactacaggacatttgtgggaacaaatctcaatccattgtgggaattttttttggttccatctgaagatgattctgtacattgccaacacttgtcagatgcactgggaaatggtgctatagttgaaacatctgacaaaaagattattgtattgcaaaggagctacaatgtggcggactatccaggatactatgttttccctggaggacactcggagccgcaagaaattggaatcatgggtcatcaaactgatgaagaagactttgctagtctcactgaacgagtttcacaagaaatgtttgacggagtcatccgtgaagtggttgaggaaactggagttcctgctagctccctaactgatcctgtcttcattggagtttcccgccgagaagttaacgttaggccgactgcgttcttttttacaaaatgtaacattgattccagtggcgtaagcgagctttattctagagctcaagatggctatgaatctactaaactctacacagtatccgttgaagagctacaaggaatgaggcagcggatgcctggatgccacaacggtggtattgctctgtatgagttgatgaggaatgctgcaaaaaaaagtgaagatgtcattgatgaatagttctgatggtgttattacaccacaaacaagtgtggaggtattcgcatctcgtacaaacacccgtgcagaacactgcatgtgacatccatcagattgctgttctttgcagtagatatgtgccatttccatgtttgttgagcctgacataggtctccttagaccgctgcataagtgcccacaaagagcatgaagcttaaagtttcctctgaatactaccggaataaatttcatctccggatgtaccaccaaaggaggcacaccagagcggcatcatgatgctaatctacatggtgagatgacccgtggattgtaatgttctttcaggattgaatttcctgggcaagtgatgcctgaatctgtcagctgttcttctgttggtttctgctgtagcggtgtactaggagtatgtaggaaccgaaggtgaagcttacattactttgctctgagaacgtttatatacttgttacctttggtatggatatactagttcgtgctagggtatggattctacatatttcatcttgacttttatcgcttcacacaattgccatcttggtgaattcgagtatagcctgtggatgtttctt

SEQ ID NO: 57501 - DNA, 1143 bp, Zea Mays
agcagccgccctcccattttctcagctcgaccacaaccatagcttggtggtcgacatgcccctgctccagcctggccgcccatcttgggtcctcatctccatctctcagctgctcagctccctggtgctcgccctcccctgctctcaggacagcagggagccgtcgacctctccaactcggccggccatggcaccgcttccccaagtgtcacactggagctcgcccaaccctctcccatctccttccccaagcacaagtcccatggtcgagctcacccctgtaggagctccctatgacgcctagattttcaatttcctatgagtttttcccccacgtgcaatcccggcatcgtcgtcgtgtttagtcacgatgattctcaactaccctatttttatttcattgaatttctaatgcgagcagaaatttttttggtgctatgttaatacgatgttatgtgtatatgtgtgtgtttgtgtgagtaagaggaaccgcaggtttttgcgtagagaggaaagtcgtgtggcgcgtgctaggtgtttgatggaatggatgaatcagagatccttgttgctcttgcgaaatccaagtctatttagtgttggtacattgattgatcacgtgatgtggaggacaagagctgggttaatcccaagatgatgctgatgaataaaccggaagagtggattatctgatcaagtaccaggatgagagatgctcaccaagtgattgtcatctaacaacactgacttagtgttattccagaatgctctactagttggtcagataggcagattgagtcgcgagatggtagtaatcaccactctgtgcaagaaaagattgagatggtcaccataatggggatggcatatcgacatgaattgtcctcataacttagcagatcgattacaaagtttcttcgaagaacttttgcatcctacacacaaagacataagagaacaaaacgtcaggtttttattatataaccgaaatgtatgtttgaacatgacacgaacttaggtcactcactctaacaaatttcattcgtctgttattcccctcacatggccatagcttgtagaacaaggtagctagtattaaccctatagaataatgtttgacaactatgttatatacaattgtcg

SEQ ID NO: 57502 - DNA, 750 bp, Zea Mays
ggcaccgcttccccaagtgtcacactggagctcgcccaaccctctcccatctccttccccaagcacaagtcccatggtcgagctcacccctaggaaccgcaggtttttgcgtagagaggaaagtcgtgtggcgcgtgctaggtgtttgatggaatggatgaatcagagatccttgttgctcttgcgaaatccaagtctatttagtgttggtacattgattgatcacgtgatgtggaggacaagagctgggttaatcccaagatgatgctgatgaataaaccggaagagtggattatctgatcaagtaccaggatgagagatgctcaccaagtgattgtcatctaacaacactgacttagtgttattccagaatgctctactagttggtcagataggcagattgagtcgcgagatggtagtaatcaccactctgtgcaagaaaagattgagatggtcaccataatggggatggcatatcgacatgaattgtcctcataacttagcagatcgattacaaagtttcttcgaagaacttttgcatcctacacacaaagacataagagaacaaaacgtcaggtttttattatataaccgaaatgtatgtttgaacatgacacgaacttaggtcactcactctaacaaatttcattcgtctgttattcccctcacatggccatagcttgtagaacaaggtagctagtattaaccctatagaataatgtttgacaactatgttatatacaattgtcg

SEQ ID NO: 57503 - DNA, 343 bp, Zea Mays
gtgcacagaatgctctactagttggtcagataggcagattgagtcgcgagatggtagtaatcaccactctgtgcaagaaaagattgagatggtcaccataatgggtaatatagattacacactttgttttgagaaactcactaagcccacagtgggctcaccataatatgaccataagatgctacagtataacatcaataaggtcaagtgggaaagatacgtaaagtgtttggtcataattaagagcctcatcaagtaccctattaagagtgttattccagagtgtgagatagccaagaagtaccttaagaagatagcttctcatttcactaggtcctctaag

SEQ ID NO: 57504 - DNA, 493 bp, Zea Mays
tgtgccggtccaggcggtgcggcccgtgcgcccgggccgagatgtcggcccaccaaaaccgcgcccccccgcatcgccacggggataaggatcgacgggcaagaatacacggatcactgtttatccatttatcacaaaccctacccactttccccatttctctcagccgtgcgcctctcgcctgaaaccctaccactctcgtcgcttctgttcaccggcgaggtggaggactgatccggcgtccattgttgcgctgtcgtcgaactccccgccggcgagcgctttcctgcgagggcgccgccgtcggtgagatcctcggcggtgcttctgcacttgcaaggaggtacggcgtcggcctgagggttgcgaactgtgaactaccgacggcaagaccacgatacaattcatatagttccataactctatgccatgcttttggagtatctggagcgatacagcacttggcaggaatgatcgaatgagactcgaaggt

SEQ ID NO: 57505 - DNA, 2860 bp, Zea Mays
caagaagccaacaggtgttcgatggattcctcttcctgatcatacaaggggcatcgctcggagtgaggcaactcacgcctggcaagactgtcaacagtccaacatcaatcatgttcaaccaaccatatgaagaatctacatttgccggagcccatgtctttcgtattctatcagaagaatcaaaagaggttaaaccaaaacaatataatagcacgtttggatgtcgatattagagcattgaattgagaattggaatcagctttcctaaattatgtcgtttggttgcacacagaattgagatttggaaccagagactcaattccctggaatataattaaaggcgcagttcccctgcgctttcgagaaaaaaaaattccctggaattggactataactagaaactcctcccaataccaaacgtcacccctttgtattgtgtggaattagaccgcacaattccaaactccaatccagcgacatccaaataatagaattggaatcacatcatttcaataccatggctgatttggtattgaactcaattcaattacatgaccttaaatattgacatccaaaggaaagttgggagcatcaaatcacaattagaaattgctaaagagcttctccatcgctgggaaattgaaagagatgaaagggctcttgctgatgatgaggagtggctgagacggaagttgaagcttcattgtcttggtttggcctcactggtgagaaccatcgcccgtctgcgttctcggattttgtatattcagaagggtgatgccaacacctccttttttcatcagcaggctagatacagaaaaaagaagaacttcattcctaagctgcacgttggtgatcaggtggtcacctcccaagaagataaacagaaggccgtttctgatttctatgagaacattttgggtagggctgaggagaggagctacactcttgacttggatgagttggccatccacaatcatgatttatctgctttagatgatccgtttcttgaggaggaggtgtgggctgtggtaaaagatttgcctccggataaagccccggggccggatggtttcacaggtcgattttataaatcctgttggaatattattaaaggtgatgtgttgaggtctttggatgtcatccagcgtggccatgttttcaaattccgcctgcttaacacggcttatatctccttactgcctaagaagatggatgctgttgaagttaaggatttccggcctataagtttgattcatagttttgccaaattggtagctaagctcatggctactcggctggcccctttgcttccctcactggtttctgtgaaccagagtgcctttgtgagggggaggaggattcatgataactttatgcttgtccaacaaattgtgaagttgctgcataagaagaaagaaccacatatccttcttaagttggacatttccaaggcttttgactctgtttcttggtcgttccttttggaggttttaagaaaaatgggatttggtcagtgttggcgggatctcctttgtttattgctgtctacttcttccactcagattttagtcaatggagagcctggggacatcattattcatcgtcgcggtctcaggcagggagatcctctttccccaatgctctttattctagtcatggatactctgaattctttaatcaactatgccacttcgttgggtttgcttcaacctattgctgttcagcaggtcaggcatcatgtttccttctatgctgatgatgttgtagttttcttgaggcctcacattctggatctggtttcggtcagacgcattcttgatttatttggtcacgcctcaggcctccggaccaacctggttaagagctcggtctcccctattcattgttctgatgatgagctggctctttctgtggaaactctctcttgttcggttaaagcttttccttgcacttatttgggtcttcctctcacaacctgtaagccttctaaagaggtgttgctggcctttgtggataaggtggcagattaccttcctgggtggaaagcttctttgttgaatagggctgggcgtcttgtgcttgtgaaagtggttctcactgctgttcctatttattggcttatagctttgggatctcccgaaatggttcatcaaggctgttgataaaaagcggcgggggttcctgtggaagggacatcaacaagctaatggaggaaactgcttggtagcttgggataaggtccagagacctcttcagtatggcggccttggaatccataatcttgagcttctaggttgggccttgagaattagatggctttgggctcagaagactgatgtggagaggccatgggctggactctcaatttctattccctataaagctcgggccctcttcgatatggctgtgaatgccgtggttgggaatggtgagaaaattattttctggactgaccgttggttggatgggcttaccatggctgagatggcacccaatcttttcagaactgtccctatgcgaattgctaagcgaaagactgtggctcaggctttgtttgggcggagttgggttcgtgatatcaagggtgctcttactgttcaggttttaattgagtacctccaggtctgggattttgttgaggaggtcgtactgcaagctgatgttcctgatcatttcagatgtaagttgacacaagatggctgttatagcagcaagtctgcgtatgaggccttcttcgtgggctctaccaagtttggcccttggaagagaatctggaaaacctgggccccgtcgcgttgtaagttcttcctatggttggtgcaccataatcgggttttggaccgctgatcgtcttgag

SEQ ID NO: 57506 - DNA, 904 bp, Zea Mays
atccaaatcgtccatctccctcacaacagccgccctcccattttctcagctcggccacaaccatagcttggtggtcgacgtgcccctgctccagcctggccgcccaccttgggtcctcatctccatctctcagctgttcagctccctggtgctcgccctccccttctctcaggatagcagggagccggcgacctctccaactcggccggccatggcaccgcttccccaagcgtcacaccggagcttgcccaaccctctcccatctccttccccaagcacaagtcccatggtcgagctcacccctgcaggagctccctatagcgcctagattttcaatttcctatgagttctttttcccccacgtgcaatcccggcatcgtcgtcgtgtttagtcacgaggaaccccaggtttttgcgtagagaggaaagtcgtgtggcgcgtgctaggtgtttgatggaatggatgaatcggagatccttgttgctgttgcgaaatccaagtctatttagtgttggtaccttcggacttgagtcaaaatcacagtgtgaagaagcacaagggaaacgaaggatggaacagagccgaagctgtgcgcaagggagcttcgacatgatgacaaaaaaaggaaaccgacttaaaggggaaaaggctatctagacctcgatgaattactatagaattattagcaaatgtaaagggcctgggtgtaattttacatgggctgcgtcccgtgcctataaatagatgaacagtactcccgtactgttcacgctgactgggcatttgcttttgcgtcacgcttgtacttttaccttccttcaagccgaaggtacttttgtaacttgttattatttttatttttccttaataatgaaatagaaatgatttgatgataataaataa

SEQ ID NO: 57507 - DNA, 2056 bp, Zea Mays
atccaaatcgtccatctccctcacaacagccgccctcccattttctcagctcggccacaaccatagcttggtggtcgacgtgcccctgctccagcctggccgcccaccttgggtcctcatctccatctctcagctgttcagctccctggtgctcgccctccccttctctcaggatagcagggagccggcgacctctccaactcggccggccatggcaccgcttccccaagcgtcacaccggagcttgcccaaccctctcccatctccttccccaagcacaagtcccatggtcgagctcacccctgcaggagctccctatagcgcctagattttcaatttcctatgagttctttttcccccacgtgcaatcccggcatcgtcgtcgtgtttagtcacgaggaaccccaggtttttgcgtagagaggaaagtcgtgtggcgcgtgctaggtgtttgatggaatggatgaatcggagatccttgttgctgttgcgaaatccaagtctatttagtgttggtaagctaatttattattactgttgattgaattattagatgaatggaatggatatgtttagtgaatatatatgcatcatgagttagtggtaatacctcttcgtggatagtgacatgattgtattcatgattatggttaaaataagtgatgacggtattgttgttcgaatctgcacgtatagttttgattgtgcaactaattgagtggagtaaatcatgtgttctatagaaatgttatatacaaaagttgtagccaacttctttatcttgtttgtttaaaaatttcatgaccataggtttaatagtttaggagttatgatttttccaagtccagtttcagaatatgtccaaattctgtacaggtttcgaaaattggattgtttggctaagcaaaattgagaatcagcccttagtaattatacaagaattttagtacttttcttaagctttccaaaaaagtcttggatcactttttttggtagtctagagaccaagttacagctgtttgaactataaagtctgaacgttttttggtggtctagagaccaagttacagttgtttgaactatagagtctgaatctgtccaaatatggatagagaagtctgtttgtattaactgactttgatatgcattgaattgacctgatatgtttaccaatgaattgtagaaaattctattagctttctaaaaagtctaggatcacttgatttggacacctgagactccaattatggatttttgaagtgagtagtcgaattctgtccaaatctagacataatttatgtttacttctgtttgacctttctaaaggtcgaatcttgttgtgatggcaatacaaaagttatagaggacttcataagctttccagaaagtcctagtttatcattttaagatgaatatcttgtgagttatgattaaaagaactgactgttgtactcctgtccaaaatcagcaagtattaagttgatttctggagtcattcttgtttggctaggtaggattagttaattcttgattcttgagtgatgaagacttattacatataactgacagtgttgcaagtactaaagaaggttgttgggggccttcggtttctgaaggtcctcaaatacgtgatttaacgatgtttctggagtataatacatgagcaggtaccttcggacttgagtcaaaatcacagtgtgaagaagcacaagggaaacgaaggatggaacagagccgaagctgtgcgcaagggagcttcgacatgatgacaaaaaaaggaaaccgacttaaaggggaaaaggctatctagacctcgatgaattactatagaattattagcaaatgtaaagggcctgggtgtaattttacatgggctgcgtcccgtgcctataaatagatgaacagtactcccgtactgttcacgctgactgggcatttgcttttgcgtcacgcttgtacttttaccttccttcaagccgaaggtacttttgtaacttgttattatttttatttttccttaataatgaaatagaaatgatttgatgataataaataa

SEQ ID NO: 57508 - DNA, 608 bp, Zea Mays
atccaaatcgtccatctccctcacaacagccgccctcccattttctcagctcggccacaaccatagcttggtggtcgacgtgcccctgctccagcctggccgcccaccttgggtcctcatctccatctctcagctgttcagctccctggtgctcgccctccccttctctcaggatagcagggagccggcgacctctccaactcggccggccatggcaccgcttccccaagcgtcacaccggagcttgcccaaccctctcccatctccttccccaagcacaagtcccatggtcgagctcacccctgcaggagctccctatagcgcctagattttcaatttcctatgagttctttttcccccacgtgcaatcccggcatcgtcgtcgtgtttagtcacgaggaaccccaggtttttgcgtagagaggaaagtcgtgtggcgcgtgctaggtgtttgatggaatggatgaatcggagatccttgttgctgttgcgaaatccaagtctatttagtgttggtacctttggacttgagtcaaaatcacagtgtgaagaagcacaagggaaacgaaggatggaacagagccgaagctgtgcgcaagggagcttcg

SEQ ID NO: 57509 - DNA, 919 bp, Zea Mays
aggacttcgttcctatctcgtgctcagcgttatcttctccgtggcgctcatctccctgatattttcactgcgccgcggcttccagcgctcagcctccagctcccacgcgcactccacctcgtccatggccgccgatcgagtccctccccatctcctacaaccggccgccctgctcgttctccctagctgcgatgtggagctcgccctggacgatcgtccttgcccctcctctctgatctgcgtgcaggggtttccctcccatggcgcctggtcttcttcccttgactccatgccgagcgccccagtcgagctcgtcctggctccagcttcttccttggacggcggagccctcccattcctgcagcaggccagcgtccctctctccatcatcttctctgcttggttcctggcgagctccccctgctcttctgctcgccctggccctgtgccatttttccattcctctgctgctcccatggtgatctataaatccctctgttgttttactagtctggttaataccctgctgatgtgaagttttatgtgtgttgatgtgtacgatatggagtaaaatctctggagaattaggtggaggagaaggttaagttcaacgctccttaggtgttctatgaagtgcttgaactgaagttcgttgtcgttctgttcaccgcgatatgagtaggggagcaagtcttaatgtggcgtccgtcaaatgttcgatgaagtgctcggactagaactcgttatcgatgtatgaaatatgattgtgaacatgcttgtaaagtaattgtgtcatgtgttgaagttcagattttagatacaaattgtgtgaataatgttggatgaatgtataggcgtagtgtcaatttagtggttcttcattgcgatgtaaactttaggtttgaaatacaagttcata

SEQ ID NO: 57510 - DNA, 1233 bp, Zea Mays
aggacttcgttcctatctcgtgctcagcgttatcttctccgtggcgctcatctccctgatattttcactgcgccgcggcttccagcgctcagcctccagctcccacgcgcactccacctcgtccatggccgccgatcgagtccctccccatctcctacaaccggccgccctgctcgttctccctagctgcgatgtggagctcgccctggacgatcgtccttgcccctcctctctgatctgcgtgcaggggtttccctcccatggcgcctggtcttcttcccttgactccatgccgagcgccccagtcgagctcgtcctggctccagcttcttccttggacggcggagccctcccattcctgcagcaggccagcgtccctctctccatcatcttctctgcttggttcctggcgagctccccctgctcttctgctcgccctggccctgtgccatttttccattcctgcggcaagcaccagtccctccccacgccaacatccctttcctacggacgctgcccctctctggtttctggtggccggccacctctgctgctcccatggttcgttaattgatcacgtgatgcggacgacaagagccgagttgatcccaaaatgatgctggtgaacgaacctgaagcttggatgatctggtcaagtaccaggacgagagatgctccccaagcggacatcatctaacaacactgacttagtgttatctcagacaagccccggtgtatttgccacctccttctgttttaaaaacttttatcacttacctgctgtattaggtgataggagttgtgtgaataaacaattgatgcattatcattccttggaatttgattatcctccttgctacttgttttataaagagaactaatgaggctaagcccttcctagagaactaaaacttgattatttttaaaagaatgttgtgtaacactgggtatgggtttgttttatgaaaaaggacttgtaatggtgagagcatcatctgtagtgatgaattcatcattcaagtatgatacctctgtctggtacatggttttgggaaggaaataataatatgagaccagacgttgagtaggaaaggtcgtccgtctgtatcgattaaggaccgtaccgaaagtaggcttgctgatctaggaccctttaactggccacatgcctcgtcatgggtaagcttagcctcggctggaccaatatcagaaaggccggctcgcaatgggagt

SEQ ID NO: 57511 - DNA, 1317 bp, Zea Mays
aggacttcgttcctatctcgtgctcagcgttatcttctccgtggcgctcatctccctgatattttcactgcgccgcggcttccagcgctcagcctccagctcccacgcgcactccacctcgtccatggccgccgatcgagtccctccccatctcctacaaccggccgccctgctcgttctccctagctgcgatgtggagctcgccctggacgatcgtccttgcccctcctctctgatctgcgtgcaggggtttccctcccatggcgcctggtcttcttcccttgactccatgccgagcgccccagtcgagctcgtcctggctccagcttcttccttggacggcggagccctcccattcctgcagcaggccagcgtccctctctccatcatcttctctgcttggttcctggcgagctccccctgctcttctgctcgccctggccctgtgccatttttccattcctgcggcaagcaccagtccctccccacgccaacatccctttcctacggacgctgcccctctctggtttctggtggccggccacctctgctgctcccatggtggaggagaaggttaagttcaacgctccttaggtgttctatgaagtgcttgaactgaagttcgttgtcgttctgttcaccgcggttcgttaattgatcacgtgatgcggacgacaagagccgagttgatcccaaaatgatgctggtgaacgaacctgaagcttggatgatctggtcaagtaccaggacgagagatgctccccaagcggacatcatctaacaacactgacttagtgttatctcagacaagccccggtgtatttgccacctccttctgttttaaaaacttttatcacttacctgctgtattaggtgataggagttgtgtgaataaacaattgatgcattatcattccttggaatttgattatcctccttgctacttgttttataaagagaactaatgaggctaagcccttcctagagaactaaaacttgattatttttaaaagaatgttgtgtaacactgggtatgggtttgttttatgaaaaaggacttgtaatggtgagagcatcatctgtagtgatgaattcatcattcaagtatgatacctctgtctggtacatggttttgggaaggaaataataatatgagaccagacgttgagtaggaaaggtcgtccgtctgtatcgattaaggaccgtaccgaaagtaggcttgctgatctaggaccctttaactggccacatgcctcgtcatgggtaagcttagcctcggctggaccaatatcagaaaggccggctcgcaatgggagt

SEQ ID NO: 57512 - DNA, 1337 bp, Zea Mays
aggacttcgttcctatctcgtgctcagcgttatcttctccgtggcgctcatctccctgatattttcactgcgccgcggcttccagcgctcagcctccagctcccacgcgcactccacctcgtccatggccgccgatcgagtccctccccatctcctacaaccggccgccctgctcgttctccctagctgcgatgtggagctcgccctggacgatcgtccttgcccctcctctctgatctgcgtgcaggggtttccctcccatggcgcctggtcttcttcccttgactccatgccgagcgccccagtcgagctcgtcctggctccagcttcttccttggacggcggagccctcccattcctgcagcaggccagcgtccctctctccatcatcttctctgcttggttcctggcgagctccccctgctcttctgctcgccctggccctgtgccatttttccattcctgcggcaagcaccagtccctccccacgccaacatccctttcctacggacgctgcccctctctggtttctggtggccggccacctctgctgctcccatgtaaaatctctggagaattaggtggaggagaaggttaagttcaacgctccttaggtgttctatgaagtgcttgaactgaagttcgttgtcgttctgttcaccgcggttcgttaattgatcacgtgatgcggacgacaagagccgagttgatcccaaaatgatgctggtgaacgaacctgaagcttggatgatctggtcaagtaccaggacgagagatgctccccaagcggacatcatctaacaacactgacttagtgttatctcagacaagccccggtgtatttgccacctccttctgttttaaaaacttttatcacttacctgctgtattaggtgataggagttgtgtgaataaacaattgatgcattatcattccttggaatttgattatcctccttgctacttgttttataaagagaactaatgaggctaagcccttcctagagaactaaaacttgattatttttaaaagaatgttgtgtaacactgggtatgggtttgttttatgaaaaaggacttgtaatggtgagagcatcatctgtagtgatgaattcatcattcaagtatgatacctctgtctggtacatggttttgggaaggaaataataatatgagaccagacgttgagtaggaaaggtcgtccgtctgtatcgattaaggaccgtaccgaaagtaggcttgctgatctaggaccctttaactggccacatgcctcgtcatgggtaagcttagcctcggctggaccaatatcagaaaggccggctcgcaatgggagt

SEQ ID NO: 57513 - DNA, 1127 bp, Zea Mays
ctttacttttatggagaagatggggttgagagtaacgtaatagaagccagaaaaaactcaccgggaagaaggaaccagaagctaaccggcacgtcgtgaagctaaccgggattccgggaagcagagacgtccgcccgtcgcccgtcgtccgtcgtcatggccgccgtggaggtgtgcgtgaaggccgccacggggaagcccgacacgctcggcgactgcccgttctcgcagagggtgctgctcacgctggaggagaagaaggtcccctacgaggtgaagctcgtcgacctcgacaacaagcccgaatggtttctgaagatcagcccagagggtaaggtgcctgtgttcaacggtggtgatggcgaatgcattgctgattctgatgtaatcacccaaaccattgaggagaagttcccaactccatctctggtcactcctgtagaatatgcatcagtgggatcaaagattttcccagccttcatcacattcttgaagagcaaggatgctagtgatggttccgagaaggcgcttctggatgagctgcaggcactggatgagcatctcaaagctcatggcccctacatcaacggggagaacgtatcagcagctgatcttagcctggggccaaagctcttccacctccaggtcgcactggagcatttcaaaggctggaagatcccagaaaacctaaccaacgtccacgcctacaccaaggctcttttcagccgtgaatcttttgtcaagactaagccatccgaggagcacgtgattgcgggatgggcgcccaaggtgaacgcgtgtcacatctgtagcctagacacatgattcagttggaataaatgcagtgtcgtgtgatcgtgtctcgagtactcagttctggctgttgcaattgtgcgtgtctgttgccggtttcgttcgagaccatgggcatctcttgatctgctatgagagcatgcatatagtgtaacgtgggctccaaataatggaactgcttttatgcttgcggtgagccttgctttcatgattttctgttctctggtgaattggtggtagcctgagcatcaggttatcttctcttatggtcatatttctgacctggattttttcaagcgcatgttaatcgaaat

SEQ ID NO: 57514 - DNA, 1191 bp, Zea Mays
ctttacttttatggagaagatggggttgagagtaacgtaatagaagccagaaaaaactcaccgggaagaaggaaccagaagctaaccggcacgtcgtgaagctaaccgggattccgggaagcagagacgtccgcccgtcgcccgtcgtccgtcgtcatggccgccgtggaggtgtgcgtgaaggccgccacggggaagcccgacacgctcggcgactagggtgctgctcacgctggaggagaagaaggtcccctacgaggtgaagctcgtcgacctcgacaacaagcccgaatggtttctgaagatcagcccagagggtaaggtgcctgtgttcaacggtggtgatggcgaatgcattgctgattctgatgtaatcacccaaaccattgaggagaagttcccaactccatctctggtcactcctgtagaatatgcatcagtgggatcaaagattttcccagccttcatcacattcttgaagagcaaggatgctagtgatggttccgagaaggcgcttctggatgagctgcaggcactggatgagcatctcaaagctcatggcccctacatcaacggggagaacgtatcagcagctgatcttagcctggggccaaagctcttccacctccaggtcgcactggagcatttcaaaggctggaagatcccagaaaacctaaccaacgtccacgcctacaccaaggctcttttcagccgtgaatcttttgtcaagactaagccatccgaggagcacgtgattgcgggatgggcgcccaaggtgaacgcgtaagcacatcgtgatttggtgctaactggtggactccatccatttatctgatcagtcgttgtcagtggtgtgtgtaggtgtcacatctgtagcctagacacatgattcagttggaataaatgcagtgtcgtgtgatcgtgtctcgagtactcagttctggctgttgcaattgtgcgtgtctgttgccggtttcgttcgagaccatgggcatctcttgatctgctatgagagcatgcatatagtgtaacgtgggctccaaataatggaactgcttttatgcttgcggtgagccttgctttcatgattttctgttctctggtgaattggtggtagcctgagcatcaggttatcttctcttatggtcatatttctgacctggattttttcaagcgcatgttaatcgaaat

SEQ ID NO: 57515 - DNA, 1194 bp, Zea Mays
ctttacttttatggagaagatggggttgagagtaacgtaatagaagccagaaaaaactcaccgggaagaaggaaccagaagctaaccggcacgtcgtgaagctaaccgggattccgggaagcagagacgtccgcccgtcgcccgtcgtccgtcgtcatggccgccgtggaggtgtgcgtgaaggccgccacggggaagcccgacacgctcggcgactgcccgttctcgcagagggtgctgctcacgctggaggagaagaaggtcccctacgaggtgaagctcgtcgacctcgacaacaagcccgaatggtttctgaagatcagcccagagggtaaggtgcctgtgttcaacggtggtgatggcgaatgcattgctgattctgatgtaatcacccaaaccattgaggagaagttcccaactccatctctggtcactcctgtagaatatgcatcagtgggatcaaagattttcccagccttcatcacattcttgaagagcaaggatgctagtgatggttccgagaaggcgcttctggatgagctgcaggcactggatgagcatctcaaagctcatggcccctacatcaacggggagaacgtatcagcagctgatcttagcctggggccaaagctcttccacctccaggtcgcactggagcatttcaaaggctggaagatcccagaaaacctaaccaacgtccacgcctacaccaagccgtgaatcttttgtcaagactaagccatccgaggagcacgtgattgcgggatgggcgcccaaggtgaacgcgtaagcacatcgtgatttggtgctaactggtggactccatccatttatctgatcagtcgttgtcagtggtgtgtgtaggtgtcacatctgtagcctagacacatgattcagttggaataaatgcagtgtcgtgtgatcgtgtctcgagtactcagttctggctgttgcaattgtgcgtgtctgttgccggtttcgttcgagaccatgggcatctcttgatctgctatgagagcatgcatatagtgtaacgtgggctccaaataatggaactgcttttatgcttgcggtgagccttgctttcatgattttctgttctctggtgaattggtggtagcctgagcatcaggttatcttctcttatggtcatatttctgacctggattttttcaagcgcatgttaatcgaaat

SEQ ID NO: 57516 - DNA, 478 bp, Zea Mays
tatgtactattcagcccgacagcccccatgtgtcctgctgaattgatctctccggtttctgaagatcagcccagagggtaaggtgcctgtgttcaacggtggtgatggcgaatgcattgctgattctgatgtaatcacccaaaccattgaggagaagttcccaactccatctctggtcactcctgtagaatatgcatcagtgggatcaaagattttcccagccttcatcacattcttgaagagcaaggatgctagtgatggttccgagaaggcgcttctggatgagctgcaggcactggatgagcatctcaaagctcatggcccctacatcaacggggagaacgtatcagcagctgatcttagcctggggccaaagctcttccacctccaggtcgcactggagcatttcaaaggctggaagatcccagaaaacctaaccaacgtccacgcctacaccaagctcacctttgtctttgcc

SEQ ID NO: 57517 - DNA, 2142 bp, Zea Mays
ctctctcgtccaaatcaccgaagacaaccagcacattaaaattcttcccaaccttcccaaaatgccccccaaccgccccgcttacctgctctccgccctcctcctcgccgccgccgccgcggccgtcggcgcgcgtcgccacgcgtcgccggccgcgaacgctaccttcgccggagagcccgtctacctctggccgctgcccaagagcgtctcgtccggatcccggacgctgacggtggacccggacctcgcgctcgacccgcagggcctcggcggccgctccccggccgtggccgaggcgttccagcggtaccggggcctcgtgttcgcgccgtgggcgcacgccgcgcgcgcgggccgcgcgcggtacgacgtcaccaggctcaccgtcgtcgttgcctccgccaacgacacgctggcgctgggggtggacgagagctacgccatctacgtggcggcggccgggggcgtcgattccatcgtcggaggagcaatcattgaggcaaacacaatatatggagctattcgaggactggaggtatggactgagtgcgcaggaattcagtcaactttgtgttttcaactatgacaccaaaaatgttgaagtgcacaatgctccatggcatatccaagatgagccccgctttgcttttcgtgggctgctcctagacacctcaaggcattatcttccagttgatgttattaagcaagtgatcgactctatgtcatttgctaagctgaacgttcttcattggcatatcatcgatgagcaatcctttccattggaggtgccaacatatccaaacctttggaaaggttcatactccaaatgggagcgctacaccgtggaagatgcacatgatattgtcaactacgctaagaaaagaggtatcaatgtgatggcagaaattgacgtgcctggtcatgcagaatcatggggaaatggatacccaaagctctggccttctcccatttgtacagagccattagatgtctctagtgatttcacatttgaagtaatttttggaattttgtctgatatgaggaaaatctttccattcgggctgtttcacttgggtggtgatgaagtatacacagggtgctggaacacaacgcctcacgtgcggcagtggatggacgagcgcaaaatgaccacgaaggacgcttacaaatacttcgttctgaaggcccaggagctggcgatcaagctgaactggactcccgtgaactgggaagaaaccttcaactcgttcgaagaaaacctcaatccactgacggttgtgcacaactggctggggcccggagtctgcccaaaggttgtggccaagggtttcagatgcataatgagcaaccaaggcgtctggtacctggaccacctcgacgtcccctgggaggacgtctacagcggcgagccgctcgccgggatcagcgacagagagcagcagaagctggtgctcggcggggaggtctgcatgtggggcgagacggccgacacgtccgacgtcctgcagacaatctggccccgagccgccgcagcggcagagcgtctgtggagccagctggaggccatatccgcccaggacgtcgagacgaccgtgctgtcacggctacaccgcttcaggtgcctgctgaaccaccgtggggtcgccgcggctcctgtcacgaactactacgctcggaggccgccggtcggcccgggttcgtgcttcgttcagtaaagcaagcagccaagcaggaagtcgaaataaaaccgcaccgttcaaacctccttcgagctcgggcagtactgcatttgttttctggcggcggggtgcgtcgctgtcggggaccggacgccatcttttcctcagtttggccttgacctgaaacccgctggtccaagctgcgcattaatggcgcgtgtaatttgcgaccacctgttgtgcttgggtggtttggagtgacgacaatgggtttggcaccttgttctatacttccaatatagagagagaggtcactgtccttcccatgccaccttcttcattgcccatgtatgtctttggccttttgctctatctatatatatctactgcccctatttcttaactattgggagcctaaaatcgagataaaattgaaagggctaaattttagcccctttaa

SEQ ID NO: 57518 - DNA, 2283 bp, Zea Mays
ctctctcgtccaaatcaccgaagacaaccagcacattaaaattcttcccaaccttcccaaaatgccccccaaccgccccgcttacctgctctccgccctcctcctcgccgccgccgccgcggccgtcggcgcgcgtcgccacgcgtcgccggccgcgaacgctaccttcgccggagagcccgtctacctctggccgctgcccaagagcgtctcgtccggatcccggacgctgacggtggacccggacctcgcgctcgacccgcagggcctcggcggccgctccccggccgtggccgaggcgttccagcggtaccggggcctcgtgttcgcgccgtgggcgcacgccgcgcgcgcgggccgcgcgcggtacgacgtcaccaggctcaccgtcgtcgttgcctccgccaacgacacgctggcgctgggggtggacgagagctacgccatctacgtggcggcggccgggggcgtcgattccatcgtcggaggagcaatcattgaggcaaacacaatatatggagctattcgaggactggagacattcagtcaactttgtgttttcaactatgacaccaaaaatgttgaagtgcacaatgctccatggcatatccaagatgagccccgctttgcttttcgtgggctgctcctagacacctcaaggcattatcttccagttgatgttattaagcaagtgatcgactctatgtcatttgctaagctgaacgttcttcattggcatatcatcgatgagcaatcctttccattggaggtgccaacatatccaaacctttggaaaggttcatactccaaatgggagcgctacaccgtggaagatgcacatgatattgtcaactacgctaagaaaagaggtatcaatgtgatggcagaaattgacgtgcctggtcatgcagaatcatgaatttggcccatgctccgtgactgcacctgagtacagcatatgtccaacggggaaatggatacccaaagctctggccttctcccatttgtacagagccattagatgtctctagtgatttcacatttgaagtaatttttggaattttgtctgatatgaggaaaatctttccattcgggctgtttcacttgggtggtgatgaagtatacacagggtgctggaacacaacgcctcacgtgcggcagtggatggacgagcgcaaaatgaccacgaaggacgcttacaaatacttcgttctgaaggcccaggagctggcgatcaagctgaactggactcccgtgaactgggaagaaaccttcaactcgttcgaagaaaacctcaatccactgacggttgtgcacaactggctggggcccggagtctgcccaaaggttgtggccaagggtttcagatgcataatgagcaaccaaggcgtctggtacctggaccacctcgacgtcccctgggaggacgtctacagcggcgagccgctcgccgggatcagcgacagagagcagcagaagctggtgctcggcggggaggtctgcatgtggggcgagacggccgacacgtccgacgtcctgcagacaatctggccccgagccgccgcagcggcagagcgtctgtggagccagctggaggccatatccgcccaggacgtcgagacgaccgtgctgtcacggctacaccgcttcaggtgcctgctgaaccaccgtggggtcgccgcggctcctgtcacgaactactacgctcggaggccgccggtcggcccgggttcgtgcttcgttcagtaaagcaagcagccaagcaggaaggtaccctcctacccacgccacgaggtgctctgccttcgtgtaccatatctgtgtgtaatccacggaaacaatctgtataataatctgtctccgttttcgatttcccaaagtcgaaataaaaccgcaccgttcaaacctccttcgagctcgggcagtactgcatttgttttctggcggcggggtgcgtcgctgtcggggaccggacgccatcttttcctcagtttggccttgacctgaaacccgctggtccaagctgcgcattaatggcgcgtgtaatttgcgaccacctgttgtgcttgggtggtttggagtgacgacaatgggtttggcaccttgttctatacttccaatatagagagagaggtcactgtccttcccatgccaccttcttcattgcccatgtatgtctttggccttttgctctatctatatatatctactgcccctatttcttaactattgggagcctaaaatcgagataaaattgaaagggctaaattttagcccctttaa

SEQ ID NO: 57519 - DNA, 1833 bp, Zea Mays
gttttatatcataatggactaaataatggttagtgattgaagctcataatgcagttgagataaactattgagcaacactggcagctgtacaaatagttgaaggcaaacacaatatatggagctattcgaggactggagacattcagtcaactttgtgttttcaactatgacaccaaaaatgttgaagtgcacaatgctccatggcatatccaagatgagccccgctttgcttttcgtgggctgctcctagacacctcaaggcattatcttccagttgatgttattaagcaagtgatcgactctatgtcatttgctaagctgaacgttcttcattggcatatcatcgatgagcaatcctttccattggaggtgccaacatatccaaacctttggaaaggttcatactccaaatgggagcgctacaccgtggaagatgcacatgatattgtcaactacgctaagaaaagaggtatcaatgtgatggcagaaattgacgtgcctggtcatgcagaatcatggggaaatggatacccaaagctctggccttctcccatttgtacagagccattagatgtctctagtgatttcacatttgaagtaatttttggaattttgtctgatatgaggaaaatctttccattcgggctgtttcacttgggtggtgatgaagtatacacagggtgctggaacacaacgcctcacgtgcggcagtggatggacgagcgcaaaatgaccacgaaggacgcttacaaatacttcgttctgaaggcccaggagctggcgatcaagctgaactggactcccgtgaactgggaagaaaccttcaactcgttcgaagaaaacctcaatccactgacggttgtgcacaactggctggggcccggagtctgcccaaaggttgtggccaagggtttcagatgcataatgagcaaccaaggcgtctggtacctggaccacctcgacgtcccctgggaggacgtctacagcggcgagccgctcgccgggatcagcgacagagagcagcagaagctggtgctcggcggggaggtctgcatgtggggcgagacggccgacacgtccgacgtcctgcagacaatctggccccgagccgccgcagcggcagagcgtctgtggagccagctggaggccatatccgcccaggacgtcgagacgaccgtgctgtcacggctacaccgcttcaggtgcctgctgaaccaccgtggggtcgccgcggctcctgtcacgaactactacgctcggaggccgccggtcggcccgggttcgtgcttcgttcagtaaagcaagcagccaagcaggaaggtaccctcctacccacgccacgaggtgctctgccttcgtgtaccatatctgtgtgtaatccacggaaacaatctgtataataatctgtctccgttttcgatttcccaaagtcgaaataaaaccgcaccgttcaaacctccttcgagctcgggcagtactgcatttgttttctggcggcggggtgcgtcgctgtcggggaccggacgccatcttttcctcagtttggccttgacctgaaacccgctggtccaagctgcgcattaatggcgcgtgtaatttgcgaccacctgttgtgcttgggtggtttggagtgacgacaatgggtttggcaccttgttctatacttccaatatagagagagaggtcactgtccttcccatgccaccttcttcattgcccatgtatgtctttggccttttgctctatctatatatatctactgcccctatttcttaactattgggagcctaaaatcgagataaaattgaaagggctaaattttagcccctttaa

SEQ ID NO: 57520 - DNA, 1914 bp, Zea Mays
cacctttttgttttcgaattttaattggcttttaagtttaagcctgctgattagtggcagagcctggacaagaaatgagaagggaccaatatgacatgaaatgaatgcagatgggaccagatttgtattttggtagcacttaaaggaacaaaattaagtacttcgttaagaatttatctagcagcatggtggccatgtccctctttggtcctcactaagctccaccgccactgctgacattcagtcaactttgtgttttcaactatgacaccaaaaatgttgaagtgcacaatgctccatggcatatccaagatgagccccgctttgcttttcgtgggctgctcctagacacctcaaggcattatcttccagttgatgttattaagcaagtgatcgactctatgtcatttgctaagctgaacgttcttcattggcatatcatcgatgagcaatcctttccattggaggtgccaacatatccaaacctttggaaaggttcatactccaaatgggagcgctacaccgtggaagatgcacatgatattgtcaagtatcaatgtgatggcagaaattgacgtgcctggtcatgcagaatcatggggaaatggatacccaaagctctggccttctcccatttgtacagagccattagatgtctctagtgatttcacatttgaagtaatttttggaattttgtctgatatgaggaaaatctttccattcgggctgtttcacttgggtggtgatgaagtatacacagggtgctggaacacaacgcctcacgtgcggcagtggatggacgagcgcaaaatgaccacgaaggacgcttacaaatacttcgttctgaaggcccaggagctggcgatcaagctgaactggactcccgtgaactgggaagaaaccttcaactcgttcgaagaaaacctcaatccactgacggttgtgcacaactggctggggcccggagtctgcccaaaggttgtggccaagggtttcagatgcataatgagcaaccaaggcgtctggtacctggaccacctcgacgtcccctgggaggacgtctacagcggcgagccgctcgccgggatcagcgacagagagcagcagaagctggtgctcggcggggaggtctgcatgtggggcgagacggccgacacgtccgacgtcctgcagacaatctggccccgagccgccgcagcggcagagcgtctgtggagccagctggaggccatatccgcccaggacgtcgagacgaccgtgctgtcacggctacaccgcttcaggtgcctgctgaaccaccgtggggtcgccgcggctcctgtcacgaactactacgctcggaggccgccggtcggcccgggttcgtgcttcgttcagtaaagcaagcagccaagcaggaaggtaccctcctacccacgccacgaggtgctctgccttcgtgtaccatatctgtgtgtaatccacggaaacaatctgtataataatctgtctccgttttcgatttcccaaagtcgaaataaaaccgcaccgttcaaacctccttcgagctcgggcagtactgcatttgttttctggcggcggggtgcgtcgctgtcggggaccggacgccatcttttcctcagtttggccttgacctgaaacccgctggtccaagctgcgcattaatggcgcgtgtaatttgcgaccacctgttgtgcttgggtggtttggagtgacgacaatgggtttggcaccttgttctatacttccaatatagagagagaggtcactgtccttcccatgccaccttcttcattgcccatgtatgtctttggccttttgctctatctatatatatctactgcccctatttcttaactattgggagcctaaaatcgagataaaattgaaagggctaaattttagcccctttaa

SEQ ID NO: 57521 - DNA, 1738 bp, Zea Mays
catgtccctctttggtcctcactaagctccaccgccactgctgacattcagtcaactttgtgttttcaactatgacaccaaaaatgttgaagtgcacaatgctccatggcatatccaagatgagccccgctttgcttttcgtgggctgctcctagacacctcaaggcattatcttccagttgatgttattaagcaagtgatcgactctatgtcatttgctaagctgaacgttcttcattggcatatcatcgatgagcaatcctttccattggaggtgccaacatatccaaacctttggaaaggttcatactccaaatgggagcgctacaccgtggaagatgcacatgatattgtcaactacgctaagaaaagaggtatcaatgtgatggcagaaattgacgtgcctggtcatgcagaatcatggggaaatggatacccaaagctctggccttctcccatttgtacagagccattagatgtctctagtgatttcacatttgaagtaatttttggaattttgtctgatatgaggaaaatctttccattcgggctgtttcacttgggtggtgatgaagtatacacagggtgctggaacacaacgcctcacgtgcggcagtggatggacgagcgcaaaatgaccacgaaggacgcttacaaatacttcgttctgaaggcccaggagctggcgatcaagctgaactggactcccgtgaactgggaagaaaccttcaactcgttcgaagaaaacctcaatccactgacggttgtgcacaactggctggggcccggagtctgcccaaaggttgtggccaagggtttcagatgcataatgagcaaccaaggcgtctggtacctggaccacctcgacgtcccctgggaggacgtctacagcggcgagccgctcgccgggatcagcgacagagagcagcagaagctggtgctcggcggggaggtctgcatgtggggcgagacggccgacacgtccgacgtcctgcagacaatctggccccgagccgccgcagcggcagagcgtctgtggagccagctggaggccatatccgcccaggacgtcgagacgaccgtgctgtcacggctacaccgcttcaggtgcctgctgaaccaccgtggggtcgccgcggctcctgtcacgaactactacgctcggaggccgccggtcggcccgggttcgtgcttcgttcagtaaagcaagcagccaagcaggaaggtaccctcctacccacgccacgaggtgctctgccttcgtgtaccatatctgtgtgtaatccacggaaacaatctgtataataatctgtctccgttttcgatttcccaaagtcgaaataaaaccgcaccgttcaaacctccttcgagctcgggcagtactgcatttgttttctggcggcggggtgcgtcgctgtcggggaccggacgccatcttttcctcagtttggccttgacctgaaacccgctggtccaagctgcgcattaatggcgcgtgtaatttgcgaccacctgttgtgcttgggtggtttggagtgacgacaatgggtttggcaccttgttctatacttccaatatagagagagaggtcactgtccttcccatgccaccttcttcattgcccatgtatgtctttggccttttgctctatctatatatatctactgcccctatttcttaactattgggagcctaaaatcgagataaaattgaaagggctaaattttagcccctttaa

SEQ ID NO: 57522 - DNA, 3011 bp, Zea Mays
ccggcgcctcctataaaccctcacccactagggccaccgcttccccttcttcatttctttccttcctccatcccctaccccgttccccgtcgttcgagaggaggggcgagcgaccaactggtagcgatctggtgccccgcgcccgcgccgatccgccgcgccccggccggatttgccgccgtgggcggatcagcgtccgtcgccgcctggggaggctccagtacgtggcctgtccatggcgacccccgatgacggcccggccccggccgggcccggggtccgcaagttctggcgttccgcgtcgtggtccgagccgcgggagccgctgccggacgccgcggcggggcccggggcagcgggcgggcggtcccggcgcgtgccgccgccgccgccgctcaccccgcggtcgatgagctccaaggcgcggtcctgcctcccgccgctgcagccgctcgccatcacgcgccgaagcttggacgagtggcccagggccggctccgacgacgtcggcgagtggcccaaccccaccacgcccggcgcgtccaaggcgggcggcgggccctcctccgccaggccaggggaggggctccggctcgacctctcctcgctccgctcgcagggacgcaaggaccagatcgccttctttgacaaggagtgctccaaggtcgccgaccatgtatacctcggcggcgacgccgtcgctaagaaccgcgacatcctcaggaagaacggcatcacccacgttctcaactgcgtgggcttcgtctgcccggagtacttcaagtctgaccttgtctaccgcaccctctggctgcaggacagccccaccgaggacatcaccagcatcctgtacgacgtgtttgattactttgaggatgtcagggagcagggtggccgcgtgtttgtgcattgctgccagggggtgtcgcgctccacgtcgctggtcatcgcctacttgatgtggagggaaggccagagcttcgatgacgccttccagtttgtcaaggctgcccgggggattgcgaacccaaacatgggctttgcttgccagcttctccagtgccagaaacgggtgcatgcgattccgttgtctccaaattcagtgctcaggatgtaccgcatggcgccgcactcccagtatgcccctctgcatttggtgcccaaaatgctcaatgacccatcccctgccgcactggactctagaggcgccttcattgtacacgttctgttgtccatctatgtctgggttgggatgaagtgtgatccggtaatggagaaggatgcaaaagctgctgcgtttcaggtagtgaggtacgagaaggtgcaggggcacatcaaggttgtgagagaaggtttggagccacaggagttttgggatgcattttcaagtacgctgcctaattcagatactaatacaaagattagcaaggaccagatcgattcagcatccaagagtaacccaggaagccggataattgagtcttatgacgctgattttgagcttgtctataaagcaatcaccgggggagtggttccagcgttctcaacttctggggctggggacgagacccaccttccagccagagagagtagctggagtttactgaggcacaagttcatctccaggtcgctagctcgtgtttattcagattctgctctaatcagggattttgatccacgggtagaccgtgtacagcacctggctgctgaggcatcgacctcacctcctttcctttctccaagctccttctcatcggattcaagcgccagctcgaagtataattcagattcaccctccttatcacctacaactagctccccgccatcatttggcctctcgcctgcttcatctaatctgcctcaagctcttgtgccatcgtccaggtctcctctttctcaatcatctaatgcaggggcttcaaagccttctggcctggaatcaatacgccatccttccaagacctcttctatagcagaaagaagaggaggcttcacacttctaaagctaccatctctccaaaaggaccttgtattgccaccaagggtaccgtctagtattcgcagaactgacgaggccttggataagagttgtacaaatggtgtcaaaaggccgactggtgattttcgctcagaaaaatgcactgataatagttcaagcttgcattccgaaaccagattaactgagcgtactgacagtaactcagaagcttgcagtaatgtgcaactgttggtttaccagtggcccagcatggaaaagctaactacgtttgcacgcaaggatcttgactcaaactcggttttgatttttgttacatcgaatgccatcagaagagaagcagttaaaatggtgtatgtgtgggtaggaggcgaaattgaaagcagcaagagtgttaatgctgttgattggcaacaggtcactggtgattttcttcatcgaaaaggcctcagcgatgctcttcctataaaggttttcaaggagcatgaaacagagaatcttttggaactactgaattttagttaacattaggcggtagctatcaggatattgtagttgcttaacaaactcacccaccccacaaattgtcattcaacgaaggcatgccctccagcatcagtcggtaccgatgattgtcagcgaggtataaagcctctaccatccccttcccttgaacataacaggccctacagacagattccattttagtagaagcggtggatcgacaactgcgcctcgttggtctatcttttgtccaaatggcaggatgctgccaatgggcgttgtaagcgcaatcagccaattgggtggtaatgtaagctttagctttagatactgggagatggtctgtcaacagttacttttagcctaaacattcttgtacatctttgaaagtgaacagatttgtaatccttgtggcatataaatggtaacattgttcataacttttaaactgatatagaacccagttgttaaatataaatggattctaatctaatatcatagcttcctacta

SEQ ID NO: 57523 - DNA, 8280 bp, Zea Mays
agtgcggcaggggatgggtcattgagcattttgggcaccaaatgcagaggggcatactgggagtgcggcgccatgcggtacatcctgagcactgaatttggagacaacggaatcacatgcacccgtttctggcactggagaagctggcaagcaaagcccatgtttgggttcgcaatcccccgggcagccttgacaaactggaaggcgtcatcgaagctctggccttccctccacatcaagtaggcgatgaccagcgacgtggagcgcgacaccccctggcagcaatgcacaaacacgcggccacgctgctccctgacatcctcaaagtaatcaaacacgtcgtacaggatgctggtgatgtcctcggtggggctgtcctgcagccagagggtgcggtagacaaggtcagacttgaagtactccgggcagacgaagcccacacagttgagaacgtgggtgatgccgttcttcctgaggatgtcgcggttcttggcgacggcgtcgccgccgaggtatacatggtcggcgaccttggagcactccttgtcaaagaaggcgatctggtccttgcgtccctgagagcggagcgaggagaggtcgagccggagcccctcccctggcagcaatgcacaaacacgcggccaccctgctccctgatgtcctcaaaataatcaaacacgtcgtacaggatgctggtgatgtcctcggtggggctgtcctgcagctagagggtgcggtagacaaggtcagacttgaagtactccgggcagacgaagcccacgcagttgagaacgtgggtgatgtcgttcttcctcaggatgtcgcggttcttgacgaccgcgtcgccacagaggaccttggagcactccttgtcgaagaaggcgatctggtccttgcgtccctgcgagcggagcgaggagaggtcgagccggagcccctccccgggcctggcggaggatggtccgccgcccgccttggatgcgtcgagcgtggtggggttgggccactcgccgacgttgtcagagccagccttgggccactcgtctaggctgcggcgggtgatggcgagcagctgcaacgactggaggcaggaccgcgccttggagctcatcgaccgcagggtgagcggaggcggcgggacgcaccgcaattgcctgccaccgccgcctgctgccgccctcaccttagcctataaagagtgcggccagagaagcctagacaactgaggcacatacggacaagcacaactttactgaggtagaacgccccgttttaccacggcgcaatagctcttccttaagaagctactggtaaccgacccccaccttagcctataaaaggaggatcgagcacgaaggaaaaggagagacgcacacgatatgcggacaaccacacgtcggaagactacagaggccggagtcgagcgcgccgccacgaagcccaaggcttagctaggttgagagcaccagattcgtagtacttaggccactccacacacaagacttgggagcctcctcccccctcgcccgcttgtaacacctactacaagcattgagcaataaaggtgtcggtagcgcgagccaccaaagactggatgtagggacgttctgtccgaaccagtataaatcccgagaccatcgggctcaccaaccggaccccagaacacgcacaaacaaatttacttgtcggagctggttcaaaacacagttggcgcgccaggtaggggttcgtgcgcgatctcgacgcattctccaagctccagatggtcggtcgcgacgtcgtttggacccccggaacgaccatccatttcgggagcctcgactttattatcaacgacgaaggggagatggtcagggccccgaaagaccgaccccttccgcccggcgaccttgacaccatcacggaggccctaggcggcctctgcctcgcggcctcgccccgcagaggctttatttgtgcctccacccatttatttccacggttgtgcctttctctctggcggtgtttatgtctttctctttggctgcacgtgagtgggggtgctgaagtgtataagtggattgactaccttctctcatcagctcaagcttttgggttgaactggttagtgtgtccactctaacacaaaaaaccgatagtacccttggtggcaatacaagatccttttgagagatggtagctttagaagtgtgaagcctcgtcgtttgggcgtccacaggagcaccctatcaagaggattcctgaagacctttagggaagtgcttcaattgcccttcgccatcccacagtgcggttgtttgccagtgtcgtacgcgctgctttcgctgcctcacgcttgggcatcgttcttacgtgtgcccgaggaggtcggtagtcgagcagccagtggcccgagctcgcgcacctagacgagacttctccatgtcgcgtcatgtaatggtctggcgccatgtgtcctctacaacttctcatcccaacgacctctacagccattggtcgtgacgccgcaagggacagggtggatgcctctttgttcctaacgatcctccacgcaagacgactaggtgtgggcgcaggcggcagggagctagtcatggggcgtctggtgactccaacccggtgccgcactcccctgttcatgtgtccccagagcgtcctgtgtgtctagtgcatttcctccaacgctccaccgcgatcaaccacatggaagacggcgcgctctgcttatcacggtcatcggagataatcaaatggtcgacatcccagagatttctaatgtgctcgccgcaaggttcaacctagaggttggtgcactcaatctccgtcgagcttcgtcggacgcctacattctcatcctccccaacgagagtatggcgctgcgagtctacaacgggggaaggtcgttcatcacttcaactttgcgcttacaccttcggcggtggacgcgccaatcctgtgtggctcgtggagcttcgcttccaatcctggtcgacattgagcaactgggagtcccagagcacgtctggagcaaagaattagtggagctactccttcatgactcctgcatgatccagaggctgcattcagacacaaaatcctctcctgatttctcttccttcaagcttagtgtctggtgtgcccaccttgagcttattcaccaggctgtgaatctacacattgaagaattgatgctctagttggatggtgcaccgttggagacccgcacattgttctacccgatcaagattgcagtctttctaatgtctggatcagctccgctgatggttcctccttcctcaccaccggattccccttctcctagaagtgatcgtaaagatgatagacgactgtggcggcacaatctgtaagcaacaggactcttactctcatcgagaggatgacactatgggttggggcgattttctgtttattttctcaaacactacacaatgtcatacccgtctaagggttgggatacatatttatagcccaaggggctgcagcatatgcttcctagagatgtgaatatgctatcctacaaactgcactacctgtcctacaaactgcactaaccactaggtgttgtactctagtcaaaagaaaactgcagcaaactgatgtcctccaaaagctagaaaagcgaaaaggagatgactgcagcgcgctgtccttgcagtcaaaagattgacatgctgttgctgtcccacgttgtccttgcagtcaaaaagattgagatgctgttgtccctgcagtcaaaaaccgctaaggactgctgttgtccttcccacagaccacgagacttattccaacaattctccccctaagtcttgtgtgtcgtcttgttgggccatcccggacctagagcaaagctcaagaaacttgatcctcccaaggggcttggtgagcaggtctgcaagctgatccttggggttgatgtagcgcgccttgatgctcccttctgccaaacagtcacggatgaagtggtacctcacccggatgtgcttgtttcgttcatggaacacggggttcttaaccaacgtcagggcagactggctgtccacccggagttccactgctccaacgtctctcccgaggagatcactgagcaggcgagcaagccagagcgcctgagttgaagcggtggaggctgctatgtactcggcctcgcagctggacatggccaccacctgctgcttgaccgactgccagctgatggggcacttgccgaggaagaagaggatctcgcttgtgctcttgctggtgtcgatgtcgccggcgtggttgctgtacccgacaaggtgtgcctccccagggcacctcgggtagtagagactgtggtcaagagtccccgtaacatagcggacgatcctcttcacagcctgctcatgctccatcgtcggttgctgcaggaaccgactaacgtagccaacggagtatgccagatccgatcgtgtgtggacgaggtagcgaagactccccacaagacgccggtactgagtagcgtccacctcctccgtcgtgctatcacggctcagcttcagcctctcctccatcggagtgagagctgggttgcaattagtgagcccagccagctcaacaatgcgcttggcgtaggcggtatggcgaagtgtgatcccagagtcactctggtgcacctcaatccctaggtagaaggagagatgccccaggtcactcatctggaagatagccttcatctcttccttaaacgtcgtcacctctgcatccttgacgctggtgatcaccaaatcgtcgacgtagacacctaccagcagggcattttctccattgccccgccgatagatggccgcctcatgcgggcttagcatgaagctcatcctcttgagcgtggagtccagcttgacattccacgccctcggtgcctgtcgcaacaccttgccctccttgccagagatcgcaaaacctggcggctggtatacataggcctcctcctttaaatcgccgttaagaaacgccgacttgacgtccatgtgatgaacgtgccagcccacctaggctgacagcgcaaggaggagtcgcacggattccatccgtgccacggggggaaagcatcgtcgaagtcgatcccctcctgctgtaaaaaatcgcgtgccactaagcgagtcttatgcttgacgatggtgtcggcttcatccctctttagtttgaacacccacttaaggatgatcgcgcgatgaccatgagggagatcagtgagctcccaggtgcggtttgtctcaaccgcgtccatctccgactgcatcgcggcacgccaaggtccgtgtttctcggcctcggcgaaagaccgaggctcgccattgtcgcatgcaagatgcaactcttccgccagaatgcgagacgttgggcccgacatcgacgggtcgatgagaaggccctccacctttcgatatcgcaacgactcgccgttgtagcacgcgtcgacgcgctcctcgacgtgggagagcagggtcacgagctccactgggttgtgctcgacacgagctggcgtcggagaggacattcccggagagggtaccatcggtgctggagtacgtggtgacggagagctcgctggagccggagtcgtggctggattgcgtggtggcaaagagctcgttgtagccggagctggagagcgtggcgctggagtcggtggagacttgggggctcgggtaggcctactcggagaagggtcgcctactctcccggctccctcaaagtggacgtacttgatggtgaagtcatcgcacgacggtcgtcgtccaccgccttgtcctaggcccatcctcgcccttcgtcaaacactacgtcgcgcgccgtgcgcacacgcagtgttcctgggtcaaggatgaggtaggccttcgagtcatccgcgtagccaatgaacacccctggggtgctcctgtcgtcgagcttaccgatatggccaagctccttggtgaacgcgaggcaaccgaagacccataggtgagagaccgacggcttgcgcccatgccaagcctcatacggtgtcatcccattgagtgtcttggtgggcgagcggttgaggatgtagaccgttgtcaccaccgcctctccccagaagacagccagcattctcctctgcttgaggagagcccgagccatccccacaaccgtctggttgtgccgctcgacgacgccgttctgctgtaggttgtacggcgcggagtagtggcgttgaacgtccttatccgcacagtacgacgaggactcaaccgctatgaattcaccgccgttgtcggtgcgcagcacacagcttgcgaccgcactccgcctccgcagcgacctgcacgcgcttgatggcgttcgcagcccctcccttgctgccaaggaccatcacccacatgtagcgggagaggtcgtcgacgagcagcaagaagtagcgtcgtcctcctggtgtggctggtgtcaccaagccacacaagtccccatgcacgagctcgagtctctccttggctcggaagctcgactgctggggaaaggggagtcgtctctgctttgtcaacacacaaacatcgcagaattgctccacatggtcaaggtacggcagacctcgtaccatctccttggcactgagtcgcttcagggcctcgaagttaagatgcccaaagcgctcgtgccaccttcacgttgaggatgtaaagccgatttggactcctgcgtaccttggcaagaaggcgacgagaggggtctcagatcctcatgactccttgctcgacctccacgcgcgaaccgttctcatccagctgtcccaagctgatgatagagttcctcaacgcatggatgtagtagactccggtgagcaccctgtgctcaccagacgcggcggtgaatatgactgagccggtgcccttgatctctacgccggaggagtccccaaacttgacagagcctcgaatgctagagtcgagctcggtgaagaactcccgttggtcggtcatgtgatgagtggcgtcggcgtcgaggcacctgttgagggtctttctcttccgaaggtcctcaaaaacatgattaaccatttgtttccagcatgatatagattgttacagggagcttcgcctttagaatggaagttctccccctataatgaaggcatacgtgatgaagatgtgacctgaagatgataagaacgaacgtcgaagctattgccaaaaagtaacagcttcggcttataatggtaatgaagactaaaaatgatgttggacgaaagggaaaaagactgcttagtccttaatgattcatgttatggttttaagcaaatgccagggatataaatgtaattttacctgtgctacgtctcgcgcctataaatagatgaacagtagcactgtactgtacacgctgaattgtattcgccctcacgtcaacgccttcgagcaagccgaaggtatcaatgtaatatacaatctgttaatactcatgcatgctttacggaatgcaaacatgaatggatcgataagttatacttgccatttctatctctttgtattttgatttatctataaggtgatgaagacatgtccttcataaccttcgtctaatgaacattatgtccttagggagataatgcttcggcaaacgaaggtccttaatacttaacaattgtgttgtcttattcttgattcacaacatttgagaacaagtgacaaacaacaccatccttcgatcatgtcgttgttgtagccgtcgccaaggaaagcgcgtgctttcgactcatcaaggtggaggagtgctgctgcggccggtgacgctggagatatctcgatgcttgcgtgtgctagaagcagagcttcctactccgcctccgcctgtgcgacgttgccctggccacgtcgtggctgtcgacattccctggcccagtggccaagcttgccacagttgtgacaaccgtcatctcgtgtcggcttcttgttgccgacggcaccggcttgggcgcctccacggccaccaccctcagcttgtcctcgcgcctcggcctgggcgcctccgcgcggcttgtcgcgtttgtggccccgtgtcgaggacccccccttcttcttgtcaccttggcaggcctcccactgctcccgagtgagatgtagcttcccgccgatggtgataggcccagagagggcctatggttcatcttcgtcgacgaccttgagacgaccaatcgcttcttcgatcgtcatcgtggagacgtctagcagagactcgattgagcgagcgatctgcttgtacttctcagggatgcaacggaag

SEQ ID NO: 57524 - DNA, 1480 bp, Zea Mays
acgcaccacgatgctctatcgcttagccatgtccaccatgcattatactatgctctgtagctaagctagctgactagctctatctctctctcgctccctagcccagcaagtggacctcgtataaaggggaggccagctgagctcaaggaatcaaactagctagcaataagctacagagcactgcctgttgtttcttcttcctcctctctcccctctcgatcgatcgatccaacaagctaagcttggtccttgctttctagctgcctggtacggtctagcgaccgatcgatcgatcgatcgaccatgtcgtccttgctatgtattagccgcaggaacaacaagaaggacagcgatggcgatggagagtacggtggcgagcagatcatcatcagcacgggcggcgcggccatgaggaagggcccgtggacggacgaggaggacgagcagctggtctgaggcgcaccggcaagagctgccgcctccggtgggtgaactacctccacccggggctccggcgcggccgcatcacggccgatgaggagcgccgcatcgtggagctccacgcgcagtggggcagccggtggtcgcgcatcgccaggagcctgcccgggcgcaccgacaacgagatcaagaacttctggaggacgcggaccaggaagaaggcgctcgaggagaggagggctgccgcagcagcaacgtcgacggcggcggagtcggcgtcctcggtgatgacggtgtcgtcgtcgtccgagtgccgccgcccgcccgtatcgtcgtcgtcgtcgtcgtcttcgctacggcgggacgaagcgcggcgcagcggcgacgagaccgaggaggcgtccacgcccaccgcggcgccggcgaccaagcacgatgaggaaccccagccgcagccgcaggagtgctacgacttccccatggaccagctgtggaacgagatcgcggcagccgatgcggcggcgatgagctaccttgtcgtggacgcctgctggggcggagctgctgttggtggtcactgttattactacggcgccgccgcagcctcagccgcctcgccgccgccgccggcctcgccgccgtgggagtactgcggctccgatttttcgctgtggaggatcgacgaccaagagtactacaagaagatgctcgactcctcctcctgatcccggcccgcgactcatatcgtttggcgaggacacacgtacatacgcgctctgtgaatttgctagctcatatatattatccaggcgaggcgaggaacgagctgagatcatggtggtgagatgagatgagatgagatgagagagtagtgtgtattaatggtggttcagatcgagtagtgtgataaattaacagaatatatataataatttacgcttctctccgaatccatatatcgatagatgatcgaccgatacttatatattctgtagcatctacacgtacgccttattagctattactacttgaaatccat

SEQ ID NO: 57525 - DNA, 1348 bp, Zea Mays
cacaataacagtgcacgtcaccatgatacgtgctcctatatttgtgtgtatatatttattactacaaaagagaaagagagagagagagagagttagcagcaattcaacttgtccagcatgcagttagtgaccgtcaattttttatatttccactagtaaccttctttctacccgtcactaatcactagacgacattgctgcgccaccgtggatcgggttggtcctcatcgaaggatggatggaggcagtagagtaaatcgtctgaacagcccagctgagagcctgtctgagattagcgcaacaaccatctgattagtactgctgtgaagactggagagatgatagacgagggaggaaggagggtctttacttgagagaggacgaaggcggtagtaaaccaagcaagcatcatctggggatagacatggaagcatggaaagtgttccgccgaatcctccgtatcgctttcctggcaatatctgcaaggcttggtaaatggtggacaggcacaggcacgcggaagatggtggtaaatggtggacaagcaggcggtgactgtcgtcgtcccggaaagaccttgtcgcacacgtacctcaccataaactccagagaagtcacgaggtccaggcgtgagcttttggcggagtgggaggccgggtagatagtctgagacgagacgacgggggggctcccgtccttctgcccactggaaggccaacgcgtcactagcggacggaggagagccctctgccacatcctgccaaaaaaaacgtgctgtgctctcaggcagcacaggcacagcacaagcattagtagcatacagcagcatatcggcggaaacatagccaacaaatagtgaatgaactgtgagtggagcaaattgttgtgtgcagtgcatcaaagttttcggatgtccggcaacaactgggggcggtactgaacccattctcccacatacttttccactcttatcttgagagagggagagagaaaaaaaaaggagctgccgttcttccgtcggcacaaaaagtaatacgacggagaggcgtggcatctctgtgcaccaaggtcaatgcgggataaaaagctggatcaccgacaacatatatttgactattttagtggatatgcagctagacagaagtagtagtagcaccagagttttccaaaatgttttttttttcttctagacagaactagcatcaggaaattttgccatcggtgcagtagagagagaattgcaggcacaacctatgggtctgttttacagctttaggtatttattatctgtttatttttagaagctgggttgtcgtggctttatggaaatcttgggctaaattttaac

SEQ ID NO: 57526 - DNA, 1186 bp, Zea Mays
cagcaattcaacttgtccagcatgcagttagtgaccgtcaattttttatatttccactagtaaccttctttctacccgtcactaatcactagacgacattgctgcgccaccgtggatcgggttggtcctcatcgaaggatggatggaggcagtagagtaaatcgtctgaacagcccagctgagagcctgtctgagattagcgcaacaaccatctgattagtactgctgtgaagactggagagatgatagacgagggaggaaggagggtctttacttgagagaggacgaaggcggtagtaaaccaagcaagcatcatctggggatagacatggaagcatggaaaggcacaggcacgcggaagatggtggtaaatggtggacaagcaggcggtgactgtcgtcgtcccggaaagaccttgtcgcacacgtacctcaccataaactccagagaagtcacgaggtccaggcgtgagcttttggcggagtgggaggccgggtagatagtctgagacgagacgacgggggggctcccgtccttctgcccactggaaggccaacgcgtcactagcggacggaggagagccctctgccacatcctgccaaaaaaaacgtgctgtgctctcaggcagcacaggcacagcacaagcattagtagcatacagcagcatatcggcggaaacatagccaacaaatagtgaatgaactgtgagtggagcaaattgttgtgtgcagtgcatcaaagttttcggatgtccggcaacaactgggggcggtactgaacccattctcccacatacttttccactcttatcttgagagagggagagagaaaaaaaaaggagctgccgttcttccgtcggcacaaaaagtaatacgacggagaggcgtggcatctctgtgcaccaaggtcaatgcgggataaaaagctggatcaccgacaacatatatttgactattttagtggatatgcagctagacagaagtagtagtagcaccagagttttccaaaatgttttttttttcttctagacagaactagcatcaggaaattttgccatcggtgcagtagagagagaattgcaggcacaacctatgggtctgttttacagctttaggtatttattatctgtttatttttagaagctgggttgtcgtggctttatggaaatcttgggctaaattttaac

SEQ ID NO: 57527 - DNA, 2100 bp, Zea Mays
atggtgctcgcgcgcaaaaagttgaagctgaagctccacacgctcctcccagccggcaaagccgcggaggaggagcatggagaggatgtggaggccgtaaaggagaggctcgcatcctccaagcggctgcgccccaagcgggagcggaggcccaagaagaagctgtcgctccccgaggtggtgcggcagacggaggaggagataagggaggaggtggagcggaggagggaggagaggaggaaggagaagaaggagaaaaggaggatcaggaggttgatggaggccgaggccgcggagccggaaacgcagcaggtggagggggagataggggaggccgattctgctgccgggtctgagtctgaccagccggtcgaggcaaaggatagggagcaaagcataaagaaggtgtatgttggtggcatcccatactattcatctgaggatgacataagaagtttctttgaagcatgtggtagtatcacaatgattgactgcatgaattttcccgaaagcgggaaattcaggggtattgcgattctaactttcaagactgatgctgccgcacagagggcattagctatggatggtgcagatatgggaggattttatttgaaaattcagccttacaaacataaccgtgagaaggaagattttgcaccaaagttgatagaggggtataataggatatatgttggaaatctgccatgggatataacagatgatgatctaaaaaagttcttctccgagtgcaaaatttcatccatccggtttgggacagacaaggagacaggtggtttcaaaggctacgcgcatgttgatttttctgacagcgcgtctcttgctgctgctttgaagctcgaccagaaggtgatcaaggaacgcccagtcagaatcagatgtgctgttccaaaaaaggataaccaaaaagtcaatgacaatgggaactcagatcatctgaaaagtaaaactaggacatgctatgaatgcggaacccctgggcacttttcttcttcttgccctaataagaaggattctgaagcaaggaagtgctatgaatgtggcaccccggggcacctctcttctgcttgcccaaataagaaggattctgaagtaagaaagtgctatgaatgtggcaccgctgggcacctgtcctctgcttgcccaaataagaaggattctgatgaaaaggaggataattctaactccaccatagcagcctcaaagaagaggcgaacatgttatgaatgtggcatccctgggcacctctcttctaattgcccaaacaagaaggatcctgaatttatttctgatgaaaagaacactaatgttgattcagctcctgcatcgtcgaagaagaggcggacatgttatgaatgtggaactcctggccatctctcatcggcttgcccaaacaaaaggacatcagaatctgttctgaacaacagagagcctgctgacgcaaaacctgcaaccaccatcaagcccgaggaaacaaaagctggcgatgaatcgaattcagtagcttcaaagaagaggcgaaaatgctacgagtgtggcatctccggtcatctctcctcggcttgccccagcaaaaaggccgctgagcctgtctgcaacgaagagaagcctggcaatcactcaaacgctgtactaccagtcgtttctgacgaaaagaaggcaagtgaggacgcaaaatctgcacctgcaaagaaaaagaagaggcggacatgctacgagtgcggcatcgctggccatctctcgtcggagtgcccgaacaaggcagctgctgtctgctgagggttacgttgcctgagcaaggcagacgctgaggtcaaacgattgcttctttcgttctccagaattttagtctcgtgttgtactgtatgttccttgatatgagcagtgaagttatctctatgtccccgaagaagaaaaatcgaagttttgtagcagggaatgtaggcatggtagacaaggtttattaatttttggcatgtcaaattttgattccatgataccacaggattcattatccgtcgggagaagagtcattattgtcatcatcatctatatgaattcttttgtttgaaaaaaaaacaa

SEQ ID NO: 57528 - DNA, 2243 bp, Zea Mays
atggtgctcgcgcgcaaaaagttgaagctgaagctccacacgctcctcccagccggcaaagccgcggaggaggagcatggagaggatgtggaggccgtaaaggagaggctcgcatcctccaagcggctgcgccccaagcgggagcggaggcccaagaagaagctgtcgctccccgaggtggtgcggcagacggaggaggagataagggaggaggtggagcggaggagggaggagaggaggaaggagaagaaggagaaaaggaggatcaggaggttgatggaggccgaggccgcggagccggaaacgcagcaggtggagggggagataggggaggccgattctgctgccgggtctgagtctgaccagccggtcgaggcaaaggatagcgaccaaaatataaacaagttggaagtgaccaaccccgctgttgggtccaacaataacattgttccagacaatagcagaatcacaaaatgcagttggccaaaactgttgtcgtgtctgacaatcatgtagtcgcagagcatagggagcaaagcataaagaaggtgtatgttggtggcatcccatactattcatctgaggatgacataagaagtttctttgaagcatgtggtagtatcacaatgattgactgcatgaattttcccgaaagcgggaaattcaggggtattgcgattctaactttcaagactgatgctgccgcacagagggcattagctatggatggtgcagatatgggaggattttatttgaaaattcagccttacaaacataaccgtgagaaggaagattttgcaccaaagttgatagaggggtataataggatatatgttggaaatctgccatgggatataacagatgatgatctaaaaaagttcttctccgagtgcaaaatttcatccatccggtttgggacagacaaggagacaggtggtttcaaaggctacgcgcatgttgatttttctgacagcgcgtctcttgctgctgctttgaagctcgaccagaaggtgatcaaggaacgcccagtcagaatcagatgtgctgttccaaaaaaggataaccaaaaagtcaatgacaatgggaactcagatcatctgaaaagtaaaactaggacatgctatgaatgcggaacccctgggcacttttcttcttcttgccctaataagaaggattctgaagcaaggaagtgctatgaatgtggcaccccggggcacctctcttctgcttgcccaaataagaaggattctgaagtaagaaagtgctatgaatgtggcaccgctgggcacctgtcctctgcttgcccaaataagaaggattctgatgaaaaggaggataattctaactccaccatagcagcctcaaagaagaggcgaacatgttatgaatgtggcatccctgggcacctctcttctaattgcccaaacaagaaggatcctgaatttatttctgatgaaaagaacactaatgttgattcagctcctgcatcgtcgaagaagaggcggacatgttatgaatgtggaactcctggccatctctcatcggcttgcccaaacaaaaggacatcagaatctgttctgaacaacagagagcctgctgacgcaaaacctgcaaccaccatcaagcccgaggaaacaaaagctggcgatgaatcgaattcagtagcttcaaagaagaggcgaaaatgctacgagtgtggcatctccggtcatctctcctcggcttgccccagcaaaaaggccgctgagcctgtctgcaacgaagagaagcctggcaatcactcaaacgctgtactaccagtcgtttctgacgaaaagaaggcaagtgaggacgcaaaatctgcacctgcaaagaaaaagaagaggcggacatgctacgagtgcggcatcgctggccatctctcgtcggagtgcccgaacaaggcagctgctgtctgctgagggttacgttgcctgagcaaggcagacgctgaggtcaaacgattgcttctttcgttctccagaattttagtctcgtgttgtactgtatgttccttgatatgagcagtgaagttatctctatgtccccgaagaagaaaaatcgaagttttgtagcagggaatgtaggcatggtagacaaggtttattaatttttggcatgtcaaattttgattccatgataccacaggattcattatccgtcgggagaagagtcattattgtcatcatcatctatatgaattcttttgtttgaaaaaaaaacaa

SEQ ID NO: 57529 - DNA, 1610 bp, Zea Mays
ctgcgtcctgctgcctctccgtgcggcggctctcggtctcggcgactcggcctctcagatccctctccctccggcgtcctgctccctcctctcggcgcggcgctccctgctcctcctcccggtgctccctgctcggctgctccctcctctagatgctccctggctccctgctcggtgctccctcctcccgacgctcctttcggcgtcctgcaacagcgacgacgcagggcgtgtggggcagcagcaggagcatgcattgatgacggcgcatccgagtgtccagatgcctgtgtctctaagcattacagttctcgttgtttaatctagtttctgctaatgggcgatacacgtttccgagtgtccagatgcctgtgtctctaagcattacatacgacgtcgatctattctacatccagcttgccctgtcaaggacctacgattccctcaccgacgaattcagctacgcgctgcttctaatcacgatcgcagccctggttgctgccatcatcgtcacatggatttggtccgagaaggagttgggggacaagtggaggtgaacgaggtctcaaagttgtgacgtggaagaaaatttggggccccagtcagctagctctcttgttctagggtttttgttttacggtttttgtgctgtcgttttaggttttttttttgctaaatatagttttgtgtttttgcgggctcgggccggcacgggctactaaatgggccgtgctattcgggccggcccggcacggtcgggcctataccgtgccgtgctcgggaagaggtatgggcccgtcgggcggcacggcacggcccggttaagtggtcgggcctaaccgtgccgggcttaaacgggccgggccgagtcgggctcgggttgggccgggccgggccgcccgtttggacatctatatttagcaccataccaaacacatttttttctaggttttcgcgtttgcatgctgcaacaagcagaagaagaggactaccgtctacgtataaactagaccgagttccttttctgcttacatcaagcagcaggcaataattggtgtgctccgtgcaatcaagcgatgcgacgtcggcatacacaaccaatcatcgccggcaagtccgagtttgattttggcctcggattccactcactactcggatgggttgtttatgtggccgttcagatggtgaagtatcatcaagcaggtgcagatcggaagaggcatgcttctttctgatgcttgctacacggcagcagcagcagcagcagtcctctcctgctaagcatatatgcatgtttatactagttagattagatattgtgtgtacagtacagactgctgatacaaccatccaattactcactaattctattctggtttaagcagtggtgcactagtacgagcagcagcagcagcgtcgtgaggtcacaactcacaactcatgacgaaggggatcaagcgaccagacacaagtcactgtttattaatgcgtcatttggagcagcgatgagacgcttagtgatcttgtcattgaacaggctggatatataaatggacacacatggccattgcaataagtgataattcagtgggagacggtgtgttggcagc

SEQ ID NO: 57530 - DNA, 1462 bp, Zea Mays
ctcgcatcctccccctgtccctgcgtgcgtagtgcgtctccggctccgcgcacgtcgcaggggtacgcatgcaattacaccgggtggtgggggcttcttccacctctggctggttgtcttgatggcgcccgctgtagaagccgtgaaggagacaggcaccttccagaaggttcctgccttgaacgaaaggatactgtcatccatgtccaggaggtctgttgctgcacacccttggcatgatctggagataggtcctggtgctccaaccatattcaactgcgtcattgagataccaaggggcagcaaggttaaatatgaacttgacaagaaaactggactgatcaaggtggaccgtgtgctgtattcatcagttgtttaccctcacaactatggattcattcctcgcacgctttgtgaagacagtgatcctttggatgtactggttataatgcaggagcctgttatcccaggctgtttcctacgtgcgaaggccatcggccttatgccgatgattgatcagggagaggcagatgacaagatcattgcagtgtgcgctgatgatcccgagtacaggcattacaatgatatcaaggagctcccacctcaccgcttggctgaaatcaggcgcttcttcgaggactacaagaagaatgagaacaaggaggttgctgtgaatgactttctaccagcgagcgccgcttatgaagccatacagcactctatggacctgtatgctacatacatcgttgagggcctgaggaggtaggattctgatggctaggaaaggtggggaggatgttgacgaaaaactgggagaccatttaccgcatggaacgagtaccgttattattttatttgtgtcgtgtatactgctagtagtgaaccctcaatcaaagaccgaaatcccctggggagtcggagtcggtagtaggtgaagctagtaacaaggttggcgaaatattattttctggcctgactgcctatatatgttgtacgtgattggtatcgtaatattcattcgcttttgtgatacataattcgttattggatcttcaattgtgttctgctctcggaacacggtggcgatgtgcctcgtagaaaaatgcaaaggcctcagcgttcttgtttgttactttgctgttatggaaaactgacaggacctgaagtcctgaacgttgtctggtggaatttgtccagcattcccctttcagctggttgcgtatttgaatcctgcacgtaaaaacaaccgcgcacttgtttaactacaattgatctagatttctttaagggctagtttgagagaaaaaaaagaggggctagaatctccttatttaagaagtaaacagaaaaatattaaatttaacagcagctcatggttgtttggatgcccgtcttagagcagcttcaatagttttctaaacaactctctaagtattaaatttaagaagtaaaaagaaaaata

SEQ ID NO: 57531 - DNA, 1711 bp, Zea Mays
agtactactacctgagcaacgcacccacaggctacaggagctactaggtagaccgtgtccccgtagacatgaaacggaagcgtggctagagctagagacgcggaaaagacgagaggaggggcccactgaacccacacagcgcgaggaagcgggaaggacgaccgtgttcccgattcccgttccaccatgccaccgtgacaccgtctctctctctctgtcggtcctccgctccgccgctttaaaaccaaagccgaaccactgctccgcccactccatcccggctccgtcgtcgcgtgccatcctagggtttctttccccgtcggcgcctccccagatttggccgccgccgccgctgacccaggttgtcttgatggcgcccgctgtagaagccgtgaaggagacaggcaccttccagaaggttcctgccttgaacgaaaggatactgtcatccatgtccaggaggtctgttgctgcacacccttggcatgatctggagataggtcctggtgctccaaccatattcaactgcgtcattgagataccaaggggcagcaaggttaaatatgaacttgacaagaaaactggactgatcaaggtggaccgtgtgctgtattcatcagttgtttaccctcacaactatggattcattcctcgcacgctttgtgaagacagtgatcctttggatgtactggttataatgcaggagcctgttatcccaggctgtttcctacgtgcgaaggccatcggccttatgccgatgattgatcagggagaggcagatgacaagatcattgcagtgtgcgctgatgatcccgagtacaggcattacaatgatatcaaggagctcccacctcaccgcttggctgaaatcaggcgcttcttcgaggactacaagaagaatgagaacaaggaggttgctgtgaatgactttctaccagcgagcgccgcttatgaagccatacagcactctagggacctgtatgctacatacatcgttgagggcctgaggaggtaggattctgatggctaggaaaggtggggaggatgttgacgaaaaactgggagaccatttaccgcatggaacgagtaccgttattattttatttgtgtcgtgtatactgctagtagtgaaccctcaatcaaagaccgaaatcccctggggagtcggagtcggtagtaggtgaagctagtaacaaggttggcgaaatattattttctggcctgactgcctatatatgttgtacgtgattggtatcgtaatattcattcgcttttgtgatacataattcgttattggatcttcaattgtgttctgctctcggaacacggtggcgatgtgcctcgtagaaaaatgcaaaggcctcagcgttcttgtttgttactttgctgttatggaaaactgacaggacctgaagtcctgaacgttgtctggtggaatttgtccagcattcccctttcagctggttgcgtatttgaatcctgcacgtaaaaacaaccgcgcacttgtttaactacaattgatctagatttctttaagggctagtttgagagaaaaaaaagaggggctagaatctccttatttaagaagtaaacagaaaaatattaaatttaacagcagctcatggttgtttggatgcccgtcttagagcagcttcaatagttttctaaacaactctctaagtattaaatttaagaagtaaaaagaaaaata

SEQ ID NO: 57532 - DNA, 1373 bp, Zea Mays
ctgcgtgctagatcgatgcccccgttgtcttgatggcgcccgctgtagaagccgtgaaggagacaggcaccttccagaaggttcctgccttgaacgaaaggatactgtcatccatgtccaggaggtctgttgctgcacacccttggcatgatctggagataggtcctggtgctccaaccatattcaactgcgtcattgagataccaaggggcagcaaggttaaatatgaacttgacaagaaaactggactgatcaaggtggaccgtgtgctgtattcatcagttgtttaccctcacaactatggattcattcctcgcacgctttgtgaagacagtgatcctttggatgtactggttataatgcaggagcctgttatcccaggctgtttcctacgtgcgaaggccatcggccttatgccgatgattgatcagggagaggcagatgacaagatcattgcagtgtgcgctgatgatcccgagtacaggcattacaatgatatcaaggagctcccacctcaccgcttggctgaaatcaggcgcttcttcgaggactacaagaagaatgagaacaaggaggttgctgtgaatgactttctaccagcgagcgccgcttatgaagccatacagcactctatggacctgtatgctacatacatcgttgagggcctgaggaggtaggattctgatggctaggaaaggtggggaggatgttgacgaaaaactgggagaccatttaccgcatggaacgagtaccgttattattttatttgtgtcgtgtatactgctagtagtgaaccctcaatcaaagaccgaaatcccctggggagtcggagtcggtagtaggtgaagctagtaacaaggttggcgaaatattattttctggcctgactgcctatatatgttgtacgtgattggtatcgtaatattcattcgcttttgtgatacataattcgttattggatcttcaattgtgttctgctctcggaacacggtggcgatgtgcctcgtagaaaaatgcaaaggcctcagcgttcttgtttgttactttgctgttatggaaaactgacaggacctgaagtcctgaacgttgtctggtggaatttgtccagcattcccctttcagctggttgcgtatttgaatcctgcacgtaaaaacaaccgcgcacttgtttaactacaattgatctagatttctttaagggctagtttgagagaaaaaaaagaggggctagaatctccttatttaagaagtaaacagaaaaatattaaatttaacagcagctcatggttgtttggatgcccgtcttagagcagcttcaatagttttctaaacaactctctaagtattaaatttaagaagtaaaaagaaaaata

SEQ ID NO: 57533 - DNA, 1391 bp, Zea Mays
gcgcgattcaaatcccgactgacgcctgcctgcctggcatggttgtcttgatggcgcccgctgtagaagccgtgaaggagacaggcaccttccagaaggttcctgccttgaacgaaaggatactgtcatccatgtccaggaggtctgttgctgcacacccttggcatgatctggagataggtcctggtgctccaaccatattcaactgcgtcattgagataccaaggggcagcaaggttaaatatgaacttgacaagaaaactggactgatcaaggtggaccgtgtgctgtattcatcagttgtttaccctcacaactatggattcattcctcgcacgctttgtgaagacagtgatcctttggatgtactggttataatgcaggagcctgttatcccaggctgtttcctacgtgcgaaggccatcggccttatgccgatgattgatcagggagaggcagatgacaagatcattgcagtgtgcgctgatgatcccgagtacaggcattacaatgatatcaaggagctcccacctcaccgcttggctgaaatcaggcgcttcttcgaggactacaagaagaatgagaacaaggaggttgctgtgaatgactttctaccagcgagcgccgcttatgaagccatacagcactctatggacctgtatgctacatacatcgttgagggcctgaggaggtaggattctgatggctaggaaaggtggggaggatgttgacgaaaaactgggagaccatttaccgcatggaacgagtaccgttattattttatttgtgtcgtgtatactgctagtagtgaaccctcaatcaaagaccgaaatcccctggggagtcggagtcggtagtaggtgaagctagtaacaaggttggcgaaatattattttctggcctgactgcctatatatgttgtacgtgattggtatcgtaatattcattcgcttttgtgatacataattcgttattggatcttcaattgtgttctgctctcggaacacggtggcgatgtgcctcgtagaaaaatgcaaaggcctcagcgttcttgtttgttactttgctgttatggaaaactgacaggacctgaagtcctgaacgttgtctggtggaatttgtccagcattcccctttcagctggttgcgtatttgaatcctgcacgtaaaaacaaccgcgcacttgtttaactacaattgatctagatttctttaagggctagtttgagagaaaaaaaagaggggctagaatctccttatttaagaagtaaacagaaaaatattaaatttaacagcagctcatggttgtttggatgcccgtcttagagcagcttcaatagttttctaaacaactctctaagtattaaatttaagaagtaaaaagaaaaata

SEQ ID NO: 57534 - DNA, 901 bp, Zea Mays
cttacttgttcatcctccctttttaacgcagcagctagattaattaaagtcaacttttgacattttatttcgggtaacatacatacgtaacatatggatggatagatgctccacacccacacggcacggttcatctgtctgtctgtctagacagacaataagagatcctagctagctaggattcatattcatggagcttaagactactcttgttttcaaggacgagatgatgagagattgaggcgcagctcacaagatgaacctgggcgacgacgaacttgccgccgggccagttctgtcacttagcctttggaccggcggcgaacgcgatccgcgcaagtttccgcgcggaaggaggacgaggggagatcagcgccagtaacgacgccgacgacgggaccggtttggccctcggtttgcgctgcggcggcggctctggcgccaagcggccgagggtggtaataattgtaagcggcggcgacgacaacgacggaggaagcagcgagaaggcgctgcggcggctgccggggccgccaccgccgccgccggccgccgcagcagaggctggaccgcgtcacagatgtagcaaaatacgatatgatggagatcaaacttgcggaatgctaagaagcatggttaagcatcaaagaaagcaagacacttcctcttgttcccattaaacttccatggggacccatcaccaagcaccgctagagctaggaattaaactagaacttaggtcaatcgtagcatattatagttcagacgacgcatccctacacacactcgcaaaacggcaaaagacgtccacgaccacaaacacaagctgatctcagaacgggatgagtgagagcaagacgaggcactacttcttaggcgacttggcggcggccttcttggg

SEQ ID NO: 57535 - DNA, 1774 bp, Zea Mays
acaagtcagaaaaaaaaaagaataagaagaaaggaatccctcctacgcggaagcgaagagattcgtcgcctcagccgcctctctgctcagatctgcggcggagcctcgccggcggcctgcgccccgcggcgccgccgatccaagatgccttcgtgcgtgcagggatgctgctgctgctcgtccctgcgccttctcccccgcgacgacgcgctctcgtccccctccgcctgcgcgcaccgcctgaagccttggtcttggcgtgcccaatcccccacctcgtcctcctaacgcttgtccccgcccgctccccaccctgatctacctgtctctacccttccctcctccatttctacatctccccgttgctgctctgctcctgctgccacaagagtattcgccttcaatcgttgctcgcgcctgtcatttcgtgccgcacgccgacttgtttgccgttttcgctgccgtcttctgttggatcggatttgtctggatcgattccaaggtcggatctacgctgctgcgggtcagtagcgcagcgtggttgtacgtttgcggtgttgctgtatcactctgcgtctctgcaagtgctaaaccagtcactttatggacggtggttcctgtggtctcgagggagcgtcggtagtgacatctactaccagcactggtattccgcttctgccagagaagcactgcgccttgtttgatgaagcttgtggagccatggcgggcagtaatggtcctgaaggagtgccagtagtgacttctgctgatgaccctccgacccgtgccgatattccatttgtctgcaattcagttgatgaaacctgtgaagccacagggggcggcagtgctcccttggagggtcagatatgtacgggtttctccaagttgatcagcttggaggtgaagaaaggcctccagaagtgtgcgacgttcccaccctcatctggtcagcctcagcaggaggattgttcatgctgccatgtaggtgacgagctcacgtgtgctcctgcctatgggcgatctgtgtccttacctccaactttgaagctggtctctgccatgaaaggaggtcgtgaaaagaacggagtggcatcatcaccaagtgaaaaccgccatgtcaagtgggctcctgatgtgtacgacccccctgtgacatcggtatgccattcagtgaccaacagctatcagcgccggtcaaagcaccgcaagaaggagaagaacaaacagaagaagaggcagaaggggaagtcgaagaagaaccaacaacagagttctgcccagaatccatctgcaccgcaggttcctggtatcgggccgaaaggcgttagcaccactggtggccagtctccagcagacgatctcagcgaacatgaggccgggatcatggactacagcatgggtagccaggaagccaactgtggaagcagcttcttgcgcgagtctgttgctaagatgcacttctcgaccgccgaagcttcctgagaggcgtgcctcagttctgtaaatatgatggacgggatgtgtataaataaacccagcatgctgttttttttcgtcgtcgttgtgtgcgtttgagagctcgcctagtgttttggaacaataatttttggacagactatgtgttctgtatgttttggtcgtcagacatatctatcctcagtccatggctttgcttaacggtttaacctggactcttctgagaagttatggatgttctgaactcaagttatacactgcctaatgatgtttgatttgctggaattttatgttc

SEQ ID NO: 57536 - DNA, 1772 bp, Zea Mays
acaagtcagaaaaaaaaaagaataagaagaaaggaatccctcctacgcggaagcgaagagattcgtcgcctcagccgcctctctgctcagatctgcggcggagcctcgccggcggcctgcgccccgcggcgccgccgatccaagatgccttcgtgcgtgcagggatgctgctgctgctcgtccctgcgccttctcccccgcgacgacgcgctctcgtccccctccgcctgcgcgcaccgcctgaagccttggtcttggcgtgcccaatcccccacctcgtcctcctaacgcttgtccccgcccgctccccaccctgatctacctgtctctacccttccctcctccatttctacatctccccgttgctgctctgctcctgctgccacaagagtattcgccttcaatcgttgctcgcgcctgtcatttcgtgccgcacgccgacttgtttgccgttttcgctgccgtcttctgttggatcggatttgtctggatcgattccaaggtcggatctacgctgctgcgggtcagcatcagtagcgcagcgtggttgtacgtttgcggtgttgctgtatcactctgcgtctctgcaagtgctaaaccagtcactttatggacggtggttcctgtggtctcgagggagcgtcggtagtgacatctactaccagcactggtattccgcttctgccagagaagcactgcgccttgtttgatgaagcttgtggagccatggcgggcagtaatggtcctgaaggagtgccagtagtgacttctgctgatgaccctccgacccgtgccgatattccatttgtctgcaattcagttgatgaaacctgtgaagccacagggggcggcagtgctcccttggagggtcagatatgtacgggtttctccaagttgatcagcttggaggtgaagaaaggcctccagaagtgtgcgacgttcccaccctcatctggtcagcctcagcaggaggattgttcatgctgccatgtaggtgacgagctcacgtgtgctcctgcctatgggcgatctgtgtccttacctccaactttgaagctggtctctgccatgaaaggaggtcgtgaaaagaacggagtggcatcatcaccaagtgaaaaccgccatgtcaagtgggctcctgatgtgtacgacccccctgtgacatcggtatgccattcagtgaccaacagctatcagcgccggtcaaagcaccgcaagaaggagaagaacaaacagaagaagaggcagaaggggaagtcgaagaagaaccaacaacagagttctgcccagaatccatctgcaccgcaggttcctggtatcgggcgttagcaccactggtggccagtctccagcagacgatctcagcgaacatgaggccgggatcatggactacagcatgggtagccaggaagccaactgtggaagcagcttcttgcgcgagtctgttgctaagatgcacttctcgaccgccgaagcttcctgagaggcgtgcctcagttctgtaaatatgatggacgggatgtgtataaataaacccagcatgctgttttttttcgtcgtcgttgtgtgcgtttgagagctcgcctagtgttttggaacaataatttttggacagactatgtgttctgtatgttttggtcgtcagacatatctatcctcagtccatggctttgcttaacggtttaacctggactcttctgagaagttatggatgttctgaactcaagttatacactgcctaatgatgtttgatttgctggaattttatgttc

SEQ ID NO: 57537 - DNA, 483 bp, Zea Mays
acagcataacataactggctgtccagacaggcaattcggacaacacctggttggtcagcgcttcttgtgctcctggacgaacttggagttcttgaggtcctcctcggtgaagttggccgtcatcttagtgatgatgaagccggtgatggcgaaccccgtgaggaagggccaattgcgcttccactcccggcggaagaagaccggccacggatcgaacgtcttcatctactaggcctccggctccggctccggctccggctgctcgcgatctcctcgcaccctcctcctccggcttcgcttctcgcgagattgaggtgagaagtggatggggtcgaatggaaattctccttcgagttcgatcccctccccctcgtagcggcgctgcgacgacctgcactgcacccacctagggttaggatttgaatgggccatggtgagtgtcaggctcgatcctatggattgttgggccggaaacagaagcgc

SEQ ID NO: 57538 - DNA, 1815 bp, Zea Mays
ctctcgcttcatcggctttccgcgtgttagagcagaatgaggacccgctccgaaaaggatcatggtgctggtgtttcccaaaagaatgttaatggatccaatccatctccggcatcaactttagatgatgttgtggctcagcttgcaagtgtgaatgctgttcttcagcaaatagcccagcctgcaacatccgttcagcatggtcgttatgattctgatgttgctgtcctctacaaggagttcctcagtatgcaaccaccagtgttctccaaggtagaagatccattggaagcataaaattggcttcgaacgattgaacagaaattgggactcatccgttgtgatgatatccaaaaagttcagtgtgctacccaacaacttcagggtcccgctggagcttggtggaccgaataccttgcactgcagccagaaggtcatcaagtttcttgggtggagttctgtgaggtatttcgggcacatcatattccgaaagcccttatggaaataaagttcaacgaattcctagatctaaagcaaggcgaagaagagggtgtgatgggatattttgagaggtttactcgtctatcccagtatgtcttggattttgtgaatactaatcagaagaaaaagttctatttcttgcgtggccttaacgagaagctccaatgtttgatggcaactagtttggctgaagattataatgagttggtcagtcaggctgttttgggtgataacaagattcatcgtcattaggaatctaaaagaaagcaacttgtggaggaatcctctggtagtgtcaagcagtgccggaggattgtttatcaacctgtttatcatcctcatccttttctaccccagttacctagctcacaacagtcatgtgaaagacatgctactattccttttgttccacatgagccggatgtcctagacattcattttgaaaatattccgaataatgtcaattcgggtgcgaattgtggaaagtcgggacactctattctagattgtcgcttccctagccgagtgagtgagcgacaatcgcttgtgactctttgtcgcggtagccagccgaaagcaaagaagaaagagggtgttcttaaaatgggacaagttcattatactaagatcaaagctattcctgagggtgaaccagttatgctgggtgcttttccagttgccaatcacttggctagtattttgtttgattctggtgcttcccatacttttataaatcggacatttgtgttaaagcaccagttgtctttggtggtggtagagaatggatatagcatacaatctcctggagggcgtttgcatactaaggagatggtataccagatacccataaagctagttggtcacatatttcctaccaatatgctagttcttccaggtcaggacatagatgtgattctgggtatgaattggcttcgtcagcatggggcggtgatcgacgctctacaaaggacgatacagttggactcacctaacggtaattataagttgctgatccgattaccaactcttaagagagcagtggaaagagtgtgtgctgctacagttaaagaggtcaaggatatacctgttgtcagggaatttccagatgtgttccctgaagatttaccaggtttgcctccagagcgagacgtggaatttgtaatcgaattgcagccaggtactgcacccatatccagaagatcatacaggatggcacctaggagctagcagaactgaagactcagttgcaagacttgctcaataaaggtttcattcgcccgagttcatcaccttggggttgtcctgctatctttg

SEQ ID NO: 57539 - DNA, 1659 bp, Zea Mays
tactctctacctagggcttgcttgctatcctgatccaacgtcacactgatactatatactcatcgactgctgctagtatatactagctgcgcagtttgaacgacgaattgaaatcttcagctttttatttattattgattgactcgatccaccagcagcagcagcaccaccaccagcagcaaggccacggccacctgcagattgccgtcagcggcagcggcgacgccaatcatgagctcctccagcaaccaatcatggggggagcgcttcccgatggaggaggaggaggtggtggcggggggcaggttgggggccccgccaagcccatgtccatggcggagcgcgcgcgcctcgcgaggatcccgctgccggagccggggctcaagtgcccgcgctgcgactcaaccaacaccaagttctgctacttcaacaactactccctcacccagccgcgccacttctgccgggcctgccgccgctactggacgcgcggcggcgcgctccgcaacgtgccggtcggcggcggataccgccgccacgccaagcgcgccaagcccaagcagcagcagcagcagcacgcggccgccgggaccggggctgccaccggcgcgatgcagcagcctcccgctgggtccatggcgtcgtcggccgccgcgtgcaccgcgaccacgacgatgacgaccaacgcgctccacgccgggcccggcggcggcatgctgcccatgctgccgccgctgctgcgcctagccgacttcgacgcaatgagcctcggctccagcttctccggcatatcgtccatggggaagcccggctccatcggcgcggcctgctacccgcactcggtcggcgggctggagcagtggagggtgcagcagatgcagagcttcccgttcttgcatgcgatggaccagggcccgctggggccacctctggccatggcgatggcggcgccaggagggatgttccagctaggtctagacaccaccagtgataacagccgtggcggtggcggcggcggagaagacgggtcgtctgccggagaggcgctccatatgatgcaagccaccaagagggagagctaccccgcggcaccaagagccatgtacggcgaccaacaacacaatcacctggctgctgctggtggctacacttcctattccaccaatgctgctgcaggtaaccatctcttgtaatggccggccgatcgatcgatcgagagctcaacaattcaagtgtcctgctatagctagctactacgacgtcgtgctacgatcgtatcggttcgtttcctacaaatatagcctagagatagagtgtctctgtctgtgtgatcgatggtattgttatgatcatatagaaaagaccagtagcatgcatgcacttgttgcaatgtttgctttcaagaagaaactctggagggaggagaggctcggtttggatgctgatcatgcgcaaatattactagtgtctacagctgctacttcattatagctgctagcatggtcacttgttttatgtttcttcttctgctgcttttttatctgatccctttgttagggtttactactactatcgatcatttgtggtcaagtaatgtgtactggtgtacgttcatcattttgttaacgaaaacacctatcatatatatgtcaattattc

SEQ ID NO: 57540 - DNA, 1496 bp, Zea Mays
cagccatcttccctgggatttatctaccggccccagcctctcctccctctcgtttccagtcaccagaaccaaatccagacaccaacgctcgtgcgggagagagagagagagccgaggtcagagtgcatctaccaacgccggccccgtccgcgcctggagctcgggagttcacgacgggttagcgtacttcgtgaggttgctggtgaagcgcttgtggccgattggggaggaataaaccactgtgtcgaccagaattcgtcgtcggtcgccggattccgccacgcactgtgggtgggtctgggcgcccttcggatctcggtgagcatctcccgtagtgataccccacaattaccgctgtttggtactgctttcggataagagtttaggcatgaggatcggagattcgggagttccggccatggcgccgccgtggttcactgggttgcgccgttggcgtgttcccagggggaagaaagggtctgggccgtccatctgttgatcgacggctagattagaattaggcgtacccctttcccggcgtgtgatccatgccatcgattcatccgcgggcggctacgatttcatcgcgccatcatcgattctggatcattggatcgggatccagtgaccccgatttcatatcgattcacgccgctctaatcctggtcgttcgtacttgatcagacgaccgagatctattaataccgttttgtgtaggtaattttgcgtaagagttcctcggaaatcatagattcaacacgcggtacgttgcagaggtaaactgagtcttaggatttttcatgtaataacccttgcacttcgcagtatttgtgcatgtagtacagagaaacaaaatactaaataaattcaattagaaaatatgtaaaaataattgcaggaacataattaattcctagaaaaaatcattttaactcctttttgacccattccaatttctataatttggtattaatattgtttaccatatagtgtctccgttttagcatgaaacctatattaaaatttgtaactttcgtacgtgttgggggccttcggcttccgaaggtcctcaaaaacatgatttaacaatgtttctggagtataatacatgagcaggtaccttcgaacttggacctttcggacttgagtcaaaatcacagtgtgaagaagcacaagggatatgaaggatggaacgaagccgaagctgtgcgcaagggagcttcggcgtgataacagaaaaagaaaccgacttaaaggggaaaatgctatctagaccccgatgaattactgtagaattattagcaaatgtaaagggcatgagtgtaattttacatgggctacgtcccgtgcctataaatagatgaatagtgctccagcactgttcacactgacttggcatttgcttttgcatcacgcttgtactctttaccttccctcaagtcgaaggtacatttgcaatatgatatcatttttatttcttcatagtaataaaatag

SEQ ID NO: 57541 - DNA, 698 bp, Zea Mays
cagccatcttccctgggatttatctaccggccccagcctctcctccctctcgtttccagtcaccagaaccaaatccagacaccaacgctcgtgcgggagagagagagagagccgaggtcagagtgcatctaccaacgccggccccgtccgcgcctggagctcgggagttcacgacgggttagcgtacttcgtgaggttgctggtgaagcgcttgtggccgattggggaggaataaaccactgtgtcgaccagaattcgtcgtcggtcgccggattccgccacgcactgtgggtgggtctgggcgcccttcggatctcggtaccttcgaacttggacctttcggacttgagtcaaaatcacagtgtgaagaagcacaagggatatgaaggatggaacgaagccgaagctgtgcgcaagggagcttcggcgtgataacagaaaaagaaaccgacttaaaggggaaaatgctatctagaccccgatgaattactgtagaattattagcaaatgtaaagggcatgagtgtaattttacatgggctacgtcccgtgcctataaatagatgaatagtgctccagcactgttcacactgacttggcatttgcttttgcatcacgcttgtactctttaccttccctcaagtcgaaggtacatttgcaatatgatatcatttttatttcttcatagtaataaaatag

SEQ ID NO: 57542 - DNA, 1035 bp, Zea Mays
ccagaaccaaatccagacaccaacgctcgtgcgggagagagagagagagccgaggtcagagtgcatctaccaacgccggccccgtccgcgcctggagctcgggagttcacgacgggttagcgtacttcgtgaggttgctggtgaagcgcttgtggccgattggggaggaataaaccactgtgtcgaccagaattcgtcgtcggtcgccggattccgccacgcactgtgggtgggtctgggcgcccttcggatctcggtaattttgcgtaagagttcctcggaaatcatagattcaacacgcggtacgttgcagaggtaaactgagtcttaggatttttcatgtaataacccttgcacttcgcagtatttgtgcatgtagtacagagaaacaaaatactaaataaattcaattagaaaatatgtaaaaataattgcaggaacataattaattcctagaaaaaatcattttaactcctttttgacccattccaatttctataatttggtattaatattgtttaccatatagtgtctccgttttagcatgaaacctatattaaaatttgtaactttcgtacgtgttgggggccttcggcttccgaaggtcctcaaaaacatgatttaacaatgtttctggagtataatacatgagcaggtaccttcgaacttggacctttcggacttgagtcaaaatcacagtgtgaagaagcacaagggatatgaaggatggaacgaagccgaagctgtgcgcaagggagcttcggcgtgataacagaaaaagaaaccgacttaaaggggaaaatgctatctagaccccgatgaattactgtagaattattagcaaatgtaaagggcatgagtgtaattttacatgggctacgtcccgtgcctataaatagatgaatagtgctccagcactgttcacactgacttggcatttgcttttgcatcacgcttgtactctttaccttccctcaagtcgaaggtacatttgcaatatgatatcatttttatttcttcatagtaataaaatag

SEQ ID NO: 57543 - DNA, 272 bp, Zea Mays
cagaaccaaatccagacaccaacgctcgtgcgggagagagagagagagccgaggtcagagtgcatctaccaacgccggccccgtccgcgcctggagctcgggagttcacgacgggttagcgtacttcgtgaggttgctggtgaagcgcttgtggccgattggggaggaataaaccactgtgtcgaccagaattcgtcgtcggtcgccggattccgccacgcactgtgggtgggtctgggcgcccttcggatctcggtaccttcgaacttgga

SEQ ID NO: 57544 - DNA, 2643 bp, Zea Mays
gataaaaaggcgtaaaagccatcgccactctttccccatcccacgctgccctcggcgctgcgcctggccccggcacctacctcccccctccccacctcgccgccggcgggtggagtcgggctggagcagccgctctcctctgttaccccctaaccccctataaagaaaaagaaaaaaacagagagagagcgagcgaccggcggctcggcagccatggggcacggcgtcagctgcgcccgcaccggtgacgagcacgactacttccgcgcggcgcaggtcggggacctcgaggccctggaagcgctcctcgacgctgacccctcccttgcccgccgcgccacgctctacgaccgcctctccgcgctccacatcgccgccgcgaatggccgcctcgaggtgctgtcaatggtcttggatcacggggtgccgccggacgtggtgaatcggcacaagcagacgccgctgatgctcgcggcgatgcacggcaagaccgactgcgtgctgaagctcctgcaggccggcgccaatatcctcatgttcgactcccagcacgggcggacctgcctgcaccacgcgtcctacttcggccacgtcggctgcctgcaggccatcctcacggcggcgcggaccacgccggtggccaactcatggggtttcgctcggttcgtcaacgtgagagacgaccacggcgccacgccgctccacctcgccgccaggcagggccgccccggctgcgtgcaggcgctgctggagaacggtgccatcgtctccgctttgaccggctcatacgggtttcctggtagcacgtcgctgcacctcgccgctcgcagcgggagcctggattgcacccggaagctgctcgcctggggagcggatcgtctccggagggattcagcagggaggatcccttacgccgtggcgctgaagcgcaaccacgaggcgtgcgcggcgctgctgaacccgtcggcggcggagcccatggtgtggccgtccccgttcaagttcatcagcgagctggagccggaggccaaggcgctccttgaagcggcgctgacggaagccaacagggagagggaggagaagatcctcaggggcaccaagcactctccgcatcctcccacctgggaccacgcgagcgacgccgccgacgccgacgccatcgacgacgcgtcctcagatgccagcgccagcgacgcggagctgtgctgcatctgcttcgaccaggcgtgcacgatggaggtgcaggactgcgggcaccagatgtgcgcgccgtgcacgctcgcgctgtgctgccacagcaagcccgacccggtgacgctagcgctgccgtcgccagcctgcccgttctgccgcggcagcatctcgcggctgctgctggtggcccgggcaagcagcgacgacgcagacaccgagaagtcggcggcagcggctgcggcagcggctgcctcctccccgcagctcgtccggcggcggtcccggcggtcgcacaacctcagcgacggcggcagcagcagcttcaaggggctgtcgtccgccgtggccggttccttctccaagatcgggcgcgggtcgagccggacgatggccgacagcgacggctgcggcgtggacaagcccgagcacgacccgtgatcggcattggatcctgcgcatgtggagccgagcgcggggccatttgcggacatccaatcgaatccaagccaagcgtgactgcttgctgcgaaaataaccgcatccttttcttcttcttctccccatgtccctgtctgtcaatcctattcttgggcgtgccaggatttgttcacctggccattgccgtattccattgtcaccgaccggctatagtatatagtactagattccatttccattccttcgtgcccacgcagctgtggtatggttccaatggttgagccgagtttgagtcacagacatgtaaaacaccatcggtggtgtgtgtgtgtaaaagctgtcggcctggagagagctgtggtgaactgtggctccgttcatggcatcgcagtatcgcacagtcgtgaactgtatgtggctgccagtgacggcgacggagctggcttgctgtaacgatggcctgccacggccacgggatgtgacctcttgccacggcgtgtgatgtttgttgcaacgatgcactgcactggcactggcactgcagcgcaatggatgatggattcaagtcaggttcggcctggccgacctgtcgcctgctgccactgccatggcgtccgtccccaacccttgcgctccatacccataggcagggctcgggagatagcgggcacagtggtcctcctcgtccctggtccggtggtgaatctgtcgctcttgctctggggctctgcgccgctgccgcctgccgtgcccggaggaaggccctgcaacgtgcaccgcgggggcgctctagctgctgcggcctcaccgtctccggttcacaggcaggactccgtgacctccctgccggcctggaggggccacggccgtccggctgtgctgtggtgccacctgccgaggagcggcggtcgtcacactctgccagagaggcgctcagagcagtgattactctgtctgcagcagttcacacacgcagccgagtttcgcgaagacgacgactgcaagcaaggg

SEQ ID NO: 57545 - DNA, 170 bp, Zea Mays
atggcgggtgcagttgacaggatcttatttactggacgccgctattatatttatacgcctcgtcgtcgtcctcctcctctcgactctcgtgcgccatcgccgggccgggccagctcagttgcagctgcagcaggagcagccgcagctggagcagccgcagctggtgccgc

SEQ ID NO: 57546 - DNA, 614 bp, Zea Mays
aacagttgctacagtgaacaacttgaagagagacttgggttcaaagcataaacagcacatgcagactcatgtactgcgtggaccaccttgaggaggttagcaagcttgctaaggtgaagtcccaactcttcagagtcaaaggagttatgatgttcaaaataaattttttattctatatttcaagggaatctctaaactgcctagagcgcttgggatgttgagctacaatttcaggtgtcagtgtcggattcaaataccttttttcgaaatagagattagcatcccactatatggccacaggccaaatgtggctacctattttctgcatccaaaatgtagtcagattagccttctcaccctacaacagagtcaaaccaaacccatcattcagttatggcttcatcaacgggaacccagaaatcgaggtctgatgtctttggtgagggtgctgcccatgatgatgaagagagcaaatttgtttatgttggcaacgtgccatcatctgttactaaggctgatcttgaaaatgagttcaagagatttggttggcttattcctgacgcttttgctattagaagccgaaagatttgctgttaatttgtcttttgattctc

SEQ ID NO: 57547 - DNA, 1520 bp, Zea Mays
atggcggtgaccacttaagcgtggtggcttctgagttttgcctcgatttcgattctttctttttcccccacgtgcgccgccgcgaccttcctcgatcccatctcccaacgcccccgcctcgcctcgggatcccgccgccgctccatctgcctttgctcccccacccgcaggcagcgagcgacagcgacggcgagggatggccaaggccaggtcgttggcgaagcagaagcaggcgcagcaatcaaacggcggcggcggccacgcgctgtcctccaagctcgcccggtacctcgacccggaggcctccttggacaaggaccaactgctggacgcggtgcactggatccgccaggcggtggggctcatatgcggcctgctctggggagccgtccccctcgtcggcgccgtctggatcgcactgtcagttcctacctccccctaaccctccgtccctcccatcttctcgtcctccctcggccttgccttgtagatctgtagctcccccttcgcgcgcataagcgagatcgagctctttcttatacggtgtacatatacatgcgtaccctttgtaatttgttacaagatagataccagatcgagtttacggctgctcagggacgttgcgtcatggcgtggtcactgttaaattgatagcgcttgtgcgattggaatccatgagactggccggtttctcaattttgttggttggctaagggagtcagggagacagggacaatttcacaactgctacgagcgatttatggccatctcgactggcattatctattggtactacacctacttgctgaaggttgacgaggaggaatatggaggccatggggcgcttcttcaggagggtcttttcgcttcattcacccttttcctgctttcgtggactctagtatacagtctggctcacttctgagaagctcctttggcgcacatacctttgttcactgtgccagacagaaaagactcaccaggacagtgtagactaaggagcattttagaacgagcgttgtatcaaaacggttctgagctgtaatgttatttcccaacccccagtgtaatcttggtgctatgggattagttcggtgctaagcagaacaaaaatgttgcatactacgcgtttttcagtcaaacgacatcctcttgcattaggaactgaattccatcctcttgcattaggatctgaattccatggacaacttttaacgcacggaagacctatttggttcgctgcctaacttttctgtctaaggtttgtttgtttggtgtctaaggcaccacaacgtgcctaacttttctgtctaagcttagttcttcaattcgagcgactaagcttagataatctcttcaattcgagcgactaagcttagacaatctgtggcaccttaggtagaaaaccaaacagatgtggtacagttagctacaaactaaataggcccgaattgttctaggatttgttacaaggcgattttgagcaaaggcaaactgtaatgcagctttattttatcaga

SEQ ID NO: 57548 - DNA, 187 bp, Zea Mays
accgcctacgattttgaccttgctctctcctgtcctcactaggcctcatgccacaaactcgcctgccctctccttcaacttcttgtaagaatctggcctggaatggattaccaccgatgggaaattaggacttttacaatcgaagagatgaataaggaacaatatgaacagctctatcaagttaacg

SEQ ID NO: 57549 - DNA, 1534 bp, Zea Mays
atgggacaagctgcttatctgtgtaagcatcatatcatggaaagtgactacaggatcagattctatgtgtctgtgccaggcaacaaaaaaaaaaaaaaaaacaatcccccacctacaatgaaaacccttttatggtctccttgcaatcgacctgttctacaaatcctccaattcctccttcgccttccccttccccttcctctttttcttctaagtagcaggcaggagtaggagcagcagtatggtaaacacaatacaagacgaatgaattatgaaacaaaagcaacaagattcgcttcttgcagcgtgctgtactagagacagggaggcaggcagcaggagttggttcgtccgtcaactctgcaccgtggcgtcggcatgcccgtcctcgagcctccagctggtgctccggctcctggagccatggctgaacgcgtcgttgttgagctcaggcacggcgtgggagcgcgaggaggacgaggcgtggccgcgcccgaagcaggcgaagacgttgcggaggaagcggcggacggtgcccctgttcgtggacgcggcctgcctggacccccacgagacccgcctgggcgcgcggccgctgttgaacccggcgccgtccatctccgtgtacacgacggggagctcccgctcctcgggcgtccgcccgccggcgaatctaccgaccgcgaacccaccgccggggagcctccagatggtgagcccgaccgtggcctcctcctcctgctcaagggggatggcgtcggtgggcatctggtggcggcagacggggcaggagttgcggagcgcgagccatgggaggatgcagtcggcgtggtagatgtgggcgcagggcatttccctggcctcggcgcccaggtggaaggcctccttgcagacggcgcagtgcgcgtcggcggcggcgacggagacaacgggcatggcctggacggcggccttggacgccggcggcggggcgtcgcgggcgccggccgccagcccgccggcggcctcgatctgcgccagctggtccagcaggcgctggaagcccgagcccatgaggaagtcggacatggtctccgggagcgggcggaggcccgaccccgcgccgtcgtcgtacaggagctcgaagctggcggcggcgggcggggagcgacggagcacgatgacggggttgaagggcgaggccgcgcgggagtcggcggcgtggtgcgcgcgggggcggcggaggtaggccggtcgtggcggcggcgcgctcatctcctcgaggaagccgccgccgcaggaggggcaggcgggggaggagagcggggaggcggcgcgcacgaagcggtcgcactggtagcaccagtaggaggaggaggccgttggaaggcgtgtgggggaaggggaggaaggcatcgccatcggaaggcgggctcagatctgggatactttcagctccaggcggcggcggcggaggcggaggaagggttggtggtgggaggcgagacgaaggggccttgtattctcctccccgcccgctctgattgattgctcg

SEQ ID NO: 57550 - DNA, 3852 bp, Zea Mays
agcaagaaatagctttgccatctctcaaactatccctctggaacagcgatggctgtgccgtgagaacaacaaaacaaaaccctagaggacccaaagcccccgggcagatcgggcccgtccgtcccgaaatccaacggcgcacctcgctccggccgctgtacttaatcgagccgcaaccgggcctctctgactgatttcttcttctccagtctctctctactcccccactcttcccccactcccccagcacgccactgctcacacagaccaccccccactcggaggcggagtggagctcctccaatccgtcccgaatccggacgccgctcgcaccgcccgcaccgcccgcagatggacgcccgccccccgatccgcccgctctgaccagacgaacccggtccccgcccccgccgccgccgctggagcgcggtaatggcgggcttctagcgcgtcggacttaaagatctagcctttctattttgtttcctctctgcctcttttctttcgctggcaccgatggtcaccgagatggcggcgcgcggcggcgaggcggcggcgttcggcgcggaggccgaccgcggcgacttcgaggtcttccgcagcggctccgcgccgcccaccgtcgagggcgccctgggcgccgccgcggccgctgccgacctgctcgtggatgacgacctccgcgccgacccggcgtaccagagctactactactccaatgcgcacctcaacccccgcctcccgccgccgctcctgtccaaggaggactggcgctcctcgcaccaccgcctccgctccgcggccttcggcgggatcggggacggcaggaggcagcagcagccggctgcccaagggacggtcggcctgcccgggatcgatcttgcccgccagaggagcttctccaccgtctttcaggaggattcgtatcagcgtgatatggataggcagactgccagccacaatagtagtgaatcattatgttcttctggaatacagtatggtctaaatcgtggacctggaactattggaggcctgcactctagcaatagtttacgaagcttggatgaaattccgaacaatgatctgccatcaaatacatttgcttctcttttagggtcatctctttctaggagtgcatctccagatcctgagcttgtgaggagggcccctagtccatcccttcctccaatcggtgtgaaagttggcaacactgataagatgaatggtggttcctcttctttccgtcgtagttcatccgcaatcggtggatctgatgatctggtggctgccttatctgggatgaacttatcatctagggcaatgagtgggcaaactatggaccagtctcagctctatcaggatgttgataacgtccagaagtttctttttgatcgacagggtgaccaaccaaatggcaatcagcagcactacatgaggcgtcctgagcatggacaatctaagttatctgatggatattctgccaatttggccaattcatccacgatgagaaaccagattaattctggcagtttcacatcttttgacagtttgtctcttggatctggctttccttcccctaggattggttctagatcccctggagggactgtatcttctcgacaaaatttagctggtatgtctaacatgctaaactataatggaattggaagtccaactgcgtcaccttctcttcagacttctattgatccagcgtatatccagtaccttgctcaaattgcagctacctgggatgatcctctaatggacaggagccatctgggaagttcttacatggacttacttggtacacagaaagctaaccttggccctttacttcagtcacaaaagcaatatggttactgtggcaatcttggatttaaccttggtggttatgctggaagtccattgacaagtcctgttcttccctcttcacctattgcaccaggcagtccacttaggcatggtgaccgcaacatgcgctttccaccaggcatgagaaacttcggtaattcctttggttcatggaattcaggcatgagtggaaagatggatgctaatttgatgccctctctcctggaggaattcaagagcaacaaaagtaaatcatatgagctctccgaaatagctggccatgttgttgagtttagtgctgatcaatatggaagccggttcatacaacagaagctagaaacagccagtactgaagaaaaggacatggttttttcagaaattatgcctcaagctctcacattaatgactgatgtatttggaaattatgttgtccaaaagttttttgagcatggaagcactgcccagataaaggaattggctggtcagcttattggacgtgtccttgctcttagtcttcagatgtatgggtgccgggttatacagaaggctatagaagttgttgatttggatctgcagactaaaatggttgcggagctggagggtcatgtcatgcgctgtgtacgtgatcaaaatgggaaccatgttatacagaaatgcatagagtgcattcctcagcatgctatcgagttcattgtctcgacattctatggccaagttgtaatgttatccactcatccatatggttgccgagttattcagagggttctagagcattgtgatgatcctaagacacagcaaataatgatggatgagattctccagtctgtttgcttgctagctcaggaccagtatggcaactatgtggttcagcatgttctggaacatggcaagccccatgagagatcagccattattgagaagctaattggccaagttgtgcaaatgagccagcaaaagtttgcctctaatgtcattgagaagtgcttagcctttggaaatcctgtagaacgtcaggttctgatcggtgagatgcttggatccactagcgaaagcgaacctcttgaggtaatgatgaaagaccagttcgcaaactatgtggtgcagaaggtgctagaaacttgtgacgatcagcagagggagatgatcttaacaaggataaagacacacttgaacacactcaagaagtacacatacgggaagcacatagtagcgcgtgtagagaagcttgttgctgctggagagaagcgccttgggcttcaaccagcatgcaccgccgcctgaagggcaaactctctaagttgtacagctaacagttgctaggtttgcctcatgtttttttctctactaaaaaccttatatgaaggccccttttggcctcgccaggaaaaaaaataaatactgtatgtttgcggggaagagtgtacattaattctgtagcagaaagaccccctacccatgtggcggaatcaagggaggagtgatgcgtgtgagtccgatcgatctgaaggctgctgtaaagaggaagatggaaggggaaggagtgagaagcatgtcagttactctgctgctgtacaaattaaacttagctcttagagtgaggagaaagtaagctgttagctgtctgcctaaaggaaagaaaggaaaaaaaaaagaagctggaggccattggcaccctgtttcatgtgttggtatagctgctgtggctctcctgttgtctgtctggcctttgttgtaacataaagctgaggcgcactagcctgccttcgttttcacagttaagctgaagttattagtatcagctttcctgaactgcttggtatgtaatgtgactctgtttcttccttgtactaatgcttgtctcatgtaatccaggcccctaatgtctgaatgttttaatctcatttttcacctctgataaacgttgtttttttgtttggttttgttgctgctgaggtgatctgtttttttttgctgcttttgttttggtatacatactccttg

SEQ ID NO: 57551 - DNA, 3527 bp, Zea Mays
ctctactcccccactcttcccccactcccccagcacgccactgctcacacagaccaccccccactcggaggcggagtggagctcctccaatccgtcccgaatccggacgccgctcgcaccgcccgcaccgcccgcagatggacgcccgccccccgatccgcccgctctgaccagacgaacccggtccccgcccccgccgccgccgctggagcgcggtaatggcgggcttctagcgcgtcggacttaaagatctagcctttctattttgtttcctctctgcctcttttctttcgctggcaccgatggtcaccgagatggcggcgcgcggcggcgaggcggcggcgttcggcgcggaggccgaccgcggcgacttcgaggtcttccgcagcggctccgcgccgcccaccgtcgagggcgccctgggcgccgccgcggccgctgccgacctgctcgtggatgacgacctccgcgccgacccggcgtaccagagctactactactccaatgcgcacctcaacccccgcctcccgccgccgctcctgtccaaggaggactggcgctcctcgcaccaccgcctccgctccgcggccttcggcgggatcggggacggcaggaggcagcagcagccggctgcccaagggacggtcggcctgcccgggatcgatcttgcccgccagaggagcttctccaccgtctttcaggaggattcgtatcagcgtgatatggataggcagactgccagccacaatagtagtgaatcattatgttcttctggaatacagtatggtctaaatcgtggacctggaactattggaggcctgcactctagcaatagtttacgaagcttggatgaaattccgaacaatgatctgccatcaaatacatttgcttctcttttagggtcatctctttctaggagtgcatctccagatcctgagcttgtgaggagggcccctagtccatcccttcctccaatcggtgtgaaagttggcaacactgataagatgaatggtggttcctcttctttccgtcgtagttcatccgcaatcggtggatctgatgatctggtggctgccttatctgggatgaacttatcatctagggcaatgagtgggcaaactatggaccagtctcagctctatcaggatgttgataacgtccagaagtttctttttgatcgacagggtgaccaaccaaatggcaatcagcagcactacatgaggcgtcctgagcatggacaatctaagttatctgatggatattctgccaatttggccaattcatccacgatgagaaaccagattaattctggcagtttcacatcttttgacagtttgtctcttggatctggctttccttcccctaggattggttctagatcccctggagggactgtatcttctcgacaaaatttagctggtatgtctaacatgctaaactataatggaattggaagtccaactgcgtcaccttctcttcagacttctattgatccagcgtatatccagtaccttgctcaaattgcagctacctgggatgatcctctaatggacaggagccatctgggaagttcttacatggacttacttggtacacagaaagctaaccttggccctttacttcagtcacaaaagcaatatggttactgtggcaatcttggatttaaccttggtggttatgctggaagtccattgacaagtcctgttcttccctcttcacctattgcaccaggcagtccacttaggcatggtgaccgcaacatgcgctttccaccaggcatgagaaacttcggtaattcctttggttcatggaattcaggcatgagtggaaagatggatgctaatttgatgccctctctcctggaggaattcaagagcaacaaaagtaaatcatatgagctctccgaaatagctggccatgttgttgagtttagtgctgatcaatatggaagccggttcatacaacagaagctagaaacagccagtactgaagaaaaggacatggttttttcagaaattatgcctcaagctctcacattaatgactgatgtatttggaaattatgttgtccaaaagttttttgagcatggaagcactgcccagataaaggaattggctggtcagcttattggacgtgtccttgctcttagtcttcagatgtatgggtgccgggttatacagaaggctatagaagttgttgatttggatctgcagactaaaatggttgcggagctggagggtcatgtcatgcgctgtgtacgtgatcaaaatgggaaccatgttatacagaaatgcatagagtgcattcctcagcatgctatcgagttcattgtctcgacattctatggccaagttgtaatgttatccactcatccatatggttgccgagttattcagcatgttctggaacatggcaagccccatgagagatcagccattattgagaagctaattggccaagttgtgcaaatgagccagcaaaagtttgcctctaatgtcattgagaagtgcttagcctttggaaatcctgtagaacgtcaggttctgatcggtgagatgcttggatccactagcgaaagcgaacctcttgaggtaatgatgaaagaccagttcgcaaactatgtggtgcagaaggtgctagaaacttgtgacgatcagcagagggagatgatcttaacaaggataaagacacacttgaacacactcaagaagtacacatacgggaagcacatagtagcgcgtgtagagaagcttgttgctgctggagagaagcgccttgggcttcaaccagcatgcaccgccgcctgaagggcaaactctctaagttgtacagctaacagttgctaggtttgcctcatgtttttttctctactaaaaaccttatatgaaggccccttttggcctcgccaggaaaaaaaataaatactgtatgtttgcggggaagagtgtacattaattctgtagcagaaagaccccctacccatgtggcggaatcaagggaggagtgatgcgtgtgagtccgatcgatctgaaggctgctgtaaagaggaagatggaaggggaaggagtgagaagcatgtcagttactctgctgctgtacaaattaaacttagctcttagagtgaggagaaagtaagctgttagctgtctgcctaaaggaaagaaaggaaaaaaaaaagaagctggaggccattggcaccctgtttcatgtgttggtatagctgctgtggctctcctgttgtctgtctggcctttgttgtaacataaagctgaggcgcactagcctgccttcgttttcacagttaagctgaagttattagtatcagctttcctgaactgcttggtatgtaatgtgactctgtttcttccttgtactaatgcttgtctcatgtaatccaggcccctaatgtctgaatgttttaatctcatttttcacctctgataaacgttgtttttttgtttggttttgttgctgctgaggtgatctgtttttttttgctgcttttgttttggtatacatactccttg

SEQ ID NO: 57552 - DNA, 3630 bp, Zea Mays
cactcttcccccactcccccagcacgccactgctcacacagaccaccccccactcggaggcggagtggagctcctccaatccgtcccgaatccggacgccgctcgcaccgcccgcaccgcccgcagatggacgcccgccccccgatccgcccgctctgaccagacgaacccggtccccgcccccgccgccgccgctggagcgcggtaatggcgggcttctagcgcgtcggacttaaagatctagcctttctattttgtttcctctctgcctcttttctttcgctggcaccgatggtcaccgagatggcggcgcgcggcggcgaggcggcggcgttcggcgcggaggccgaccgcggcgacttcgaggtcttccgcagcggctccgcgccgcccaccgtcgagggcgccctgggcgccgccgcggccgctgccgacctgctcgtggatgacgacctccgcgccgacccggcgtaccagagctactactactccaatgcgcacctcaacccccgcctcccgccgccgctcctgtccaaggaggactggcgctcctcgcaccaccgcctccgctccgcggccttcggcgggatcggggacggcaggaggcagcagcagccggctgcccaagggacggtcggcctgcccgggatcgatcttgcccgccagaggagcttctccaccgtctttcaggaggattcgtatcagcgtgatatggataggcagactgccagccacaatagtagtgaatcattatgttcttctggaatacagtatggtctaaatcgtggacctggaactattggaggcctgcactctagcaatagtttacgaagcttggatgaaattccgaacaatgatctgccatcaaatacatttgcttctcttttagggtcatctctttctaggagtgcatctccagatcctgagcttgtgaggagggcccctagtccatcccttcctccaatcggtgtgaaagttggcaacactgataagatgaatggtggttcctcttctttccgtcgtagttcatccgcaatcggtggatctgatgatctggtggctgccttatctgggatgaacttatcatctagggcaatgagtgggcaaactatggaccagtctcagctctatcaggatgttgataacgtccagaagtttctttttgatcgacagggtgaccaaccaaatggcaatcagcagcactacatgaggcgtcctgagcatggacaatctaagttatctgatggatattctgccaatttggccaattcatccacgatgagaaaccagattaattctggcagtttcacatcttttgacagtttgtctcttggatctggctttccttcccctaggattggttctagatcccctggagggactgtatcttctcgacaaaatttagctggtatgtctaacatgctaaactataatggaattggaagtccaactgcgtcaccttctcttcagacttctattgatccagcgtatatccagtaccttgctcaaattgcagctacctgggatgatcctctaatggacaggagccatctgggaagttcttacatggacttacttggcagtccacttaggcatggtgaccgcaacatgcgctttccaccaggcatgagaaacttcggtaattcctttggttcatggaattcaggcatgagtggaaagatggatgctaatttgatgccctctctcctggaggaattcaagagcaacaaaagtaaatcatatgagctctccgaaatagctggccatgttgttgagtttagtgctgatcaatatggaagccggttcatacaacagaagctagaaacagccagtactgaagaaaaggacatggttttttcagaaattatgcctcaagctctcacattaatgactgatgtatttggaaattatgttgtccaaaagttttttgagcatggaagcactgcccagataaaggaattggctggtcagcttattggacgtgtccttgctcttagtcttcagatgtatgggtgccgggttatacagaaggctatagaagttgttgatttggatctgcagactaaaatggttgcggagctggagggtcatgtcatgcgctgtgtacgtgatcaaaatgggaaccatgttatacagaaatgcatagagtgcattcctcagcatgctatcgagttcattgtctcgacattctatggccaagttgtaatgttatccactcatccatatggttgccgagttattcagagggttctagagcattgtgatgatcctaagacacagcaaataatgatggatgagattctccagtctgtttgcttgctagctcaggaccagtatggcaactatgtggttcagtactgctgcctgttccatgtcgccatgtgctgtgctgccgtgtggaacaggaagcaacaagagaggtgtgagtactgctgcctgtcccatgtcgccatgtgctgtgctgccgtgtggaacaggaagcaacaagagaggtgtgagcatgttctggaacatggcaagccccatgagagatcagccattattgagaagctaattggccaagttgtgcaaatgagccagcaaaagtttgcctctaatgtcattgagaagtgcttagcctttggaaatcctgtagaacgtcaggttctgatcggtgagatgcttggatccactagcgaaagcgaacctcttgaggtaatgatgaaagaccagttcgcaaactatgtggtgcagaaggtgctagaaacttgtgacgatcagcagagggagatgatcttaacaaggataaagacacacttgaacacactcaagaagtacacatacgggaagcacatagtagcgcgtgtagagaagcttgttgctgctggagagaagcgccttgggcttcaaccagcatgcaccgccgcctgaagggcaaactctctaagttgtacagctaacagttgctaggtttgcctcatgtttttttctctactaaaaaccttatatgaaggccccttttggcctcgccaggaaaaaaaataaatactgtatgtttgcggggaagagtgtacattaattctgtagcagaaagaccccctacccatgtggcggaatcaagggaggagtgatgcgtgtgagtccgatcgatctgaaggctgctgtaaagaggaagatggaaggggaaggagtgagaagcatgtcagttactctgctgctgtacaaattaaacttagctcttagagtgaggagaaagtaagctgttagctgtctgcctaaaggaaagaaaggaaaaaaaaaagaagctggaggccattggcaccctgtttcatgtgttggtatagctgctgtggctctcctgttgtctgtctggcctttgttgtaacataaagctgaggcgcactagcctgccttcgttttcacagttaagctgaagttattagtatcagctttcctgaactgcttggtatgtaatgtgactctgtttcttccttgtactaatgcttgtctcatgtaatccaggcccctaatgtctgaatgttttaatctcatttttcacctctgataaacgttgtttttttgtttggttttgttgctgctgaggtgatctgtttttttttgctgcttttgttttggtatacatactccttg

SEQ ID NO: 57553 - DNA, 2964 bp, Zea Mays
tggagaaatttatttacatgaagataggaggattcgtatcagcgtgatatggataggcagactgccagccacaatagtagtgaatcattatgttcttctggaatacagtatggtctaaatcgtggacctggaactattggaggcctgcactctagcaatagtttacgaagcttggatgaaattccgaacaatgatctgccatcaaatacatttgcttctcttttagggtcatctctttctaggagtgcatctccagatcctgagcttgtgaggagggcccctagtccatcccttcctccaatcggtgtgaaagttggcaacactgataagatgaatggtggttcctcttctttccgtcgtagttcatccgcaatcggtggatctgatgatctggtggctgccttatctgggatgaacttatcatctagggcaatgagtgggcaaactatggaccagtctcagctctatcaggatgttgataacgtccagaagtttctttttgatcgacagggtgaccaaccaaatggcaatcagcagcactacatgaggcgtcctgagcatggacaatctaagttatctgatggatattctgccaatttggccaattcatccacgatgagaaaccagattaattctggcagtttcacatcttttgacagtttgtctcttggatctggctttccttcccctaggattggttctagatcccctggagggactgtatcttctcgacaaaatttagctggtatgtctaacatgctaaactataatggaattggaagtccaactgcgtcaccttctcttcagacttctattgatccagcgtatatccagtaccttgctcaaattgcagctacctgggatgatcctctaatggacaggagccatctgggaagttcttacatggacttacttggtacacagaaagctaaccttggccctttacttcagtcacaaaagcaatatggttactgtggcaatcttggatttaaccttggtggttatgctggaagtccattgacaagtcctgttcttccctcttcacctattgcaccaggcagtccacttaggcatggtgaccgcaacatgcgctttccaccaggcatgagaaacttcggtaattcctttggttcatggaattcaggcatgagtggaaagatggatgctaatttgatgccctctctcctggaggaattcaagagcaacaaaagtaaatcatatgagctctccgaaatagctggccatgttgttgagtttagtgctgatcaatatggaagccggttcatacaacagaagctagaaacagccagtactgaagaaaaggacatggttttttcagaaattatgcctcaagctctcacattaatgactgatgtatttggaaattatgttgtccaaaagttttttgagcatggaagcactgcccagataaaggaattggctggtcagcttattggacgtgtccttgctcttagtcttcagatgtatgggtgccgggttatacagaaggctatagaagttgttgatttggatctgcagactaaaatggttgcggagctggagggtcatgtcatgcgctgtgtacgtgatcaaaatgggaaccatgttatacagaaatgcatagagtgcattcctcagcatgctatcgagttcattgtctcgacattctatggccaagttgtaatgttatccactcatccatatggttgccgagttattcagagggttctagagcattgtgatgatcctaagacacagcaaataatgatggatgagattctccagtctgtttgcttgctagctcaggaccagtatggcaactatgtggttcagcatgttctggaacatggcaagccccatgagagatcagccattattgagaagctaattggccaagttgtgcaaatgagccagcaaaagtttgcctctaatgtcattgagaagtgcttagcctttggaaatcctgtagaacgtcaggttctgatcggtgagatgcttggatccactagcgaaagcgaacctcttgaggtaatgatgaaagaccagttcgcaaactatgtggtgcagaaggtgctagaaacttgtgacgatcagcagagggagatgatcttaacaaggataaagacacacttgaacacactcaagaagtacacatacgggaagcacatagtagcgcgtgtagagaagcttgttgctgctggagagaagcgccttgggcttcaaccagcatgcaccgccgcctgaagggcaaactctctaagttgtacagctaacagttgctaggtttgcctcatgtttttttctctactaaaaaccttatatgaaggccccttttggcctcgccaggaaaaaaaataaatactgtatgtttgcggggaagagtgtacattaattctgtagcagaaagaccccctacccatgtggcggaatcaagggaggagtgatgcgtgtgagtccgatcgatctgaaggctgctgtaaagaggaagatggaaggggaaggagtgagaagcatgtcagttactctgctgctgtacaaattaaacttagctcttagagtgaggagaaagtaagctgttagctgtctgcctaaaggaaagaaaggaaaaaaaaaagaagctggaggccattggcaccctgtttcatgtgttggtatagctgctgtggctctcctgttgtctgtctggcctttgttgtaacataaagctgaggcgcactagcctgccttcgttttcacagttaagctgaagttattagtatcagctttcctgaactgcttggtatgtaatgtgactctgtttcttccttgtactaatgcttgtctcatgtaatccaggcccctaatgtctgaatgttttaatctcatttttcacctctgataaacgttgtttttttgtttggttttgttgctgctgaggtgatctgtttttttttgctgcttttgttttggtatacatactccttg

SEQ ID NO: 57554 - DNA, 614 bp, Zea Mays
tgaaaggcaactatctcaagttaacaaaacccttgtccatatgatcattgcagtctcctctagctggctgaacgggtctacaaatatacactactactccactaatgtcacatatccacaaccagattaacagaaaatatattccatcattgaaaatgagttccgttgttttgggtgctactggtagggagaataagacatcatggcctgaggtggtgggcatgtccatcaaggaggcaagagagatcattcttaaagacatgcccaacgctaacattcaagttctaccggttggctcgcttgtgacccaagactttcgccctgatcgtgttcgcatcttcgttgatattgttgcccagactccaacagttggctgacaaggatatgccttatctataggccaaataaacaaagcctacttttatgtatcatggctaataaatcctacatttcttggttatccttgattggtttagcttattagctatatcgccatcaaaaggggccccaagaaattacatgtatgtctatcataaaaatctcatcccgatggaatatataataaataaataatgatatatgcaatcgtaactatgtcaaaatagcacaaaaga

SEQ ID NO: 57555 - DNA, 516 bp, Zea Mays
ctgacactattgttgactgcataacgaaacacatcgtcgtcggatcggagatgatgagttccgtcgtcgtggatgctgctgctaccagcagcagcgagaagaagacgtcgtggccggaggtggtgggcatgtccatcaaggaggcgacggagactattctcaaggacatgcccaacgcgtacatccaggtgctgcctgttgggtcgcccgtgacgctggaccttcgccccgaccgcgtccgtatcttcgttgacaccgtcgccatgactccgacagttgggtgatacataccaaatgcaataaacaaaccctactttttattttatgtttccagttaataataaaccaggccttagcttcttggttgtccttccttggttggtgttagcttctaagctactagtacaccattaaaaaaaggaggacctcatgtatggctaccgtgaaaaatgtgatcttgatggaataatatatcataaataagcaattaatgatgatatgcaaccatctaatact

SEQ ID NO: 57556 - DNA, 493 bp, Zea Mays
cacatattttactcgtttcgtggccggcagctggacccataccgtcagcctgttcgtgcttttgctttttggctacgaagggaactgggctgtagcctacaaggaaacaacctcgcgcgagatttcaggttttagttgggatttgtatttgctccagggtatataatggagcacctgatatcctctcccatctatcgcaaaggaacgaacagaacccagaaaaaaaaatcgaagtagacctcgcggacgccaagagctaggagagagagagaggatgctgtcgaagtagaattgaagccatagtcgccgtcgtgcctctgctggggttcgcagggagacgaccgaccttgtgaagatgttcgaagaagtcgccgagcacgatgatgactcggggctgtggggactcttcaccaaagtttgtgagagctacagaaccgcacaacaatgaggccaggaaattccaccatcaccatcgcgtgaggtcacgagtcac

SEQ ID NO: 57557 - DNA, 2378 bp, Zea Mays
ttagctaattttagcagctaactatcagttttagtgcattcaaacactttctagctacaactatcatatacatgcatgtcacctaaaaggctaaaacaagtaataaggctagagctgcaggtaggtttcctcttttgcacaagatatctcgagctagattacacaaactttaaactactcctatcttattagaaaccaaacttttcttttttataaactactcgtatataaaagtagagtgcaggtcatcagtttggagacgcagagctgcattatggccagcttctccttgaaaccacagcacaatggcagcagcagcaggatctaccatactatctgtagtgctactgcctccgaatggaggtcgctcctgcggtcccgaagcagtgtttcatggagctggaagaagcacacaaggttgcgattgcgatgctgtcagggttccaatgggggtgatgacagccgtctgagccaaaacaccggcattttccacccatcgatatggggggatttcttccttggttgctctagcagccctgaagaagctgctgcttcgtcccaacaaaaggcttggatggaacgatgcgatgaactgaaggaagaagtgggtcgtctgatggtagtagaagcaaactcaccattgcatgagaggctgcatttcatagacgcgctggagagcctgtgcttggaccacctgctgaaagaagagatcggtgctgcgctgacgcagatcgagaccgccggtgtcagtgacgactgcgacattgggaccgtctctctctggttttacttgctccggaaacaccgccgcagggcgtcgccagatgtgttcgtgaggttcagagacgcggagggaggtttccaggcgaacgatcctggggacctactgaggctctacaacgctgcgcatttcaggacccatggggagacaatactcgatgaagccatcgcgttcgcgagaagccgtctggagatgatgctgccctacgtgaaagggccattgttggcgcatgaagtcagatcctcgctggagatcccgctgcctagaagggtcaggatctacgagtcaaagtattacatccatgcgtatgagacaagtggaacgctgcatgagaaggtactgcaacttgccaagctgaactccaacgttctgcagctccatcatcagcaagagctgaagatccttacaagatggtgggaggatatgcagatcggatcaaaacttcctttcgcacgagatagaatcgtggagtgttttctatggatcttaggagtatactatgaaccgtgtcattcaagagcccggataatattgacaatggttatcgccatcgtgacactcttggacgatattttcgattctttcgcgaccccacaagaatgtgaaatactcactaattgcatcgaaagctgggatcccaaaggggctcaagacctcccaggttgcatgaaatttgctctagagaagatattggatagctaccagaccattacaaatatgctccaccgagaggacaagtatcgaatgacgtatctaagacactttacagaagatctagtgagaagcttcaacatggaggtaaaaatgcttcaaaaaggttacatcccagattctgttgaagagcatcttaaggtttcactcagaactggtgggtgtcccatcttatcatgtgcttgctttgtcgggatggatgatatagcaacaaaggatttctttgattggatttctagcgtacccaaaatggtgcgcgcactttctataattctgagactagcagacgatctccactcgtatgagcgggagcagctaatccctcatgtagcttccacaatcgacacctacatgaaaaagcacaatgtctcaattgaagtggcgcaggaaaacatacacaaactaaaagaagagtcatggaaagatttaaatagcgagtggctaaatccatgcaatgatgtgtatccaaagcaactattggagaggatattcaacttggcaaggacgatggagttcatgtacaaccaagaggacaatttcaccaactgccacaaccttaaggataccattcgctgcttgttggtagagccatataggatccacatttagtttttggcaacaaactaatgaattacagtgtccagttaatgtaatgcagagttatatgtcatccttatatgtgttagtatgttttctctagtgtatgtaatatggtgtcatctcatcctcatgtgtgtcaatcttcttttcatgtatagtgtcaatatgtacacatatatgtggcatcatttttgttttcaccctagagtttactcttgtcgtatcatttgcccttccttttggactttttatgttaaaaggaccatgttgtggtttcggaaaccgg

SEQ ID NO: 57558 - DNA, 819 bp, Zea Mays
ataaaaaaacccgtgcacacaatttctcatcaacggacgcagttccttctcaacctacctacgcctacaaccttccagaagataggatttttgggatgtacgaataccacacctctgtctcccaaaagggcctcctctcaaacgacgacgacgccagagaccagcggtcgtgcgtcctcactccttgtgcgctatggtcgcctccacaggttctacagggagtcagcccgtgtcggaactcggaagctggttcgtccaacaccttatggtcttttcttcttcttcagtagagtagaccgacatctagggttttccaatctctcgaatatttgctaccgtgaatgtcgccttcgcgctcgctcttctccctgaccccgacgagaggaagtcagtccatgtcggatctgaatgatggagctgcgacaaggcgaagggcggagagcttacatggctccctcgagtcaagaggagataggatttttggtttgtcaaccataccatcgttgttcaatgctctgattaaaatgtgcctagcgattgaaaccttcgatacattggagctcggagctgctgctctcatgcaaaggctcctgagcgcgagcgatcaacaagccgacgtgctgtcgctgctcgctggggggaaagaagatcacacaggtgtaaaataagagcttgcttctgcttacacaacaaagcttcatgcttcccaaatgtgctacaacccctaaagtaccaggtatcactactcggatagtaaaaatgtacaaagcttcatgcttcgcaaatgtgcaactcattgaaaaaacaggagcattcggc

SEQ ID NO: 57559 - DNA, 390 bp, Zea Mays
cttgtgcgctatggtcgcctccacaggttctacaggaacaggaaggtggctgagcgggttgacggtgagcggctccgacaggatgaaggatggagcgactgatgatggcgttggggaaattcatgagcaggcatcaggaagcggctcggcgagcatcagcgtggagctaggaacagcatccaggcgagcggccatgggaacagaagcaaaggcgcgggtgctccggtgccggcgagtgcggaccagacgaagtcccatgactatggcttggtgtgctggtgtagaggagaaccgagacgctacgatgaggagtctggccggcggagaaacacgaccacgccgctgaaaatgacggcgtacaggagctgctcatgcacaaatacgagggag

SEQ ID NO: 57560 - DNA, 300 bp, Zea Mays
cacaaatcacacacaccaatatttttgcagcggaaatcttattaccaaattttacaagttacaaaaaatttatattattttatcggagtgattacaaaagtataagtttgaaatatatgctagctcaaatgaccatcctcagtaagaagataaagacgggttatacttatataagaaggccgagcccaccggcacttaacaccatcacagcagcacaaagttatatcctgaaaaacaacagggaataaaaccctgagtatggaattactcagcaagacttacccgactaaagaaaagact

SEQ ID NO: 57561 - DNA, 2097 bp, Zea Mays
ataacactaggttagtgttgttagacgacgtccacttgacgatcatccttgtcctaacacttgattaggtgggttcgtccatcagcaccaccatgcggagtagcccatgcttgaggtcgacttgactcatctttcgcatcacacgattatttaacgtacctaaatgaaatgcattatgcacatgaatgcatatcaacaggaacaacacaaatctaaatagtgctatacgatagcgcattaaatacctagtggcgaggcacataataatatttaaaagcaattaccagatgccaggatattactaagcacaatgtccgcgctattttaacttaaccgaatctgacttgaagaagaagcgctaatacgaaacacaagtcctatatatatttctaagctagagaatacatcaaaaggcggactagacttaggctgattatttagggacacctaactcagtctaaggatagagactattaattctaatatttcggctaataggaataacaaaaatgcgcgccaatattaaattcagctcaaatccactaatactaatttcacgtgaaactacggcatcgatagtgggttctagttcgagtctttcctcaaaccaatagaattggacactcgagaagaacacgtcagctagctgttagaaacactaaacctatcccgcacatcatcgttatacctcccgtcgaaaacgtagaactgatttaaacgtaccagacctacacgtctacctaagcactccttgtctaatttacattgtcatcaatctaagacatttaatcggttaccgaacataaaaaataactactactagagctgagcatctattatatcttaataattaaaagcgtcataacactgaaaaatagttggctagccgataaaaatcccaacatatccttcacataacctacgaactgacgaatgctagatgatgcgattaattcaacatatatcacttttgctaaaaatacgagaatcaacataacctacataactatcgattcatttattaaaacaaataataaaaatagagaatcagctcaccataatcaactcgactcaatattcgcaagaacgacgacaggaacaggaaggtggctgagcgggttgacggtgagcggctccgacaggatgaaggatggagcgactgatgatggcgttggggaaattcatgagcaggcatcaggaagcggctcggcgagcatcagcgtggagctaggaacagcatccaggcgagcggccatgggaacagaagcaaaggcgcgggtgctccggtgccggcgagtgcggaccagacgaagtcccatgactatggcttggtgtgctggtgtagaggagaaccgagacgctacgatgaggagtctggccggcggagaaacacgaccacgccgctgaaaatgacggcgtacaggagctgctcatgcacaaatacgagggaggacgaagcagggacgtgagcagctcggtgcggtggggagcagtgatgcgagcagcttgacgctgatgatgaaggccaggacgaggtcgtcggcgctgatgtgttgagtacaagggcaaggaggaagcaggaagggacgcttggcgttgtccggcctaggtgagcggcacgatggcgggcgaggacgttacgaggatgctggcggtctgcgtgagagacttccagcgatgcaataatgcacaagataagagcaaggctggcaagatttcagagggtacgtggttcttctaagccacgtctggagcatgcactagaagaagataagaacgtacacgttgaggagcattctctggaagaagatatttcacaaacgttctcaccaattgcaagttctcatgaacgtttattttgtattttttttttctaaggagccgacatcttatctaggataagggtttaaaagggataacaagggattgacccaaaataatatccggcaaaataatttagacagttcagacaaacagaaacagataagatattgaaaatcgtaacagacgaagacgactaaaatttagtgactattatattcatcgatatcccgtacttaagtccatagtcgatatccaacaggagataaacacctg

SEQ ID NO: 57562 - DNA, 900 bp, Zea Mays
gagtcaggagaggaggaagtggccctcgggtgttccatgattcaaatgggtcggaccgtgggctgtgaacatgggtttggtgggcgggcgaagaagccagcgggcccagcatctttatcgtctgccgcaaagagggctgaaggagaagcgaggaaaggtgaggccgatagatagaggagctgcggcgccgccggcgagcgaagagtggaggatccgatccgaagcgagaggactgaatcctgcggccgggagggacgcgggaccacgacgagcgtcgtcgtcggtgccaagcaacggcagttgtccctgtccagagcacaggcaagatggttaacgcgatcaaggggctgttcatctcctgcgacgtacctatggcacagttcatcgtcaacctgaacgcgtcgatgccgccgtcggagaggttcatcgtgcacatgctcgaccctaccaacatgttcgtgcagcctcacgtggcgcacatgatcaggagcaagatcggggagttcagggaccagaacagctacgagaagccgcagtagtggaggatctaccgcgtcctacactccttccttgggacttgctttcgttgcctgtattatttctgctgtgagctgagcacctcagcggaaacgagtacgccaaatagatcccacctgtggccttgaaatcatactgctatgtgctataaacgtgcagagggcactgctactgtgctgcacttgtggtattctgggattctttttgtcaggtccttaaaatccgttgagaatttgagatccagatggggcttagaccccgtttcaatctcacggaataaactttagcttcctgctaaactttagctatatgaattgaagtgctaaagtttagtttcaattaccaccattaactcttctgttt

SEQ ID NO: 57563 - DNA, 1899 bp, Zea Mays
caagtcgacatcctactgctgatcgatcgcgagcttgtcaggttcttcccatccaacgtgcacagctcctatcacggcaaagcaaagcaccagcagcgtacgaggacaaggcctgaatttgttcccagcaatgcacaccacggcaacagcattcactgccaagagagtgagcgagcgagcagaggcagcgcagcaatggcggcggcaatagtactctccggccaggtgcggccgcttccctcgtcgctgcccctgtccctgctgctgctcctcctcctgtgctgctccggcacctcgtggggatggagcacgtcccggggaggagccgccagggagtgcggcttcgatggcaagctggaggccctggagccgcgccacaaggtgcagtctgaggccggctccgtccagtacttcagccggttcaacgaagccgaccgggagctcacctgcgccggcatcttcgccgtccgcgtcgtcgtcgacgccatgggcctcctgctccctcgatactccaacgtccattcgcttgtctacatcgtccaagggagagggatcattgggttctcgtttccgggatgccaagaggagacccagcagcagcagtatggatacggatatggatatggacaccatcaccatcagcatgaccaccacaagatccaccgattcgagcagggcgacgtggtggccatgccggccggcgcccagcactggctgtacaacgacggcgacgcgccgcttgtggcggtctacgtcttcgacgagaacaacaacatcaaccagctcgagccttccatgaggaaattcttgctggctgggggcttcagcaaggggcagccccacttcgccgagaacatcttcaaagggatcgacgcccggttcctgagcgaagccctgggcgtcagcatgcacgtcgccgagaagctgcagagccggcgtgaccagcgaggcgagatcgtccgcgtggagccggagcacggctttcaccagctgaatccgtcgccgtcgtcgtcgtcgttttcgttcccatcgtcacaagtccagtaccaaacgtgccagcgcgacgtcgacaggcacaacgtctgcgccatggaggtgaggcacagcgtcgaacggctggaccaggccgacgtctacagccctggggctgggaggatcacacgcctcaccagccacaagttccccgtcctcaacctcgtacagatgagcgcggtgcgggtagacctgtaccaggacgccatcatgtcgccgttctggaacttcaacgcccacagcgccatgtacggcatcaggggcagtgcaagggtccaggtcgccagcgacaacgggaccacggtgttcgacgacgtgctccgtgcggggcagctgctcatcgtaccccagggctacctcgtcgccaccaaggcgcagggagaaggcttccagtacatcgccttcgagacgaaccctgacaccatggtcagccacgtcgccgggaagaactccgtcctgagcgacttgccggccgccgtcatcgccagctcgtatgccatctccatggaggaagctgcagagctcaagaacggtaggaagcatgagctggctgtgcttactcctgctggcagtggcagctaccaacaaggtcaagctggcagcgcccaacagtaggcacaacctcagagtgatctgcctgaataagtactcgtagactgtaataattaaacaaagcttgctcatggttaaactgcgtgttgattagtctttcaactacatagctctaaagtttttgatacaccgagtgatttgccaggaaaaaaatgagcagattgttgtaagcaaaacatgtttgttatggctaaactgcatgtctacctggatttgtattttttttcaactacctagttcatctgataaaaacaa

SEQ ID NO: 57564 - DNA, 2461 bp, Zea Mays
ctctttcctcacgcaacttctcccactactcacgctactacccctgccctaggccacgtccaacagcctcccccaatccgtcctttggcttcgctggcgacggcggaggctggtgaaggcaggaattggtgagcgctccaattcggggattggcggaggctggtgcgcgccacggcaggaattggcggcggctggtgcgctccagttcgaggaatcggctgcagctcacagaggacgcacggcgtgtgtttccttgccctcgcggacatggctaggggtatgagaaagtgcatcattcaaagccaagaagagtatttggtagaggagcctattggggaaacaagtcatcggccacgagatgcagcatatgaccaccatccttctgctagagaacgccaaaaagaaagcgacaatgatcatcataaaaaagatacaacatcttttgagactacttctggagtgtacccttctcctgatgatgcggatatagaggattctgttgaaggtcaaactaatgaagcaataagtcgtggtccgaacaaacttaaacatgtttggaaccttcaaaaaggaaaacgaattgtagttaactgtaacgagctcggccaacctattggagaggaggcaggagtcttaggaaaattccttggcatggttgctaggaatggctgcttatgtagcttaagcttcaaagattggagattactgataggaaagaaggacaggaacaatgaacaaaaaaacaagcaagatgtactgaagcaagtaaagatgagattcctataccctgcccgcatggaaaagtggatacttcgaactattggtgagagatggagacaacacaagtccaatctaaaatccttacattttgatgcgcataggagcaaggaaaataatctaaaaaatgttccaaaaggcgtcttagatgatcaatgggtcgctcttgtgaataattggtttacaacaaaatcacaggatatcagtgaggcaaataggataaactgcgcaaaaaggaaggcgacccatacatcaggaacaaagagttttgctcggaatagggaagatatgagggaacaagatccagaaaagaaatacccccatagggctgtattgtatatcaatacacacaagagtaacatcacaaagaacacaaacccacatgtggttgcgttgaaggaactattagtgcaagaaccaagtttagctgacactagtcatggaaaggttgcatggaaaggagatgcgcttagccaaattttaggagaagagaagcctggccatatccatggtcttggccttgttccgaatccagatcaagtgtttggtggatcaacttcaaggcatctaaaacatcttaatttaacctctttggatgcaacatcaagtgaagatgtagtatctcttcgacttcaagtggaaaaacttatagatcgtgtccagaagcaagatgatactatactaaatttgcgaaataccttggaactgcaaaaaagtcaccatgaatgtctagatgaacctttgtcggcatcaaaagatcttcagccgactatgaatcaaaaaattaatcttcttgatgaactgaatagcacaatggcggatgaaatcaaacatgatgggtacgaggagctgcaggcccagtgcaaaaaatctaaaattcaagaaaagggcaagccaccaatgccacgaggaggactccaaggtggtagagtttctacatcgttaaatgtaaaaaatagaagtaatgcagccaaggtgatgaaccaggacactgctcgaaattcctctaatcatgaaccatacaagaacaagggatctctagaaaattatttgccaagtactaaagacgatcagtctacatcaaaacgaaaagttggttctcatattttcttgaagagttggaggaatcaaaataagaaggttgcattaggtacaataattggttgtgatccaaagcaacaagttggaggagatccattgggcaaagaattttggaaggttcgtctcggtcttgtacttgtgcgtgatgaaccactaatacggccctacaacaatttcgtggttctaggagacatagacaacgaccctatagcatggccttcaagttgtatagaaaaggcagctctttaatgtcaaccattgaacaacaacagatctacatgagggctatgactttgattcttctttaaattggcgttattagtgatgagagcgatgagtctactgagtccagtttatgagtcaacctttgtttgtttcatactatcatagaaaaaatgttaattcatacattgtgtaatggattaagttgtggatgatattttataacgacactactatttttaatatagactgattccagattatttgccatgtgtgacccaataatagtttggaaattgataatgtgcaatgcacatgctttgcatatttgttttgatccaaataaaaaaataattataaa

SEQ ID NO: 57565 - DNA, 2445 bp, Zea Mays
ctctttcctcacgcaacttctcccactactcacgctactacccctgccctaggccacgtccaacagcctcccccaatccgtcctttggcttcgctggcgacggcggaggctggtgaaggcaggaattggtgagcgctccaattcggggattggcggaggctggtgcgcgccacggcaggaattggcggcggctggtgcgctccagttcgaggaatcggctgcagctcacagaggacgcacggcgtgtgtttccttgccctcggttcggacatggctaggggtatgagaaagtgcatcattcaaagccaagaagagtatttggtagaggagcctattggggaaacaagtcatcggccacgagatgcagcatatgaccaccatccttctgctagagaacgccaaaaagaaagcgacaatggtaatgagttcaatgacctagatcatcataaaaaagatacaacatcttttgagactacttctggagtgtacccttctcctgatgatgcggatatagaggattctgttgaaggaatggctgcttatgtagcttaagcttcaaagattggagattactgataggaaagaaggacaggaacaatgaacaaaaaaacaagcaagatgtactgaagcaagtaaagatgagattcctataccctgcccgcatggaaaagtggatacttcgaactattggtgagagatggagacaacacaagtccaatctaaaatccttacattttgatgcgcataggagcaaggaaaataatctaaaaaatgttccaaaaggcgtcttagatgatcaatgggtcgctcttgtgaataattggtttacaacaaaatcacaggatatcagtgaggcaaataggataaactgcgcaaaaaggaaggcgacccatacatcaggaacaaagagttttgctcggaatagggaagatatgagggaacaagatccagaaaagaaatacccccatagggctgtattgtatatcaatacacacaagagtaacatcacaaagaacacaaacccacatgtggttgcgttgaaggaactattagtgcaagaaccaagtttagctgacactagtcatggaaaggttgcatggaaaggagatgcgcttagccaaattttaggagaagagaagcctggccatatccatggtcttggccttgttccgaatccagatcaagtgtttggtggatcaacttcaaggcatctaaaacatcttaatttaacctctttggatgcaacatcaagtgaagatgtagtatctcttcgacttcaagtggaaaaacttatagatcgtgtccagaagcaagatgatactatactaaatttgcgaaataccttggaactgcaaaaaagtcaccatgaatgtctagatgaacctttgtcggcatcaaaagatcttcagccgactatgaatcaaaaaattaatcttcttgatgaactgaatagcacaatggcggatgaaatcaaacatgatgggtacgaggagctgcaggcccagtgcaaaaaatctaaaattcaagaaaagggcaagccaccaatgccacgaggaggactccaaggtggtagagtttctacatcgttaaatgtaaaaaatagaagtaatgcagccaaggtgatgaaccaggacactgctcgaaattcctctaatcatgaaccatacaagaacaagggatctctagaaaattatttgccaagtactaaagacgatcagtctacatcaaaacgaaaacgagtatatggtcaatttcaaagtgaggaattttggacacttgacgaaaatcatgagacgatcaagccactacgaggagacacattacaacctagtaggatttcaacaggactgaaggttggttctcatattttcttgaagagttggaggaatcaaaataagaaggttgcattaggtacaataattggttgtgatccaaagcaacaagttggaggagatccattgggcaaagaattttggaaggttcgtctcggtcttgtacttgtgcgtgatgaaccactaatacggccctacaacaatttcgtggttctaggagacatagacaacgaccctatagcatggccttcaagttgtatagaaaaggcagctctttaatgtcaaccattgaacaacaacagatctacatgagggctatgactttgattcttctttaaattggcgttattagtgatgagagcgatgagtctactgagtccagtttatgagtcaacctttgtttgtttcatactatcatagaaaaaatgttaattcatacattgtgtaatggattaagttgtggatgatattttataacgacactactatttttaatatagactgattccagattatttgccatgtgtgacccaataatagtttggaaattgataatgtgcaatgcacatgctttgcatatttgttttgatccaaataaaaaaataattataaa

SEQ ID NO: 57566 - DNA, 2374 bp, Zea Mays
ctctttcctcacgcaacttctcccactactcacgctactacccctgccctaggccacgtccaacagcctcccccaatccgtcctttggcttcgctggcgacggcggaggctggtgaaggcaggaattggtgagcgctccaattcggggattggcggaggctggtgcgcgccacggcaggaattggcggcggctggtgcgctccagttcgaggaatcggctgcagctcacagaggacgcacggcgtgtgtttccttgccctcggttcggacatggctaggggtatgagaaagtgcatcattcaaagccaagaagagtatttggtagaggagcctattggggaaacaagtcatcggccacgagatgcagcatatgaccaccatccttctgctagagaacgccaaaaagaaagcgacaatggtaatgagttcaatgacctagatcatcataaaaaagatacaacatcttttgagactacttctggagtgtacccttctcctgatgatgcggatatagaggattctgttgaaggtcaaactaatgaagcaataagtcgtggtccgaacaaacttaaacatgtttggaaccttcaaaaaggaaaacgaattgtagttaactgtaacgagctcggccaacctattggagaggaggcaggagtcttaggaaaattccttggcatggttgctaggaatggctgcttatgtagcttaagcttcaaagattggagattactgataggaaagaaggacaggaacaatgaacaaaaaaacaagcaagatgtactgaagcaagtaaagatgagattcctataccctgcccgcatggaaaagtggatacttcgaactattggtgagagatggagacaacacaagtccaatctaaaatccttacattttgatgcgcataggagcaaggaaaataatctaaaaaatgttccaaaaggcgtcttagatgatcaatgggtcgctcttgtgaataattggtttacaacaaaatcacaggatatcagtgaggcaaataggataaactgcgcaaaaaggaaggcgacccatacatcaggaacaaagagttttgctcggaatagggaagatatgagggaacaagatccagaaaagaaatacccccatagggctgtattgtatatcaatacacacaagagtaacatcacaaagaacacaaacccacatgtggttgcgttgaaggaactattagtgcaagaaccaagtttagctgacactagtcatggaaaggttgcatggaaaggagatgcgcttagccaaattttaggagaagagaagcctggccatatccatggtcttggccttgttccgaatccagatcaagtgtttggtggatcaacttcaaggcatctaaaacatcttaatttaacctctttggatgcaacatcaagtgaagatgtagtatctcttcgacttcaagtggaaaaacttatagatcgtgtccagaagcaagatgatactatactaaatttgcgaaataccttggaactgcaaaaaagtcaccatgaatgtctagatgaacctttgtcggcatcaaaagatcttcagccgactatgaatcaaaaaattaatcttcttgatgaactgaatagcacaatggcggatgaaatcaaacatgatgggtacgaggagctgcaggcccagtgcaaaaaatctaaaattcaagaaaagggcaagccaccaatgccacgaggaggactccaaggtggtagagtttctacatcgttaaatgtaaaaaatagaagtaatgcagccaaggtgatgaaccaggacactgctcgaaattcctctaatcatgaaccatacaagaacaagggatctctagaaaattatttgccaagtactaaagacgatcagtctacatcaaaacgaaaagttggttctcatattttcttgaagagttggaggaatcaaaataagaaggttgcattaggtacaataattggttgtgatccaaagcaacaagttggaggagatccattgggcaaagaattttggaagatagaaaaggcagctctttaatgtcaaccattgaacaacaacagatctacatgagggctatgactttgattcttctttaaattggcgttattagtgatgagagcgatgagtctactgagtccagtttatgagtcaacctttgtttgtttcatactatcatagaaaaaatgttaattcatacattgtgtaatggattaagttgtggatgatattttataacgacactactatttttaatatagactgattccagattatttgccatgtgtgacccaataatagtttggaaattgataatgtgcaatgcacatgctttgcatatttgttttgatccaaataaaaaaataattataaa

SEQ ID NO: 57567 - DNA, 2656 bp, Zea Mays
catagcatcctgttaggtgtttttcagaaactgcattgcagacacattgtccatagttgtgggatacttggaggtagtggtagtaatgtcaacttttacatgacttgtttttatacgatgtctaaatacttgcagacacattgtactttgtttgaagttttagagatgttagtaaaacaatttttcctcattgagttgggctctgtttcagactccaagtgttttattaaatcaagtcagttgataaattcttttctatgttggccattgtatggattaatgctatgttttactgaactccatttacatttctagaccaactaattacacatgataagtttttattttggtatgccagcggacatggctaggggtatgagaaagtgcatcattcaaagccaagaagagtatttggtagaggagcctattggggaaacaagtcatcggccacgagatgcagcatatgaccaccatccttctgctagagaacgccaaaaagaaagcgacaatggtaatgagttcaatgacctagatcatcataaaaaagatacaacatcttttgagactacttctggagtgtacccttctcctgatgatgcggatatagaggattctgttgaaggttcttacacttcataaattgtaatttattttaaaatttcaaccattctttaattgtttctaacataaaactgcataggtcaaactaatgaagcaataagtcgtggtccgaacaaacttaaacatgtttggaaccttcaaaaaggaaaacgaattgtagttaactgtaacgagctcggccaacctattggagaggaggcaggagtcttaggaaaattccttggcatggttgctaggaatggctgcttatgtagcttaagcttcaaagattggagattactgataggaaagaaggacaggaacaatgaacaaaaaaacaagcaagatgtactgaagcaagtaaagatgagattcctataccctgcccgcatggaaaagtggatacttcgaactattggtgagagatggagacaacacaagtccaatctaaaatccttacattttgatgcgcataggagcaaggaaaataatctaaaaaatgttccaaaaggcgtcttagatgatcaatgggtcgctcttgtgaataattggtttacaacaaaatcacaggatatcagtgaggcaaataggataaactgcgcaaaaaggaaggcgacccatacatcaggaacaaagagttttgctcggaatagggaagatatgagggaacaagatccagaaaagaaatacccccatagggctgtattgtatatcaatacacacaagagtaacatcacaaagaacacaaacccacatgtggttgcgttgaaggaactattagtgcaagaaccaagtttagctgacactagtcatggaaaggttgcatggaaaggagatgcgcttagccaaattttaggagaagagaagcctggccatatccatggtcttggccttgttccgaatccagatcaagtgtttggtggatcaacttcaaggcatctaaaacatcttaatttaacctctttggatgcaacatcaagtgaagatgtagtatctcttcgacttcaagtggaaaaacttatagatcgtgtccagaagcaagatgatactatactaaatttgcgaaataccttggaactgcaaaaaagtcaccatgaatgtctagatgaacctttgtcggcatcaaaagatcttcagccgactatgaatcaaaaaattaatcttcttgatgaactgaatagcacaatggcggatgaaatcaaacatgatgggtacgaggagctgcaggcccagtgcaaaaaatctaaaattcaagaaaagggcaagccaccaatgccacgaggaggactccaaggtggtagagtttctacatcgttaaatgtaaaaaatagaagtaatgcagccaaggtgatgaaccaggacactgctcgaaattcctctaatcatgaaccatacaagaacaagggatctctagaaaattatttgccaagtactaaagacgatcagtctacatcaaaacgaaaagttggttctcatattttcttgaagagttggaggaatcaaaataagaaggttgcattaggtacaataattggttgtgatccaaagcaacaagttggaggagatccattgggcaaagaattttggaaggttcgtctcggtcttgtacttgtgcgtgatgaaccactaatacggccctacaacaatttcgtggttctaggagacatagacaacgaccctatagcatggccttcaagttgtatagaaaaggcagctctttaatgtcaaccattgaacaacaacagatctacatgagggctatgactttgattcttctttaaattggcgttattagtgatgagagcgatgagtctactgagtccagtttatgagtcaacctttgtttgtttcatactatcatagaaaaaatgttaattcatacattgtgtaatggattaagttgtggatgatattttataacgacactactatttttaatatagactgattccagattatttgccatgtgtgacccaataatagtttggaaattgataatgtgcaatgcacatgctttgcatatttgttttgatccaaataaaaaaataattataaa

SEQ ID NO: 57568 - DNA, 232 bp, Zea Mays
atggcctccacccaactcacgtgcagcaggttccaactcccaagatctaggtcggacaccgacgcacaccacgtcagtaacgccaagcaccactcgttcgacctcggcaagaacccgcctctccgtcatcgcccccctccactctctctcgcttgctctagccgatctatgtgcatggggctcaacggctggaacaaatcctcgtcgatgctcagatcttgggagttcatgg

SEQ ID NO: 57569 - DNA, 1179 bp, Zea Mays
aaacaactaattttgacttccgttatttattcttggtatactagctgagatacttattttttccctgaattcataatttcatatcaccatgcagactgaggtaaccacatatgcagtgtattttgagttatgcaatctcatgagcaagaatagaagataaagatacttggtgggttgataagagcctaatggaaacaaagagagagattactagaaaactggatcaacactgaactaaaaggaaggagcaggtcataccagtagtacggccactagcatagagtgacaggactgcttgaattgcaacgtacatggcaggaacattgaaagtctcgaacataatctgggtcatcttctccctgttggcctttgggttcaaaggagcctcagtaagcaacacagggtgctcctccggggcaacacggagctcattgtagaaagtgtgatgccagattttctccatgtcatcccagttgcttacaataccgtgctcaatcgggtacttgagcgtgagaatacctctcttggactgtgcctcatcaccaacatatgcatccttctgccccatccctaccatgacaccggtgtgacgaggacgcccaacgatgctagggaatacagcccttggtgcatcatcgccggcaaaaccagcctagaagatagatacacaaaattagtggcatatttgggtgggggagactatggctgtacaaattaaggggaaaagcactgaccttgaccattccggtgccattgtcgcagacaagaggctggatgtcctcaccatcagccatttctacagaactgctgcaggcggcagcgagcgaactcttgcagcggcggcgcgggttccgcccgtgtcgccccgcagaggagcgacggttcgcagcttcgcacagcatgaagggaagggaagagaagaggtgggagtacctggtgggtgctcgctgccggcgaagaggccaacgaaagcctcagcaccctggcttagggcggcggcggcggcaactgtggtctgagagcgaggagagcaagagagcaggaatgcagcggacggaaggggaaagggggaatgcaggaggagcagttgtttgtggcctgcaaccgcgagaagactgccagacccagatgcgattgagaagggatctgttctgtgctggcttgcaattcgacggggtt

SEQ ID NO: 57570 - DNA, 2242 bp, Zea Mays
caacactgaactaaaaggaaggagcaggtcataccagtagtacggccactagcatagagtgacaggactgcttgaattgcaacgtacatggcaggaacattgaaagtctcgaacataatctgggtcatcttctccctgttggcctttgggttcaaaggagcctcagtaagcaacacagggtgctcctccggggcaacacggagctcattgtagaaagtgtgatgccagattttctccatgtcatcccagttgcttacaataccgtgctcaatcgggtacttgagcgtgagaatacctctcttggactgtgcctcatcaccaacatatgcatccttctgccccatccctaccatgacaccggtgtgacgaggacgcccaacgatgctagggaatacagcccttggtgcatcatcgccggcaaaaccagcctagaagatagatacacaaaattagtggcatatttgggtgggggagactatggctgtacaaattaaggggaaaagcactgaccttgaccattccggtgccattgtcgcagacaagaggctggatgtcctcaccatcagccatttctacagaactgctgcaggcggcagcgagcgaactcttgcagcggcggcgcgggttccgcccgtgtcgccccgcagaggagcgacggttcgcagcttcgcacagcatgaagggaagggaagagaagaggtgggagtacctggtgggtgctcgctgccggcgaagaggccaacgaaagcctcagcaccctggcttagggcggcggcggcggcaactgtggtctgagagcgaggagagcaagagagcaggaatgcagcggacggaaggggaaagggggaatgcaggaggagcagttgtttgtggcctgcaaccgcgagaagactgccagacccagatgcgattgagaagggatctgttctgtgctggcttgcaattcgacgggtttggcttcttcacaaaataatggacagtgaggggcttttctataaacactttcctccagccgttggatccgtcaacccgatctgcattacagagacaggtgtgtcgtcgtctcctcactctcgcctctcccctcttcacccgtgggccgacgcgccgccgcagcaagcagccgagaggggaggggatgctagccgcacggaggggcgcggcggccgcgtgggcggcacaggccttccactcctcctccgcagcgctctccaaatccactcctcgattccgcttcaccgtccgtgaaaagcgaggggatgcgaagagcgcccttaagaaccttctgctcaatggcggcacatgtcaggaaagcagtaacaaacaaatgaggaagcagaaaggtggtaccgggtcgaaggctcagcgctctgctccaggaaaaaatccctgtggaaaaaataagcgcgggcattactggaaaagcttcgatgatgacgatgaatgcgcgcacacaccatatggtacctatggtggtaagaaatctttcacctggtactggcctggggaggacgacggccttggtagtaatcctagtggttttcaatggagggaggaatctcagtctgccaaatcaaaggagaagttctggaacgaaagtgacgtcgatgaggacgaggggtcgagccgtgatgatctgcgaagctataggatttctctcggattgccagttttaggtcccttaaagctggatcatattaaggctgcttttcgtgcatctgctctcaagtggcacccagacaaacatcaagggccttcacaggctgaagcagaagaaaaattcagacggtgcgtggaagcgtataacgcattgactcgtgctttcagatcaagtggctaactaccgcgaggaattttgttctttatgatttgaggttttcttaggactcctagtgatgtgtgcgtggctgctggtcttcaggacacagagactgctagaagtgaagttcagagttatggcttcatgttgataacgaaatatataagcataatctttacaaaaaaaacatagattaggccagtcctgccaaatcgtatgagaacgcaaattacagggctcatttgtatgatgatttggttccacacaacgctgtaagtagaaagcaaatactgtttgttccatgctgagattttgtcaagcaaatactcccaggatgaaagtgaataaccgaattgttagtataaatttagtattttaaaatatatatgtatgaaactttatgttatcaagcacattgttaca

SEQ ID NO: 57571 - DNA, 2327 bp, Zea Mays
cacttcaattcatatagctaaagtttagcacgaagctaaagtttagctcatgagattgaaacggggcctaatggaagaggggccgtagagagagagagagagagagagagagacgagacgagagggaaagaacaaacagggggagcccatccgccgtgatcaacagcacagaaggtgagaaagcgagagagggaagagccgagctggcaagcccattgattccatccatcctcggtgcacgccagccggcggcctcccagtttccggcggccgggtggatcccatcttgtagggagtgcggaagccgtcaggggcaggagagctcttcctgccttcggcgcgtggagagctgacgcttggtctccaccaggagcttgtgatgcaacaatatgctcatgaaggggccatcttcagatgttctcagagcaagcatttctagcgccccaagtacatctagccatggttctgcacaagatgaatgtgattcattaggggatgtgtatgtatgggattgtggggttaagcatgctgcattggtcatgaaaaatggtgaggtttttacatggggtgaagattctggaggccgccttggccatggaacacgagaagattgtgttcgtccacgtctggttgagtctttgacagtttccaatgtagattttgttgcctgtggtgaatttcatacatgtgctgttacaacaacgggtgagctttatacatggggagatggaacttacaatgttggccttctcggacatggcaatgatgtaggacactggatacctaagaggatttctggagcactggaaggtcttcaagttgcttatgtttcatgtgggacctggcatacagccttgataacatccatgggccagttatttacctttggggacggttcatttggtgtattaggtcacggagatctgaaaagtgtttcttacccaagggaggtagagtcactatcagggttgaaaacaattgctgtggcatgtggtgtgtggcacactgcagctatagtggaggttattgtcactcggtccagttcaagtgtaaagctatctgctggaaagctgttcacatggggagatggtgacaagcatcgacttggtcatggtgacaaagaaactcgacttaagccgacttgcgtggctacacttattgatcatgatttttatagggtggcatgtgggcacagccttactgtagccttgacaacttctggacaagtattgagcatgggtaatgctgtttatggtcagcttggaaatcctcattcagatggaaggataccatgtttagttgaagacaagattgtgggtgaacaagttctccaaattgcctgtggatcctaccacgtcgcagttttgacaaataggagtgaagtttttacatgggggaagggagctaatggaagattgggccatggagatacagaggatcggaaggtgcctacactggttgaagccttgaaagatagagctgttaggtacatagcctgtggtgcaaacttcactgctgctatttgtcaatataaatgggtttctggagctgaccaatcacagtgctcctcatgtcgacaaccatttgggtttacacgaaagaggcgcaactgctataattgtggacttgtccattgtaattcctgcacctcgcggaaggctttgagagcatcactggctcctagtcctgggaaaccctaccgtgtttgtgattcatgtttcttgaagttgaataatgcctcagatcctaatgcagctaaccggaggaaagatcctgttccctatcaacctgttgaaagcaatggcgatgctaaagtaggaaaggctagtttgcctagcaatatggaaatgattcgaaatttggatatcaaagcagcatggcaagggaagaaaactgatgggctatcgtttctccggaatcctcaagttagttcgctcctgcagctgagtgatattgctttatctggtggcttgggcatgaacagatcagctccgagagcggtacacatatctgcagctcgctcggttactacttcaagagctgtttcccctttctctcgcaagcccagtccaccgcgttctactacaccagttccaacagcccatggtctttctttctcaaaaagtgctactgataatattgtgaaagcaaatgagctcttaaatcaggaagttgaaagactgcgtgcacaggttgataacctgagaaatcgctgtgagcttcaagaacttgagcttcaaaaatcagcaaaaaaagtactagaggccatgacactggttgccgaagaatctgcaaaatccaaagctgcaaaagaagtgaatcaagct

SEQ ID NO: 57572 - DNA, 2356 bp, Zea Mays
agcacgaagctaaagtttagctcatgagattgaaacggggcctaatggaagaggggccgtagagagagagagagagagagagagagacgagacgagagggaaagaacaaacagggggagcccatccgccgtgatcaacagcacagaaggtgagaaagcgagagagggaagagccgagctggcaagcccattgattccatccatcctcggtgcacgccagccggcggcctcccagtttccggcgggaggccgggtggatcccatcttgtagggagtgcggaagccgtcaggggcaggagagctcttcctgccttcggcgcgtggagagctgacgcttggtctccaccaggagcttgtgatgcaacaatatgctcatgaaggggccatcttcagatgttctcagagcaagcatttctagcgccccaagtacatctagccatggttctgcacaagatgaatgtgattcattaggggatgtgattgacattctcctcccgaagccattggagtccaatttagttcttgatgtgtatcatgtagattgtggggttaagcatgctgcattggtcatgaaaaatggtgaggtttttacatggggtgaagattctggaggccgccttggccatggaacacgagaagattgtgttcgtccacgtctggttgagtctttgacagtttccaatgtagattttgttgcctgtggtgaatttcatacatgtgctgttacaacaacgggtgagctttatacatggggagatggaacttacaatgttggccttctcggacatggcaatgatgtaggacactggatacctaagaggatttctggagcactggaaggtcttcaagttgcttatgtttcatgtgggacctggcatacagccttgataacatccatgggccagttatttacctttggggacggttcatttggtgtattaggtcacggagatctgaaaagtgtttcttacccaagggaggtagagtcactatcagggttgaaaacaattgctgtggcatgtggtgtgtggcacactgcagctatagtggaggttattgtcactcggtccagttcaagtgtaaagctatctgctggaaagctgttcacatggggagatggtgacaagcatcgacttggtcatggtgacaaagaaactcgacttaagccgacttgcgtggctacacttattgatcatgatttttatagggtggcatgtgggcacagccttactgtagccttgacaacttctggacaagtattgagcatgggtaatgctgtttatggtcagcttggaaatcctcattcagatggaaggataccatgtttagttgaagacaagattgtgggtgaacaagttctccaaattgcctgtggatcctaccacgtcgcagttttgacaaataggagtgaagtttttacatgggggaagggagctaatggaagattgggccatggagatacagaggatcggaaggtgcctacactggttgaagccttgaaagatagagctgttaggtacatagcctgtggtgcaaacttcactgctgctatttgtcaatataaatgggtttctggagctgaccaatcacagtgctcctcatgtcgacaaccatttgggtttacacgaaagaggcgcaactgctataattgtggacttgtccattgtaattcctgcacctcgcggaaggctttgagagcatcactggctcctagtcctgggaaaccctaccgtgtttgtgattcatgtttcttgaagttgaataatgcctcagatcctaatgcagctaaccggaggaaagatcctgttccctatcaacctgttgaaagcaatggcgatgctaaagtaggaaaggctagtttgcctagcaatatggaaatgattcgaaatttggatatcaaagcagcatggcaagggaagaaaactgatgggctatcgtttctccggaatcctcaagttagttcgctcctgcagctgagtgatattgctttatctggtggcttgggcatgaacagatcagctccgagagcggtacacatatctgcagctcgctcggttactacttcaagagctgtttcccctttctctcgcaagcccagtccaccgcgttctactacaccagttccaacagcccatggtctttctttctcaaaaagtgctactgataatattgtgaaagcaaatgagctcttaaatcaggaagttgaaagactgcgtgcacaggttgataacctgagaaatcgctgtgagcttcaagaacttgagcttcaaaaatcagcaaaaaaagtactagaggccatgacactggttgccgaagaatctgcaaaatccaaagctgcaaaagaagtgaatcaagct

SEQ ID NO: 57573 - DNA, 2096 bp, Zea Mays
acgactgattttagctgtgatgatgcaacaatatgctcatgaaggggccatcttcagatgttctcagagcaagcatttctagcgccccaagtacatctagccatggttctgcacaagatgaatgtgattcattaggggatgtgtatgtatggggtgaggttgtctgcgatacttcagtacgaactggttctgatactgttattagttcaactggcaggattgacattctcctcccgaagccattggagtccaatttagttcttgatgtgtatcatgtagattgtggggttaagcatgctgcattggtcatgaaaaatggtgaggtttttacatggggtgaagattctggaggccgccttggccatggaacacgagaagattgtgttcgtccacgtctggttgagtctttgacagtttccaatgtagattttgttgcctgtggtgaatttcatacatgtgctgttacaacaacgggtgagctttatacatggggagatggaacttacaatgttggccttctcggacatggcaatgatgtaggacactggatacctaagaggatttctggagcactggaaggtcttcaagttgcttatgtttcatgtgggacctggcatacagccttgataacatccatgggccagttatttacctttggggacggttcatttggtgtattaggtcacggagatctgaaaagtgtttcttacccaagggaggtagagtcactatcagggttgaaaacaattgctgtggcatgtggtgtgtggcacactgcagctatagtggaggttattgtcactcggtccagttcaagtgtaaagctatctgctggaaagctgttcacatggggagatggtgacaagcatcgacttggtcatggtgacaaagaaactcgacttaagccgacttgcgtggctacacttattgatcatgatttttatagggtggcatgtgggcacagccttactgtagccttgacaacttctggacaagtattgagcatgggtaatgctgtttatggtcagcttggaaatcctcattcagatggaaggataccatgtttagttgaagacaagattgtgggtgaacaagttctccaaattgcctgtggatcctaccacgtcgcagttttgacaaataggagtgaagtttttacatgggggaagggagctaatggaagattgggccatggagatacagaggatcggaaggtgcctacactggttgaagccttgaaagatagagctgttaggtacatagcctgtggtgcaaacttcactgctgctatttgtcaatataaatgggtttctggagctgaccaatcacagtgctcctcatgtcgacaaccatttgggtttacacgaaagaggcgcaactgctataattgtggacttgtccattgtaattcctgcacctcgcggaaggctttgagagcatcactggctcctagtcctgggaaaccctaccgtgtttgtgattcatgtttcttgaagttgaataatgcctcagatcctaatgcagctaaccggaggaaagatcctgttccctatcaacctgttgaaagcaatggcgatgctaaagtaggaaaggctagtttgcctagcaatatggaaatgattcgaaatttggatatcaaagcagcatggcaagggaagaaaactgatgggctatcgtttctccggaatcctcaagttagttcgctcctgcagctgagtgatattgctttatctggtggcttgggcatgaacagatcagctccgagagcggtacacatatctgcagctcgctcggttactacttcaagagctgtttcccctttctctcgcaagcccagtccaccgcgttctactacaccagttccaacagcccatggtctttctttctcaaaaagtgctactgataatattgtgaaagcaaatgagctcttaaatcaggaagttgaaagactgcgtgcacaggttgataacctgagaaatcgctgtgagcttcaagaacttgagcttcaaaaatcagcaaaaaaagtactagaggccatgacactggttgccgaagaatctgcaaaatccaaagctgcaaaagaagtgaatcaagct

SEQ ID NO: 57574 - DNA, 2958 bp, Zea Mays
ctcaccccagcaacaacccagtcgccattttctccgtacgcgtggccctaggggtcctcacatggacgttgcggtcaccacgccgtttagactggggagtggggtaggggctaccctagacctagggtataaactcgaccgccgccatatatgtgcagctcatgccccacggtccctcctccccgcagacccagtgttcccccgccttttgattcccacggccaaacgctcctcggccacctctgtggcgtgatccgtcgtcgctgcgcaaagccatcgccgccagggtcgctctgccacgtcgccgaccggggctgatccggggccagtgcggggttccgggcgttcgcgtgggtgtaacacgagagttcatgtgacagttgggtccagtactggcaccgggcgtcgacgatttctcaccggagcactcaactccgtcgtaaatccgcctggtccgcggacagctttgcgcccaccgttttctctggtaaaattcctcaccctaactctgccttgatctcctctacgtgttgcacacgctgggttgttgtttggagcactacggcgtgaggggtggcttgccggcaatggcgccgccgcccctggttactggcgccaccgtggcacggctggtgttggggggaaacaccctggtcgtccgatcctcattgaacgggatagattagatcgacgataacctttcggctctttaaatctagtccgtagaaatgtgatcggagggctacggttgttttaaattcggtccgttgatggtagatccaagcgcctagaatgcatcatggttcgtcatagccggcttttaatctgggccgtccggtttctatcctgcagccagggatccaccatacccgttcgccgtaggcattttacacaagagtccctgagaaatataagaatcaaccccgcagtccttgcgctaggagctctgtgtcttaggaaaatttatgtagaggcccctatgttttctgtaaatggtgaactcagtccagagaacaaaaaatcaaaagaattcatttagaaaatacatttttgtgtgaaaataattataggaacttaattaattcctagaaaatacattttaactccttttcagtccattccaatttctataattttgtaataatgttgtttatcacctattgcctctgttttgacatgaaaacaataataaaattgatctcctaattaatctcatatcaaatacataaaatcattagaaattcataacttaaaatctatgactccgattggacccgttcaagttgagttagtctcgtataaatatttactatgcaataacaatatttattataccatgtctcattattttgtaattagatttctatttaacttatgttggttagtcttgttaatgtgcttatcattataatctactagaatatgatctaaggtcaaattataattttgattaaagttgagataattatttatagaataacctcttatatgatttatattaaccaatttataatatagttcaatattttaatcacataaatcctctatgaaatcatactttttaatcgtaactccaattttagtggttctcattcctacgatctcgtagcgacgcgtagatcattattattcagtttgtacttatgtttggtgtgatgttaattttttctataccatgtttgtttgtattgctacgactggcatgatgtcacgaggatctgaagaatcattctggtacctggaatctcaagtcccaggcaagttgtgcccttgaccacttttgttacccaataatattctttattatcactattcatgcataggttaattttaatggggcccaataggccaccctagattgtttatcttttaccttgtttacccctgaatcattgggtagttatgctattgctttacacggtttttgggttaatattttgttatatccatgttcctattattctgttatgttatttatgttcatgataagatcattatgttaatgggaagatggagaaccacccgggaaaacagtgctaccacaagggtagtatgggatgcccttggctgattaactaggaaagctagtggatgacttccttacccgaaaggggcaagggcagtaggggagtggtcagtgtagggaggtccttgggttgattttgctgcaatggcggttaggcgagggatccctgcattgtagcttcctataaactgtagcgggttttctgaaactagtggaactttgtaaaggcctcgtagtgttaccctacctcgcctcctcggtagaggtgtatgggattggctgtcccttggcagatgagtaacatgacttgtgggtaaagatgcgcaacctctgcagagtgtaaaactggtatactagccgtgctcacggtcatgagcagctcggacactcacatgattaatttatgtacataaattcaatttgtcatttgcatttgcatgagattatttattaattttgttctattatttattatggtttggtattcacttacacttagtaactgctaataaaactttgaccaacttataaaagtaatgcccaacttcaacctttattttgttgatcagccttacacttcacatgaactcccacctttggtgagttcatacacattattccccacaacttgttaaacgatgaacatgtgtgagctcacccttattgtctcacacccctcacaggagaagaacatgtggttcaaaaggagccgcttaatgaggagttccattcgatctaggtggcgtctcccagttgactttctagcgccaaggatggattttagttcgatctatatttatattttgtaagacttccgctatgtaataagtactctaattatattgcgacatttatctctatacactctgttattatatatgttgtcttctttggcgcatgtatgagatgcacccagctttgtcccttaaaac

SEQ ID NO: 57575 - DNA, 289 bp, Zea Mays
gcagaagctctgcaccgctctagccgccaggtaccgatatcgccgtctgtgagggagagccgagtgacatcgccgccatgggctgttccccgttcaaccagtcgacgtgcaccgcccaaccctgtcattgtgcatgggagtgagagagctctgttgttgccgagagctggcggctactccaaccgcgtgccgtcgggatcgggcttccggggagagaaatcgaggagagagggattaggggaaagctctggtcttcatcatccgctaacgtgcgcgaggacacgtgtca

SEQ ID NO: 57576 - DNA, 1671 bp, Zea Mays
tagccagagcggccctattaacttggccaactcgactccgctgacccgtgacgcggtggccgtggcgagtggaggaagaaaagctgccccactttgcttcgcttctccgctccctgccttctttctttcttccgcgattgtgctgtgtccaactcaaacaacaacagcaacaacaaagaaacctccccttcatcgtatccaaactccaccaccaccatcatcgaatcgaaaccgccatgaccaccagcatcgagtacgactatctcttcaagctgctcctcatcggcgactcctccgtcggcaagtcctgcctcctcctccgtttcgccgacgattcgtacgttgacacctacatcagtaccatcggcgttgatttcaaaatccgcaccatcgacctcgatggaaagactgtcaagctacagatttgggacacagcaggccaggaaaggttcaggacaattacgagcagctactaccgaggagctcatggaatcattatcgtgtatgacgtgacagacatggagagcttcaataacatcaagcagtggctgagtgagattgataggattttgcagattcattaggaattccctttattgagacaagcgcaaaggaatccatcaacgtggaggaagctttcctgaccatgtcatcagaaatcaagaaaaggatggcaacccaaccaacggtggagaggagacccacagtccatgttcacatgaaaggacagccaatacagcagaagagcagctgctgctcatcatagtcagggctcatagggcacttaaatttggctagtggttagatggacgccgcaggatgttgttcacttaagattatactagtaacatgcccgtgcgttacgacgggagtaaaaaatagatacagatcgacagacatcactatgatatacaaaatgcagacaagtacatagcctctgttcataatcgtttgtgatggacgtcaaataccaaaatcgactatagaaaatattggatccttttccctttcacaaactatgtcttaacaaagtttcaagtcacatgcactgtatgagaaaaaataagttaccacagaaaaagatggtacaagcattatgccattgtagaccttatactcggacaagaacatcacaagagaagcagaacaaagctacacggccaagatccagaagtagacaatcctcgtcgggcttccaccggaaagttgatcactataccaaacttttaattctctgtatcatcattatcctcttccacttgatcgacaacacgagcatccaacgttacgctcgctgcctagaccagcagctttgcaccttcttgaatcaagccctgcaggctgcaactcccttttgctcaaacctgcccatgaaatcatcagagcgctcgcatggcagataattccattaggtgatttcattataatattctcaaagcacattctattccttgatttctagatggcccaacatatggccgaaacggccacgatatgaacatgtttggtttgtggcacaagcttctgcaaccacaaccagtactggttcacatcagaaatgtatggtccggttgcattttggatactatagacttgaatgcttaatggcctatagctgagaaaatgtttaaactggtacaattctgaattcaaataacatatgtgctttta

SEQ ID NO: 57577 - DNA, 1139 bp, Zea Mays
tagccagagcggccctattaacttggccaactcgactccgctgacccgtgacgcggtggccgtggcgagtggaggaagaaaagctgccccactttgcttcgcttctccgctccctgccttctttctttcttccgcgattgtgctgtgtccaactcaaacaacaacagcaacaacaaagaaacctccccttcatcgtatccaaactccaccaccaccatcatcgaatcgaaaccgccatgaccaccagcatcgagtacgactatctcttcaagctgctcctcatcggcgactcctccgtcggcaagtcctgcctcctcctccgtttcgccgacgattcgtacgttgacacctacatcagtaccatcggcgttgatttcaaaatccgcaccatcgacctcgatggaaagactgtcaagctacagatttgggacacagcaggccaggaaaggttcaggacaattacgagcagctactaccgaggagctcatggaatcattatcgtgtatgacgtgacagacatggagagcttcaataacatcaagcagtggctgagtgagattgataggattttgcagattcattaggaattccctttattgagacaagcgcaaaggaatccatcaacgtggaggaagctttcctgaccatgtcatcagaaatcaagaaaaggatggcaacccaaccaacggtggagaggagacccacagtccatgttcacatgaaaggacagccaatacagcagaagagcagctgctgctcatcatagtcagggctcatagggcacttaaatttggctagtggttagatggacgccgcaggatgttgttcacttaagattatattggaggcggcactgaatggaatggatgatactattactatatgcgtgtcatttcagcgttagatattcgtctttatacataatacttttagtataaaattctcagtctgtattattattgttcgtcttaaaaatttgcagctatttgcatgatttacggtgtgagttctgacttatacagatcagcattaattgccataaactagcaaatcgtaccatcagtgatcagttatctttaaactagcagttaattgaatgataactgttgtaaattgctggtaattgattgttgaacatg

SEQ ID NO: 57578 - DNA, 1580 bp, Zea Mays
ctcgactccgctgacccgtgacgcggtggccgtggcgagtggaggaagaaaagctgccccactttgcttcgcttctccgctccctgccttctttctttcttccgcgattgtgctgtgtccaactcaaacaacaacagcaacaacaaagaaacctccccttcatcgtatccaaactccaccaccaccatcatcgaatcgaaaccgccatgaccaccagcatcgagtacgactatctcttcaagctgctcctcatcggcgactcctccgtcggcaagtcctgcctcctcctccgtttcgccgacgattcgtacgttgacacctacatcagtaccatcggcgttgatttcaaaatccgcaccatcgacctcgatggaaagactgtcaagctacagatttgggacacagcaggccaggaaaggttcaggacaattacgagcagctactaccgaggagctcatggaatcattatcgtgtatgacgtgacagacatggagagcttcaataacatcaagcagtggctgagtgagattgataggtatgccagtgacaacgtatgcaagctcctagttgggaacaagtgtgatttggttgacagtaaggttgttgacactgaaaaggcaaaggtatccttttgcttatgcttctctttaaaacactagccataattgtgatgctgggacagctaaccaagacaacttttgcaagtcgcaaacaagaatgaacatgatgaagggaagaatgtaatttctgtttgttatgaaagtatagtgatttgtttttattcaaaggcgtgtacgcttactgagggtgtgtatgggtgggtggatgtggtgtgagtgtgttgtattcatgcattcttcttgatgccatggtacataacatagccctcttccatatttgagaaacaaatgaaagtaatcaccgcgattctgttttattcttgatagataattagttgtacatgtttatatgttcctcctaaacttaacaatcaaatcaattgcaggattttgcagattcattaggaattccctttattgagacaagcgcaaaggaatccatcaacgtggaggaagctttcctgaccatgtcatcagaaatcaagaaaaggatggcaacccaaccaacggtggagaggagacccacagtccatgttcacatgaaaggacagccaatacagcagaagagcagctgctgctcatcatagtcagggctcatagggcacttaaatttggctagtggttagatggacgccgcaggatgttgttcacttaagattatattggaggcggcactgaatggaatggatgatactattactatatgcgtgtcatttcagcgttagatattcgtctttatacataatacttttagtataaaattctcagtctgtattattattgttcgtcttaaaaatttgcagctatttgcatgatttacggtgtgagttctgacttatacagatcagcattaattgccataaactagcaaatcgtaccatcagtgatcagttatctttaaactagcagttaattgaatgataactgttgtaaattgctggtaattgattgttgaacatg

SEQ ID NO: 57579 - DNA, 1686 bp, Zea Mays
gacgcggtggccgtggcgagtggaggaagaaaagctgccccactttgcttcgcttctccgctccctgccttctttctttcttccgcgattgtgctgtgtccaactcaaacaacaacagcaacaacaaagaaacctccccttcatcgtatccaaactccaccaccaccatcatcgaatcgaaaccgccatgaccaccagcatcgagtacgactatctcttcaagctgctcctcatcggcgactcctccgtcggcaagtcctgcctcctcctccgtttcgccgacgattcgtacgttgacacctacatcagtaccatcggcgttgatttcaaaatccgcaccatcgacctcgatggaaagactgtcaagctacagatttgggacacagcaggccaggaaaggttcaggacaattacgagcagctactaccgaggagctcatggaatcattatcgtgtatgacgtgacagacatggagagcttcaataacatcaagcagtggctgagtgagattgataggtatgccagtgacaacgtatgcaagctcctagttgggaacaagtgtgatttggttgacagtaaggattttgcagattcattaggaattccctttattgagacaagcgcaaaggaatccatcaacgtggaggaagctttcctgaccatgtcatcagaaatcaagaaaaggatggcaacccaaccaacggtggagaggagacccacagtccatgttcacatgaaaggacagccaatacagcagaagagcagctgctgctcatcatagtcagggctcatagggcacttaaatttggctagtggttagatggacgccgcaggatgttgttcacttaagattatactagtaacatgcccgtgcgttacgacgggagtaaaaaatagatacagatcgacagacatcactatgatatacaaaatgcagacaagtacatagcctctgttcataatcgtttgtgatggacgtcaaataccaaaatcgactatagaaaatattggatccttttccctttcacaaactatgtcttaacaaagtttcaagtcacatgcactgtatgagaaaaaataagttaccacagaaaaagatggtacaagcattatgccattgtagaccttatactcggacaagaacatcacaagagaagcagaacaaagctacacggccaagatccagaagtagacaatcctcgtcgggcttccaccggaaagttgatcactataccaaacttttaattctctgtatcatcattatcctcttccacttgatcgacaacacgagcatccaacgttacgctcgctgcctagaccagcagctttgcaccttcttgaatcaagccctgcaggctgcaactcccttttgctcaaacctgcccatgaaatcatcagagcgctcgcatggcagataattccattaggtgatttcattataatattctcaaagcacattctattccttgatttctagatggcccaacatatggccgaaacggccacgatatgaacatgtttggtttgtggcacaagcttctgcaaccacaaccagtactggttcacatcagaaatgtatggtccggttgcattttggatactatagacttgaatgcttaatggcctatagctgagaaaatgtttaaactggtacaattctgaattcaaataacatatgtgctttta

SEQ ID NO: 57580 - DNA, 1168 bp, Zea Mays
gacgcggtggccgtggcgagtggaggaagaaaagctgccccactttgcttcgcttctccgctccctgccttctttctttcttccgcgattgtgctgtgtccaactcaaacaacaacagcaacaacaaagaaacctccccttcatcgtatccaaactccaccaccaccatcatcgaatcgaaaccgccatgaccaccagcatcgagtacgactatctcttcaagctgctcctcatcggcgactcctccgtcggcaagtcctgcctcctcctccgtttcgccgacgattcgtacgttgacacctacatcagtaccatcggcgttgatttcaaaatccgcaccatcgacctcgatggaaagactgtcaagctacagatttgggacacagcaggccaggaaaggttcaggacaattacgagcagctactaccgaggagctcatggaatcattatcgtgtatgacgtgacagacatggagagcttcaataacatcaagcagtggctgagtgagattgataggtatgccagtgacaacgtatgcaagctcctagttgggaacaagtgtgatttggttgacagtaaggttgttgacactgaaaaggcaaagattcattaggaattccctttattgagacaagcgcaaaggaatccatcaacgtggaggaagctttcctgaccatgtcatcagaaatcaagaaaaggatggcaacccaaccaacggtggagaggagacccacagtccatgttcacatgaaaggacagccaatacagcagaagagcagctgctgctcatcatagtcagggctcatagggcacttaaatttggctagtggttagatggacgccgcaggatgttgttcacttaagattatattggaggcggcactgaatggaatggatgatactattactatatgcgtgtcatttcagcgttagatattcgtctttatacataatacttttagtataaaattctcagtctgtattattattgttcgtcttaaaaatttgcagctatttgcatgatttacggtgtgagttctgacttatacagatcagcattaattgccataaactagcaaatcgtaccatcagtgatcagttatctttaaactagcagttaattgaatgataactgttgtaaattgctggtaattgattgttgaacatg

SEQ ID NO: 57581 - DNA, 3856 bp, Zea Mays
cccagtggcgtggcgtcatccttttcacttggggactgccctcttgcttctccctttccttcacttcacctcgaaatccaaggaaagccaaccaacaaacacagtgagtggagcacgagcgcgctgagtggagcaagagagttggagcttggagcccctccagtgctaacatccggctgccatggtgaggaagaaaaggactggccctggagagagttctggggagacttctggagcgcctggtcagggctcctcacagcgtcctcaggcaacacaacagggtgcccgaggtggaggacaacaccaggtgcgtggtggatatccgggccatggagtgccgccttcagagcacccaggtggtgggccgcctgagtatcaaccacgtggctatcagggacgtggcgttccacctttacttcctggtggtgggccgcctgagcctcaaccgcgtggctaccagggacatggtggataccagggccgtggcgggccaccttcacagcatcctggtggtgggccatcacctgggtctcagcctcgtggctaccagggacgtggtggtctgcgtcccagagggggagtgccgcagccataccgtggcgggcatgtgggaggtagtgttggaccaattgttccttcaggtccgtctagaccagttcccgagctgcaccaagccccagatgtccaacatcaagcccctgtggtggcagcaccatcaccaccgggagctggctcgtcctcgcagcctgggatggccgaggtgagcactggacaagtccagcaacttgtgattcatgaccaaagttcagccagccaagttagtcaggtagcaccagcatcaagcaaagctgttagattcccattgcgccctggcaagggtacgcatgggtccaggtgcatcgtgaaggcaaatcatttctttgctgagctgcctgataaagacctccaccaatacgatgtatcaataacacctgtggttccttcacgtggtgtcaatcgtgctgtcatgaaagagcttgtaaaccttcatagacactcccatttggatgggcgtctgcctgcatatgatggaaggaagagtctttatacagctggagcattgccatttacttcgaagacattcgaaattactctgcaagatgaagaaaacagtcttggtggaggacaaagacaccaaaggggccagagggtctttcaggtggtgatcaaatttgctgctcgcgctgatctccaccatttggctatgtttctagctgggaggcaaccagatgctcctcaagaggctattcaagtacttgacattgtactacgtgaatttcctactgccaggtattgtcctgttggtagatcattttattctcccaatttagggagacgccagcaacttggtgaaggtttggaaacttggcgtggtttctatcaaagcataaggcccacacagatgggtctttctctgaatattgatatgtcctctactgcatttattgagcccctccctgtgattgattttgttgctcagcttcttgacagagatatctcagttagaccattgtctgattctgatcgtgtgaagattaaaaaagccctacgaggtgtgaaagtcgaggtcacacaccgtggaaacatgcgtaggaagtatcggatatctggcctcacttcacaagcaacaagggagttatcattccctattgatgatcgtggtactgttaagactgtggtgcaatacttcctggagacttatggctttaatattcagcacaccactttaccttgtttgcaagtgggcaatcagcaaagaataaattatctgcctatggaggtctgtaagatagttgagggacagcgttactcaaaacgactcaatgagaaacagatcactgctctactgaaggtgacttgccagcgtccccaagagcgtgagaaagccatcttgcagactgtgcatcacaatgcctactccgaggatccttatgcccaggaatttggtataaagattgatgagcgtcttgcatccgttgaagctcgtgttctgcctcctccaaggctgaaataccatgatagtggcagagagagggatgtattgccaagagttgggcagtggaatatgatgaataagaaaatggtcaatggtggtagagttagcagctgggcatgcattaacttctcacgaaatgtgcaagatggtgctgctaggagtttctgtcatgatctcgctttgatgtgccaagtatcaggaatggattttgcacttgaacctgtgctgccccctgtctatgcgaggcctgaacatgttgaaagagcactaaagagactttatcaagatgccatgagcatactcaggcctcagggccgagagcttgacttgctgatggtaatactgcctgacaataatggctctctttacggggatcttaaaaggatatgtgagactgatcttggattggtctcccaatgctgtctgactaaacatgttttcaaggcgaacaagcatcagtatcttgcaaatgttgccctgaaaataaatgttaaggttgggggaaggaatactgtacttgttgatgctttggcaaggagaatcccccttgtcagtgacgtagctactattatctttggtgctgatgtgacccatccccatcctggggaagattctagtccttccattgcagctgtggttgcttctcaagactggcctgaggttacgaagtatgcaggattagtgagtgctcaaacccatcgccaagaattgatacaggatcttttcaacgtacggcaagatccccaaaggggggctgtctctggtggcatgattagggaacttctcatttctttctggagggcgactggacaaaaacccaagaggatcatattctacagggatggtgtcagtgagggacagttctaccaagttctgttgtacgaacttgatgccattagaaaggcctgtgcatcattggagtctgattaccagcctccagttacctttgtcgtggtccagaagcgtcatcacaccaggttgtttgttaataatcacaatgatcagcgtgctgccgatagaagtggcaacatactgccgggcactgtggtggactcgaagatttgccatccaaccgagtttgatttctacctgtgcagccatgctggcattcagggaacaagccgtcctgcccattatcatgttctgtgggatgagaacaaatttacggctgatgggttgcaaactctcaccaacaacttgtgttacacgtatgccaggtgcacacgctcagtatcaatcgttcctcctgcatactatgctcatctggcagccttccgagctcggttttacatggagccagatacaagtgacagcggatctgtggcgagcggtgctacgacaagccgtggccctccaccaggggcgcgcaacaccagggctggtgctgcgaatgttgctgtgaggccattacctgctctcaaggaaaacgtgaagcgcgtcatgttctactgctaagattgacgctgcgctgatgctgtgagcaagcaattatcgttatggtggtgatgctaggacaccgttatgcaccggtaactttaataccttttgtactgtaactacttgtatggcattggaaactgtttgcgatatactcctattaagatgggcttgtcgtggattagattgcactattggaagccatcaatccagttctcatctgaaaattatgtaggtacgtacggtattacaacctctctctatctccctcccaatacagtacagaaaggacgcaattcttgatttcagatagacagtatctgttaggcaggtacttgttgcttgactgttcttcatatagatcgttggtaaagtatcggttac

SEQ ID NO: 57582 - DNA, 3782 bp, Zea Mays
aggaaagccaaccaacaaacacagtgagtggagcacgagcgcgctgagtggagcaagagagttggagcttggagcccctccagtgctaagctagggttccatccccaccagcgccgcccgctccctttctccgtccgcatccggctgccatggtgaggaagaaaaggactggccctggagagagttctggggagacttctggagcgcctggtcagggctcctcacagcgtcctcaggcaacacaacagggtgcccgaggtggaggacaacaccaggtgcgtggtggatatccgggccatggagtgccgccttcagagcacccaggtggtgggccgcctgagtatcaaccacgtggctatcagggacgtggcgttccacctttacttcctggtggtgggccgcctgagcctcaaccgcgtggctaccagggacatggtggataccagggccgtggcgggccaccttcacagcatcctggtggtgggccatcacctgggtctcagcctcgtggctaccagggacgtggtggtctgcgtcccagagggggagtgccgcagccataccgtggcgggcatgtgggaggtagtgttggaccaattgttccttcaggtccgtctagaccagttcccgagctgcaccaagccccagatgtccaacatcaagcccctgtggtggcagcaccatcaccaccgggagctggctcgtcctcgcagcctgggatggccgaggtgagcactggacaagtccagcaacttgtgattcatgaccaaagttcagccagccaagttagtcaggtagcaccagcatcaagcaaagctgttagattcccattgcgccctggcaagggtacgcatgggtccaggtgcatcgtgaaggcaaatcatttctttgctgagctgcctgataaagacctccaccaatacgatgtatcaataacacctgtggttccttcacgtggtgtcaatcgtgctgtcatgaaagagcttgtaaaccttcatagacactcccatttggatgggcgtctgcctgcatatgatggaaggaagagtctttatacagctggagcattgccatttacttcgaagacattcgaaattactctgcaagatgaagaaaacagtcttggtggaggacaaagacaccaaaggggccagagggtctttcaggtggtgatcaaatttgctgctcgcgctgatctccaccatttggctatgtttctagctgggaggcaaccagatgctcctcaagaggctattcaagtacttgacattgtactacgtgaatttcctactgccaggtattgtcctgttggtagatcattttattctcccaatttagggagacgccagcaacttggtgaaggtttggaaacttggcgtggtttctatcaaagcataaggcccacacagatgggtctttctctgaatattgatatgtcctctactgcatttattgagcccctccctgtgattgattttgttgctcagcttcttgacagagatatctcagttagaccattgtctgattctgatcgtgtgaagattaaaaaagccctacgaggtgtgaaagtcgaggtcacacaccgtggaaacatgcgtaggaagtatcggatatctggcctcacttcacaagcaacaagggagttatcattccctattgatgatcgtggtactgttaagactgtggtgcaatacttcctggagacttatggctttaatattcagcacaccactttaccttgtttgcaagtgggcaatcagcaaagaataaattatctgcctatggaggtctgtaagatagttgagggacagcgttactcaaaacgactcaatgagaaacagatcactgctctactgaaggtgacttgccagcgtccccaagagcgtgagaaagccatcttgcaggaatttggtataaagattgatgagcgtcttgcatccgttgaagctcgtgttctgcctcctccaaggctgaaataccatgatagtggcagagagagggatgtattgccaagagttgggcagtggaatatgatgaataagaaaatggtcaatggtggtagagttagcagctgggcatgcattaacttctcacgaaatgtgcaagatggtgctgctaggagtttctgtcatgatctcgctttgatgtgccaagtatcaggaatggattttgcacttgaacctgtgctgccccctgtctatgcgaggcctgaacatgttgaaagagcactaaagagactttatcaagatgccatgagcatactcaggcctcagggccgagagcttgacttgctgatggtaatactgcctgacaataatggctctctttacggggatcttaaaaggatatgtgagactgatcttggattggtctcccaatgctgtctgactaaacatgttttcaaggcgaacaagcatcagtatcttgcaaatgttgccctgaaaataaatgttaaggttgggggaaggaatactgtacttgttgatgctttggcaaggagaatcccccttgtcagtgacgtagctactattatctttggtgctgatgtgacccatccccatcctggggaagattctagtccttccattgcagctgtggttgcttctcaagactggcctgaggttacgaagtatgcaggattagtgagtgctcaaacccatcgccaagaattgatacaggatcttttcaacgtacggcaagatccccaaaggggggctgtctctggtggcatgattagggaacttctcatttctttctggagggcgactggacaaaaacccaagaggatcatattctacagggatggtgtcagtgagggacagttctaccaagttctgttgtacgaacttgatgccattagaaaggcctgtgcatcattggagtctgattaccagcctccagttacctttgtcgtggtccagaagcgtcatcacaccaggttgtttgttaataatcacaatgatcagcgtgctgccgatagaagtggcaacatactgccgggcactgtggtggactcgaagatttgccatccaaccgagtttgatttctacctgtgcagccatgctggcattcagggaacaagccgtcctgcccattatcatgttctgtgggatgagaacaaatttacggctgatgggttgcaaactctcaccaacaacttgtgttacacgtatgccaggtgcacacgctcagtatcaatcgttcctcctgcatactatgctcatctggcagccttccgagctcggttttacatggagccagatacaagtgacagcggatctgtggcgagcggtgctacgacaagccgtggccctccaccaggggcgcgcaacaccagggctggtgctgcgaatgttgctgtgaggccattacctgctctcaaggaaaacgtgaagcgcgtcatgttctactgctaagattgacgctgcgctgatgctgtgagcaagcaattatcgttatggtggtgatgctaggacaccgttatgcaccggtaactttaataccttttgtactgtaactacttgtatggcattggaaactgtttgcgatatactcctattaagatgggcttgtcgtggattagattgcactattggaagccatcaatccagttctcatctgaaaattatgtaggtacgtacggtattacaacctctctctatctccctcccaatacagtacagaaaggacgcaattcttgatttcagatagacagtatctgttaggcaggtacttgttgcttgactgttcttcatatagatcgttggtaaagtatcggttac

SEQ ID NO: 57583 - DNA, 3790 bp, Zea Mays
aggaaagccaaccaacaaacacagtgagtggagcacgagcgcgctgagtggagcaagagagttggagcttggagcccctccagtgctaagctagggttccatccccaccagcgccgcccgctccctttctccgtccgcatccggctgccatggtgaggaagaaaaggactggccctggagagagttctggggagacttctggagcgcctggtcagggctcctcacagcgtcctcaggcaacacaacagggtgcccgaggtggaggacaacaccaggtgcgtggtggatatccgggccatggagtgccgccttcagagcacccaggtggtgggccgcctgagtatcaaccacgtggctatcagggacgtggcgttccacctttacttcctggtggtgggccgcctgagcctcaaccgcgtggctaccagggacatggtggataccagggccgtggcgggccaccttcacagcatcctggtggtgggccatcacctgggtctcagcctcgtggctaccagggacgtggtggtctgcgtcccagagggggagtgccgcagccataccgtggcgggcatgtgggaggtagtgttggaccaattgttccttcaggtccgtctagaccagttcccgagctgcaccaagccccagatgtccaacatcaagcccctgtggtggcagcaccatcaccaccgggagctggctcgtcctcgcagcctgggatggccgaggtgagcactggacaagtccagcaacttgtgattcatgaccaaagttcagccagccaagttagtcaggtagcaccagcatcaagcaaagctgttagattcccattgcgccctggcaagggtacgcatgggtccaggtgcatcgtgaaggcaaatcatttctttgctgagctgcctgataaagacctccaccaatacgatgtatcaataacacctgtggttccttcacgtggtgtcaatcgtgctgtcatgaaagagcttgtaaaccttcatagacactcccatttggatgggcgtctgcctgcatatgatggaaggaagagtctttatacagctggagcattgccatttacttcgaagacattcgaaattactctgcaagatgaagaaaacagtcttggtggaggacaaagacaccaaaggggccagagggtctttcaggtggtgatcaaatttgctgctcgcgctgatctccaccatttggctatgtttctagctgggaggcaaccagatgctcctcaagaggctattcaagtacttgacattgtactacgtgaatttcctactgccaggtattgtcctgttggtagatcattttattctcccaatttagggagacgccagcaacttggtgaaggtttggaaacttggcgtggtttctatcaaagcataaggcccacacagatgggtctttctctgaatattgatatgtcctctactgcatttattgagcccctccctgtgattgattttgttgctcagcttcttgacagagatatctcagttagaccattgtctgattctgatcgtgtgaagattaaaaaagccctacgaggtgtgaaagtcgaggtcacacaccgtggaaacatgcgtaggaagtatcggatatctggcctcacttcacaagcaacaagggagttatcattccctattgatgatcgtggtactgttaagactgtggtgcaatacttcctggagacttatggctttaatattcagcacaccactttaccttgtttgcaagtgggcaatcagcaaagaataaattatctgcctatggaggtctgtaagatagttgagggacagcgttactcaaaacgactcaatgagaaacagatcactgctctactgaaggtgacttgccagcgtccccaagagcgtgagaaagccatcttgcagactgtgcatcacaatgcctactccgaggatccttatgcccaggaatttggtataaagattgatgagcgtcttgcatccgttgaagctcgtgttctgcctcctccaaggctgaaataccatgatagtggcagagagagggatgtattgccaagagttgggcagtggaatatgatgaataagaaaatggtcaatggtggtagagttagcagctgggcatgcattaacttctcacgaaatgtgcaagatggtgctgctaggagtttctgtcatgatctcgctttgatgtgccaagtatcaggaatggattttgcacttgaacctgtgctgccccctgtctatgcgaggcctgaacatgttgaaagagcactaaagagactttatcaagatgccatgagcatactcaggcctcagggccgagagcttgacttgctgatggggatcttaaaaggatatgtgagactgatcttggattggtctcccaatgctgtctgactaaacatgttttcaaggcgaacaagcatcagtatcttgcaaatgttgccctgaaaataaatgttaaggttgggggaaggaatactgtacttgttgatgctttggcaaggagaatcccccttgtcagtgacgtagctactattatctttggtgctgatgtgacccatccccatcctggggaagattctagtccttccattgcagctgtggttgcttctcaagactggcctgaggttacgaagtatgcaggattagtgagtgctcaaacccatcgccaagaattgatacaggatcttttcaacgtacggcaagatccccaaaggggggctgtctctggtggcatgattagggaacttctcatttctttctggagggcgactggacaaaaacccaagaggatcatattctacagggatggtgtcagtgagggacagttctaccaagttctgttgtacgaacttgatgccattagaaaggcctgtgcatcattggagtctgattaccagcctccagttacctttgtcgtggtccagaagcgtcatcacaccaggttgtttgttaataatcacaatgatcagcgtgctgccgatagaagtggcaacatactgccgggcactgtggtggactcgaagatttgccatccaaccgagtttgatttctacctgtgcagccatgctggcattcagggaacaagccgtcctgcccattatcatgttctgtgggatgagaacaaatttacggctgatgggttgcaaactctcaccaacaacttgtgttacacgtatgccaggtgcacacgctcagtatcaatcgttcctcctgcatactatgctcatctggcagccttccgagctcggttttacatggagccagatacaagtgacagcggatctgtggcgagcggtgctacgacaagccgtggccctccaccaggggcgcgcaacaccagggctggtgctgcgaatgttgctgtgaggccattacctgctctcaaggaaaacgtgaagcgcgtcatgttctactgctaagattgacgctgcgctgatgctgtgagcaagcaattatcgttatggtggtgatgctaggacaccgttatgcaccggtaactttaataccttttgtactgtaactacttgtatggcattggaaactgtttgcgatatactcctattaagatgggcttgtcgtggattagattgcactattggaagccatcaatccagttctcatctgaaaattatgtaggtacgtacggtattacaacctctctctatctccctcccaatacagtacagaaaggacgcaattcttgatttcagatagacagtatctgttaggcaggtacttgttgcttgactgttcttcatatagatcgttggtaaagtatcggttac

SEQ ID NO: 57584 - DNA, 3717 bp, Zea Mays
catcgccctcccttctccgctgttccgtcccatccggctgccatggtgaggaagaaaaggactggccctggagagagttctggggagacttctggagcgcctggtcagggctcctcacagcgtcctcaggcaacacaacagggtgcccgaggtggaggacaacaccaggtgcgtggtggatatccgggccatggagtgccgccttcagagcacccaggtggtgggccgcctgagtatcaaccacgtggctatcagggacgtggcgttccacctttacttcctggtggtgggccgcctgagcctcaaccgcgtggctaccagggacatggtggataccagggccgtggcgggccaccttcacagcatcctggtggtgggccatcacctgggtctcagcctcgtggctaccagggacgtggtggtctgcgtcccagagggggagtgccgcagccataccgtggcgggcatgtgggaggtagtgttggaccaattgttccttcaggtccgtctagaccagttcccgagctgcaccaagccccagatgtccaacatcaagcccctgtggtggcagcaccatcaccaccgggagctggctcgtcctcgcagcctgggatggccgaggtgagcactggacaagtccagcaacttgtgattcatgaccaaagttcagccagccaagttagtcaggtagcaccagcatcaagcaaagctgttagattcccattgcgccctggcaagggtacgcatgggtccaggtgcatcgtgaaggcaaatcatttctttgctgagctgcctgataaagacctccaccaatacgatgtatcaataacacctgtggttccttcacgtggtgtcaatcgtgctgtcatgaaagagcttgtaaaccttcatagacactcccatttggatgggcgtctgcctgcatatgatggaaggaagagtctttatacagctggagcattgccatttacttcgaagacattcgaaattactctgcaagatgaagaaaacagtcttggtggaggacaaagacaccaaaggggccagagggtctttcaggtggtgatcaaatttgctgctcgcgctgatctccaccatttggctatgtttctagctgggaggcaaccagatgctcctcaagaggctattcaagtacttgacattgtactacgtgaatttcctactgccaggtattgtcctgttggtagatcattttattctcccaatttagggagacgccagcaacttggtgaaggtttggaaacttggcgtggtttctatcaaagcataaggcccacacagatgggtctttctctgaatattgatatgtcctctactgcatttattgagcccctccctgtgattgattttgttgctcagcttcttgacagagatatctcagttagaccattgtctgattctgatcgtgtgaagattaaaaaagccctacgaggtgtgaaagtcgaggtcacacaccgtggaaacatgcgtaggaagtatcggatatctggcctcacttcacaagcaacaagggagttatcattccctattgatgatcgtggtactgttaagactgtggtgcaatacttcctggagacttatggctttaatattcagcacaccactttaccttgtttgcaagtgggcaatcagcaaagaataaattatctgcctatggaggtctgtaagatagttgagggacagcgttactcaaaacgactcaatgagaaacagatcactgctctactgaaggtgacttgccagcgtccccaagagcgtgagaaagccatcttgcagactgtgcatcacaatgcctactccgaggatccttatgcccaggaatttggtataaagattgatgagcgtcttgcatccgttgaagctcgtgttctgcctcctccaaggctgaaataccatgatagtggcagagagagggatgtattgccaagagttgggcagtggaatatgatgaataagaaaatggtcaatggtggtagagttagcagctgggcatgcattaacttctcacgaaatgtgcaagatggtgctgctaggagtttctgtcatgatctcgctttgatgtgccaagtatcaggaatggattttgcacttgaacctgtgctgccccctgtctatgcgaggcctgaacatgttgaaagagcactaaagagactttatcaagatgccatgagcatactcaggcctcagggccgagagcttgacttgctgatggtaatactgcctgacaataatggctctctttacggggatcttaaaaggatatgtgagactgatcttggattggtctcccaatgctgtctgactaaacatgttttcaaggcgaacaagcatcagtatcttgcaaatgttgccctgaaaataaatgttaaggttgggggaaggaatactgtacttgttgatgctttggcaaggagaatcccccttgtcagtgacgtagctactattatctttggtgctgatgtgacccatccccatcctggggaagattctagtccttccattgcagctgtggttgcttctcaagactggcctgaggttacgaagtatgcaggattagtgagtgctcaaacccatcgccaagaattgatacaggatcttttcaacgtacggcaagatccccaaaggggggctgtctctggtggcatgattagggaacttctcatttctttctggagggcgactggacaaaaacccaagaggatcatattctacagggatggtgtcagtgagggacagttctaccaagttctgttgtacgaacttgatgccattagaaaggcctgtgcatcattggagtctgattaccagcctccagttacctttgtcgtggtccagaagcgtcatcacaccaggttgtttgttaataatcacaatgatcagcgtgctgccgatagaagtggcaacatactgccgggcactgtggtggactcgaagatttgccatccaaccgagtttgatttctacctgtgcagccatgctggcattcagggaacaagccgtcctgcccattatcatgttctgtgggatgagaacaaatttacggctgatgggttgcaaactctcaccaacaacttgtgttacacgtatgccaggtgcacacgctcagtatcaatcgttcctcctgcatactatgctcatctggcagccttccgagctcggttttacatggagccagatacaagtgacagcggatctgtggcgagcggtgctacgacaagccgtggccctccaccaggggcgcgcaacaccagggctggtgctgcgaatgttgctgtgaggccattacctgctctcaaggaaaacgtgaagcgcgtcatgttctactgctaagattgacgctgcgctgatgctgtgagcaagcaattatcgttatggtggtgatgctaggacaccgttatgcaccggtaactttaataccttttgtactgtaactacttgtatggcattggaaactgtttgcgatatactcctattaagatgggcttgtcgtggattagattgcactattggaagccatcaatccagttctcatctgaaaattatgtaggtacgtacggtattacaacctctctctatctccctcccaatacagtacagaaaggacgcaattcttgatttcagatagacagtatctgttaggcaggtacttgttgcttgactgttcttcatatagatcgttggtaaagtatcggttac

SEQ ID NO: 57585 - DNA, 3704 bp, Zea Mays
cctcccttctccgctgttccgtcccatccggctgccatggtgaggaagaaaaggactggccctggagagagttctggggagacttctggagcgcctggtcagggctcctcacagcgtcctcaggcaacacaacagggtgcccgaggtggaggacaacaccaggtgcgtggtggatatccgggccatggagtgccgccttcagagcacccaggtggtgggccgcctgagtatcaaccacgtggctatcagggacgtggcgttccacctttacttcctggtggtgggccgcctgagcctcaaccgcgtggctaccagggacatggtggataccagggccgtggcgggccaccttcacagcatcctggtggtgggccatcacctgggtctcagcctcgtggctaccagggacgtggtggtctgcgtcccagagggggagtgccgcagccataccgtggcgggcatgtgggaggtagtgttggaccaattgttccttcaggtccgtctagaccagttcccgagctgcaccaagccccagatgtccaacatcaagcccctgtggtggcagcaccatcaccaccgggagctggctcgtcctcgcagcctgggatggccgaggtgagcactggacaagtccagcaacttgtgattcatgaccaaagttcagccagccaagttagtcaggtagcaccagcatcaagcaaagctgttagattcccattgcgccctggcaagggtacgcatgggtccaggtgcatcgtgaaggcaaatcatttctttgctgagctgcctgataaagacctccaccaatacgatgtatcaataacacctgtggttccttcacgtggtgtcaatcgtgctgtcatgaaagagcttgtaaaccttcatagacactcccatttggatgggcgtctgcctgcatatgatggaaggaagagtctttatacagctggagcattgccatttacttcgaagacattcgaaattactctgcaagatgaagaaaacagtcttggtggaggacaaagacaccaaagagggtctttcaggtggtgatcaaatttgctgctcgcgctgatctccaccatttggctatgtttctagctgggaggcaaccagatgctcctcaagaggctattcaagtacttgacattgtactacgtgaatttcctactgccaggtattgtcctgttggtagatcattttattctcccaatttagggagacgccagcaacttggtgaaggtttggaaacttggcgtggtttctatcaaagcataaggcccacacagatgggtctttctctgaatattgatatgtcctctactgcatttattgagcccctccctgtgattgattttgttgctcagcttcttgacagagatatctcagttagaccattgtctgattctgatcgtgtgaagattaaaaaagccctacgaggtgtgaaagtcgaggtcacacaccgtggaaacatgcgtaggaagtatcggatatctggcctcacttcacaagcaacaagggagttatcattccctattgatgatcgtggtactgttaagactgtggtgcaatacttcctggagacttatggctttaatattcagcacaccactttaccttgtttgcaagtgggcaatcagcaaagaataaattatctgcctatggaggtctgtaagatagttgagggacagcgttactcaaaacgactcaatgagaaacagatcactgctctactgaaggtgacttgccagcgtccccaagagcgtgagaaagccatcttgcagactgtgcatcacaatgcctactccgaggatccttatgcccaggaatttggtataaagattgatgagcgtcttgcatccgttgaagctcgtgttctgcctcctccaaggctgaaataccatgatagtggcagagagagggatgtattgccaagagttgggcagtggaatatgatgaataagaaaatggtcaatggtggtagagttagcagctgggcatgcattaacttctcacgaaatgtgcaagatggtgctgctaggagtttctgtcatgatctcgctttgatgtgccaagtatcaggaatggattttgcacttgaacctgtgctgccccctgtctatgcgaggcctgaacatgttgaaagagcactaaagagactttatcaagatgccatgagcatactcaggcctcagggccgagagcttgacttgctgatggtaatactgcctgacaataatggctctctttacggggatcttaaaaggatatgtgagactgatcttggattggtctcccaatgctgtctgactaaacatgttttcaaggcgaacaagcatcagtatcttgcaaatgttgccctgaaaataaatgttaaggttgggggaaggaatactgtacttgttgatgctttggcaaggagaatcccccttgtcagtgacgtagctactattatctttggtgctgatgtgacccatccccatcctggggaagattctagtccttccattgcagctgtggttgcttctcaagactggcctgaggttacgaagtatgcaggattagtgagtgctcaaacccatcgccaagaattgatacaggatcttttcaacgtacggcaagatccccaaaggggggctgtctctggtggcatgattagggaacttctcatttctttctggagggcgactggacaaaaacccaagaggatcatattctacagggatggtgtcagtgagggacagttctaccaagttctgttgtacgaacttgatgccattagaaaggcctgtgcatcattggagtctgattaccagcctccagttacctttgtcgtggtccagaagcgtcatcacaccaggttgtttgttaataatcacaatgatcagcgtgctgccgatagaagtggcaacatactgccgggcactgtggtggactcgaagatttgccatccaaccgagtttgatttctacctgtgcagccatgctggcattcagggaacaagccgtcctgcccattatcatgttctgtgggatgagaacaaatttacggctgatgggttgcaaactctcaccaacaacttgtgttacacgtatgccaggtgcacacgctcagtatcaatcgttcctcctgcatactatgctcatctggcagccttccgagctcggttttacatggagccagatacaagtgacagcggatctgtggcgagcggtgctacgacaagccgtggccctccaccaggggcgcgcaacaccagggctggtgctgcgaatgttgctgtgaggccattacctgctctcaaggaaaacgtgaagcgcgtcatgttctactgctaagattgacgctgcgctgatgctgtgagcaagcaattatcgttatggtggtgatgctaggacaccgttatgcaccggtaactttaataccttttgtactgtaactacttgtatggcattggaaactgtttgcgatatactcctattaagatgggcttgtcgtggattagattgcactattggaagccatcaatccagttctcatctgaaaattatgtaggtacgtacggtattacaacctctctctatctccctcccaatacagtacagaaaggacgcaattcttgatttcagatagacagtatctgttaggcaggtacttgttgcttgactgttcttcatatagatcgttggtaaagtatcggttac

SEQ ID NO: 57586 - DNA, 3807 bp, Zea Mays
gtcgattggatgggatctatcccgtccctgctcgagtccatccgatccgttcaggcgtttccctagttgcgctgttgccttctcctgtgtatcgttgatctactcgcgttccatccactgcatccggctgccatggtgaggaagaaaaggactggccctggagagagttctggggagacttctggagcgcctggtcagggctcctcacagcgtcctcaggcaacacaacagggtgcccgaggtggaggacaacaccaggtgcgtggtggatatccgggccatggagtgccgccttcagagcacccaggtggtgggccgcctgagtatcaaccacgtggctatcagggacgtggcgttccacctttacttcctggtggtgggccgcctgagcctcaaccgcgtggctaccagggacatggtggataccagggccgtggcgggccaccttcacagcatcctggtggtgggccatcacctgggtctcagcctcgtggctaccagggacgtggtggtctgcgtcccagagggggagtgccgcagccataccgtggcgggcatgtgggaggtagtgttggaccaattgttccttcaggtccgtctagaccagttcccgagctgcaccaagccccagatgtccaacatcaagcccctgtggtggcagcaccatcaccaccgggagctggctcgtcctcgcagcctgggatggccgaggtgagcactggacaagtccagcaacttgtgattcatgaccaaagttcagccagccaagttagtcaggtagcaccagcatcaagcaaagctgttagattcccattgcgccctggcaagggtacgcatgggtccaggtgcatcgtgaaggcaaatcatttctttgctgagctgcctgataaagacctccaccaatacgatgtatcaataacacctgtggttccttcacgtggtgtcaatcgtgctgtcatgaaagagcttgtaaaccttcatagacactcccatttggatgggcgtctgcctgcatatgatggaaggaagagtctttatacagctggagcattgccatttacttcgaagacattcgaaattactctgcaagatgaagaaaacagtcttggtggaggacaaagacaccaaaggggccagagggtctttcaggtggtgatcaaatttgctgctcgcgctgatctccaccatttggctatgtttctagctgggaggcaaccagatgctcctcaagaggctattcaagtacttgacattgtactacgtgaatttcctactgccaggtattgtcctgttggtagatcattttattctcccaatttagggagacgccagcaacttggtgaaggtttggaaacttggcgtggtttctatcaaagcataaggcccacacagatgggtctttctctgaatattgatatgtcctctactgcatttattgagcccctccctgtgattgattttgttgctcagcttcttgacagagatatctcagttagaccattgtctgattctgatcgtgtgaagattaaaaaagccctacgaggtgtgaaagtcgaggtcacacaccgtggaaacatgcgtaggaagtatcggatatctggcctcacttcacaagcaacaagggagttatcattccctattgatgatcgtggtactgttaagactgtggtgcaatacttcctggagacttatggctttaatattcagcacaccactttaccttgtttgcaagtgggcaatcagcaaagaataaattatctgcctatggaggtctgtaagatagttgagggacagcgttactcaaaacgactcaatgagaaacagatcactgctctactgaaggtgacttgccagcgtccccaagagcgtgagaaagccatcttgcagactgtgcatcacaatgcctactccgaggatccttatgcccaggaatttggtataaagattgatgagcgtcttgcatccgttgaagctcgtgttctgcctcctccaaggctgaaataccatgatagtggcagagagagggatgtattgccaagagttgggcagtggaatatgatgaataagaaaatggtcaatggtggtagagttagcagctgggcatgcattaacttctcacgaaatgtgcaagatggtgctgctaggagtttctgtcatgatctcgctttgatgtgccaagtatcaggaatggattttgcacttgaacctgtgctgccccctgtctatgcgaggcctgaacatgttgaaagagcactaaagagactttatcaagatgccatgagcatactcaggcctcagggccgagagcttgacttgctgatggtaatactgcctgacaataatggctctctttacggggatcttaaaaggatatgtgagactgatcttggattggtctcccaatgctgtctgactaaacatgttttcaaggcgaacaagcatcagtatcttgcaaatgttgccctgaaaataaatgttaaggttgggggaaggaatactgtacttgttgatgctttggcaaggagaatcccccttgtcagtgacgtagctactattatctttggtgctgatgtgacccatccccatcctggggaagattctagtccttccattgcagctgtggttgcttctcaagactggcctgaggttacgaagtatgcaggattagtgagtgctcaaacccatcgccaagaattgatacaggatcttttcaacgtacggcaagatccccaaaggggggctgtctctggtggcatgattagggaacttctcatttctttctggagggcgactggacaaaaacccaagaggatcatattctacagggatggtgtcagtgagggacagttctaccaagttctgttgtacgaacttgatgccattagaaaggcctgtgcatcattggagtctgattaccagcctccagttacctttgtcgtggtccagaagcgtcatcacaccaggttgtttgttaataatcacaatgatcagcgtgctgccgatagaagtggcaacatactgccgggcactgtggtggactcgaagatttgccatccaaccgagtttgatttctacctgtgcagccatgctggcattcagggaacaagccgtcctgcccattatcatgttctgtgggatgagaacaaatttacggctgatgggttgcaaactctcaccaacaacttgtgttacacgtatgccaggtgcacacgctcagtatcaatcgttcctcctgcatactatgctcatctggcagccttccgagctcggttttacatggagccagatacaagtgacagcggatctgtggcgagcggtgctacgacaagccgtggccctccaccaggggcgcgcaacaccagggctggtgctgcgaatgttgctgtgaggccattacctgctctcaaggaaaacgtgaagcgcgtcatgttctactgctaagattgacgctgcgctgatgctgtgagcaagcaattatcgttatggtggtgatgctaggacaccgttatgcaccggtaactttaataccttttgtactgtaactacttgtatggcattggaaactgtttgcgatatactcctattaagatgggcttgtcgtggattagattgcactattggaagccatcaatccagttctcatctgaaaattatgtaggtacgtacggtattacaacctctctctatctccctcccaatacagtacagaaaggacgcaattcttgatttcagatagacagtatctgttaggcaggtacttgttgcttgactgttcttcatatagatcgttggtaaagtatcggttac

SEQ ID NO: 57587 - DNA, 3639 bp, Zea Mays
ttgatctactcgcgttccatccactgcatccggctgccatggtgaggaagaaaaggactggccctggagagagttctggggagacttctggagcgcctggtcagggctcctcacagcgtcctcaggcaacacaacagggtgcccgaggtggaggacaacaccaggtgcgtggtggatatccgggccatggagtgccgccttcagagcacccaggtggtgggccgcctgagtatcaaccacgtggctatcagggacgtggcgttccacctttacttcctggtggtgggccgcctgagcctcaaccgcgtggctaccagggacatggtggataccagggccgtggcgggccaccttcacagcatcctggtggtgggccatcacctgggtctcagcctcgtggctaccagggacgtggtggtctgcgtcccagagggggagtgccgcagccataccgtggcgggcatgtgggaggtagtgttggaccaattgttccttcaggtccgtctagaccagttcccgagctgcaccaagccccagatgtccaacatcaagcccctgtggtggcagcaccatcaccaccgggagctggctcgtcctcgcagcctgggatggccgaggtgagcactggacaagtccagcaacttgtgattcatgaccaaagttcagccagccaagttagtcaggtagcaccagcatcaagcaaagctgttagattcccattgcgccctggcaagggtacgcatgggtccaggtgcatcgtgaaggcaaatcatttctttgctgagctgcctgataaagacctccaccaatacgatgtatcaataacacctgtggttccttcacgtggtgtcaatcgtgctgtcatgaaagagcttgtaaaccttcatagacactcccatttggatgggcgtctgcctgcatatgatggaaggaagagtctttatacagctggagcattgccatttacttcgaagacattcgaaattactctgcaagatgaagaaaacagtcttggtggaggacaaagacaccaaagctgggaggcaaccagatgctcctcaagaggctattcaagtacttgacattgtactacgtgaatttcctactgccaggtattgtcctgttggtagatcattttattctcccaatttagggagacgccagcaacttggtgaaggtttggaaacttggcgtggtttctatcaaagcataaggcccacacagatgggtctttctctgaatattgatatgtcctctactgcatttattgagcccctccctgtgattgattttgttgctcagcttcttgacagagatatctcagttagaccattgtctgattctgatcgtgtgaagattaaaaaagccctacgaggtgtgaaagtcgaggtcacacaccgtggaaacatgcgtaggaagtatcggatatctggcctcacttcacaagcaacaagggagttatcattccctattgatgatcgtggtactgttaagactgtggtgcaatacttcctggagacttatggctttaatattcagcacaccactttaccttgtttgcaagtgggcaatcagcaaagaataaattatctgcctatggaggtctgtaagatagttgagggacagcgttactcaaaacgactcaatgagaaacagatcactgctctactgaaggtgacttgccagcgtccccaagagcgtgagaaagccatcttgcagactgtgcatcacaatgcctactccgaggatccttatgcccaggaatttggtataaagattgatgagcgtcttgcatccgttgaagctcgtgttctgcctcctccaaggctgaaataccatgatagtggcagagagagggatgtattgccaagagttgggcagtggaatatgatgaataagaaaatggtcaatggtggtagagttagcagctgggcatgcattaacttctcacgaaatgtgcaagatggtgctgctaggagtttctgtcatgatctcgctttgatgtgccaagtatcaggaatggattttgcacttgaacctgtgctgccccctgtctatgcgaggcctgaacatgttgaaagagcactaaagagactttatcaagatgccatgagcatactcaggcctcagggccgagagcttgacttgctgatggtaatactgcctgacaataatggctctctttacggggatcttaaaaggatatgtgagactgatcttggattggtctcccaatgctgtctgactaaacatgttttcaaggcgaacaagcatcagtatcttgcaaatgttgccctgaaaataaatgttaaggttgggggaaggaatactgtacttgttgatgctttggcaaggagaatcccccttgtcagtgacgtagctactattatctttggtgctgatgtgacccatccccatcctggggaagattctagtccttccattgcagctgtggttgcttctcaagactggcctgaggttacgaagtatgcaggattagtgagtgctcaaacccatcgccaagaattgatacaggatcttttcaacgtacggcaagatccccaaaggggggctgtctctggtggcatgattagggaacttctcatttctttctggagggcgactggacaaaaacccaagaggatcatattctacagggatggtgtcagtgagggacagttctaccaagttctgttgtacgaacttgatgccattagaaaggcctgtgcatcattggagtctgattaccagcctccagttacctttgtcgtggtccagaagcgtcatcacaccaggttgtttgttaataatcacaatgatcagcgtgctgccgatagaagtggcaacatactgccgggcactgtggtggactcgaagatttgccatccaaccgagtttgatttctacctgtgcagccatgctggcattcagggaacaagccgtcctgcccattatcatgttctgtgggatgagaacaaatttacggctgatgggttgcaaactctcaccaacaacttgtgttacacgtatgccaggtgcacacgctcagtatcaatcgttcctcctgcatactatgctcatctggcagccttccgagctcggttttacatggagccagatacaagtgacagcggatctgtggcgagcggtgctacgacaagccgtggccctccaccaggggcgcgcaacaccagggctggtgctgcgaatgttgctgtgaggccattacctgctctcaaggaaaacgtgaagcgcgtcatgttctactgctaagattgacgctgcgctgatgctgtgagcaagcaattatcgttatggtggtgatgctaggacaccgttatgcaccggtaactttaataccttttgtactgtaactacttgtatggcattggaaactgtttgcgatatactcctattaagatgggcttgtcgtggattagattgcactattggaagccatcaatccagttctcatctgaaaattatgtaggtacgtacggtattacaacctctctctatctccctcccaatacagtacagaaaggacgcaattcttgatttcagatagacagtatctgttaggcaggtacttgttgcttgactgttcttcatatagatcgttggtaaagtatcggttac

SEQ ID NO: 57588 - DNA, 3983 bp, Zea Mays
attttagccactactattagctctagtgcattcaaacatcccaaaaattccaatagcaattttttagcaactgactattagctccattgcattcaaacacccctaaataccccctaaatggtatggcagggaagtgtaacatcagaccagtagccacaacccacaacaggactctcatcgccacattacttgctctagaataatataatgccttctgagacgggactggtttattttgacttgtgcatgtccccacgcaccacgtgcatcatttctgatcatttgccactgataatcatccggctgccatggtgaggaagaaaaggactggccctggagagagttctggggagacttctggagcgcctggtcagggctcctcacagcgtcctcaggcaacacaacagggtgcccgaggtggaggacaacaccaggtgcgtggtggatatccgggccatggagtgccgccttcagagcacccaggtggtgggccgcctgagtatcaaccacgtggctatcagggacgtggcgttccacctttacttcctggtggtgggccgcctgagcctcaaccgcgtggctaccagggacatggtggataccagggccgtggcgggccaccttcacagcatcctggtggtgggccatcacctgggtctcagcctcgtggctaccagggacgtggtggtctgcgtcccagagggggagtgccgcagccataccgtggcgggcatgtgggaggtagtgttggaccaattgttccttcaggtccgtctagaccagttcccgagctgcaccaagccccagatgtccaacatcaagcccctgtggtggcagcaccatcaccaccgggagctggctcgtcctcgcagcctgggatggccgaggtgagcactggacaagtccagcaacttgtgattcatgaccaaagttcagccagccaagttagtcaggtagcaccagcatcaagcaaagctgttagattcccattgcgccctggcaagggtacgcatgggtccaggtgcatcgtgaaggcaaatcatttctttgctgagctgcctgataaagacctccaccaatacgatgtatcaataacacctgtggttccttcacgtggtgtcaatcgtgctgtcatgaaagagcttgtaaaccttcatagacactcccatttggatgggcgtctgcctgcatatgatggaaggaagagtctttatacagctggagcattgccatttacttcgaagacattcgaaattactctgcaagatgaagaaaacagtcttggtggaggacaaagacaccaaaggggccagagggtctttcaggtggtgatcaaatttgctgctcgcgctgatctccaccatttggctatgtttctagctgggaggcaaccagatgctcctcaagaggctattcaagtacttgacattgtactacgtgaatttcctactgccaggtattgtcctgttggtagatcattttattctcccaatttagggagacgccagcaacttggtgaaggtttggaaacttggcgtggtttctatcaaagcataaggcccacacagatgggtctttctctgaatattgatatgtcctctactgcatttattgagcccctccctgtgattgattttgttgctcagcttcttgacagagatatctcagttagaccattgtctgattctgatcgtgtgaagattaaaaaagccctacgaggtgtgaaagtcgaggtcacacaccgtggaaacatgcgtaggaagtatcggatatctggcctcacttcacaagcaacaagggagttatcattccctattgatgatcgtggtactgttaagactgtggtgcaatacttcctggagacttatggctttaatattcagcacaccactttaccttgtttgcaagtgggcaatcagcaaagaataaattatctgcctatggaggtctgtaagatagttgagggacagcgttactcaaaacgactcaatgagaaacagatcactgctctactgaaggtgacttgccagcgtccccaagagcgtgagaaagccatcttgcagactgtgcatcacaatgcctactccgaggatccttatgcccaggaatttggtataaagattgatgagcgtcttgcatccgttgaagctcgtgttctgcctcctccaaggctgaaataccatgatagtggcagagagagggatgtattgccaagagttgggcagtggaatatgatgaataagaaaatggtcaatggtggtagagttagcagctgggcatgcattaacttctcacgaaatgtgcaagatggtgctgctaggagtttctgtcatgatctcgctttgatgtgccaagtatcaggaatggattttgcacttgaacctgtgctgccccctgtctatgcgaggcctgaacatgttgaaagagcactaaagagactttatcaagatgccatgagcatactcaggcctcagggccgagagcttgacttgctgatggtaatactgcctgacaataatggctctctttacggggatcttaaaaggatatgtgagactgatcttggattggtctcccaatgctgtctgactaaacatgttttcaaggcgaacaagcatcagtatcttgcaaatgttgccctgaaaataaatgttaaggttgggggaaggaatactgtacttgttgatgctttggcaaggagaatcccccttgtcagtgacgtagctactattatctttggtgctgatgtgacccatccccatcctggggaagattctagtccttccattgcagctgtggttgcttctcaagactggcctgaggttacgaagtatgcaggattagtgagtgctcaaacccatcgccaagaattgatacaggatcttttcaacgtacggcaagatccccaaaggggggctgtctctggtggcatgattagggaacttctcatttctttctggagggcgactggacaaaaacccaagaggatcatattctacagggatggtgtcagtgagggacagttctaccaagttctgttgtacgaacttgatgccattagaaaggcctgtgcatcattggagtctgattaccagcctccagttacctttgtcgtggtccagaagcgtcatcacaccaggttgtttgttaataatcacaatgatcagcgtgctgccgatagaagtggcaacatactgccgggcactgtggtggactcgaagatttgccatccaaccgagtttgatttctacctgtgcagccatgctggcattcagggaacaagccgtcctgcccattatcatgttctgtgggatgagaacaaatttacggctgatgggttgcaaactctcaccaacaacttgtgttacacgtatgccaggtgcacacgctcagtatcaatcgttcctcctgcatactatgctcatctggcagccttccgagctcggttttacatggagccagatacaagtgacagcggatctgtggcgagcggtgctacgacaagccgtggccctccaccaggggcgcgcaacaccagggctggtgctgcgaatgttgctgtgaggccattacctgctctcaaggaaaacgtgaagcgcgtcatgttctactgctaagattgacgctgcgctgatgctgtgagcaagcaattatcgttatggtggtgatgctaggacaccgttatgcaccggtaactttaataccttttgtactgtaactacttgtatggcattggaaactgtttgcgatatactcctattaagatgggcttgtcgtggattagattgcactattggaagccatcaatccagttctcatctgaaaattatgtaggtacgtacggtattacaacctctctctatctccctcccaatacagtacagaaaggacgcaattcttgatttcagatagacagtatctgttaggcaggtacttgttgcttgactgttcttcatatagatcgttggtaaagtatcggttac

SEQ ID NO: 57589 - DNA, 1800 bp, Zea Mays
ctggttttgagagcacagggatttatgtgataccacatgccaaattcgaaaaccgcaaatatattttactcaaaaggagtaacagcaacggtaacccattaatcacaaagaaaacaaaactaatggacctaaagtagtagccgagagcccagcaaagaaggcatccactcccactcggccactccccatgctttccttgcgcaacccagccccggcgccccgctgacctggtcgggtgcgcctccgcagctgccgctccggtgcccccaggccgcaggccgctgtcctcctgtgatgccatggtgatttggagttgctcttcttgtctccatggattcattcccagagcggcatggaggaggcactacccactcttgtctcccaggcctcctgcatcgccgccgcctatccaccacttctcctccgctagacggtccaccaagaaatctgccccaaaggcgccaatgggctcttccattcctgccgcaaaggcgctaatagactcttccagagagcccttctatgtcatccgcaagggggatgtcattggcgtctataagaacctcagtgattgccaagcccaagccagcaaatcggtacttcatccttcagtcactgtctacaaaggctattctctgcgtaaagaaactgaggaatatcttgctgcacgtgggttcaggaacgctgtctgttccattggtgcagcggatgcaagtgacgaattgtttggcgatctggttccctgcccttttcagcaacctgatgagaacacacaatctattttgaaaatgtcacagggacaggagatggaaacaagatcatcagagcatcccaaagttgctgatctggaaccattaccagatagcgaactctcttgtattcttgaatttgatggagcttgtaaaggaaatcctgggaaatcaggtgctggagtcattattcggcggttagatggatctgtgattgctgtactacgtgagggtttgggtattatgaccaacaacgctgctgaatatcgtgcattgatcctggggctaaattatgcttccaagaagggattcaagtatattcgttgtcaaggtgattctaagcttgtctgtaaccaggttcaaggtgcctggcgtgctaggagcgataatatgtctatcttgtgcgatatagccaaggaacttaaggaaacattccttacatttcaaatcaatcatgttttgagggaattcaactccgatgctgacgttcaagctaactttggatgccaacttgctgagaaaacaagacacggtgcttgagagtagactgttaatcaatactaattgacccacgtgatcatatcacagggtgcaaagagctgtttcggctttttccaagagctgtttcgtttttaccggtaaaaagatggattggaaagaggagaaactggtagagagccacaagttctagcttcatgggctctgtgcgctgctaaagtaacaaacaacacgtagccgaagcaggtgagatatgcaccaagacctgcaatattttgctgttggtttggttttgtgttgccatgaggattgaggagcttgattctttgtacatgcaattgtgaactgaattgaagtatacttaactcacaaatacatgatttcagaaattattgagggtttattcgtttctttctcaatttatgtggattggatggatgaaatttaatctctagaaagtcaaaatttcttattttttcaattacatctaatccacgtggaatagcaataaccgaaaacctcaatgaaaacgaccgtgtatccttgaaatctg

SEQ ID NO: 57590 - DNA, 1817 bp, Zea Mays
ctggttttgagagcacagggatttatgtgataccacatgccaaattcgaaaaccgcaaatatattttactcaaaaggagtaacagcaacggtaacccattaatcacaaagaaaacaaaactaatggacctaaagtagtagccgagagcccagcaaagaaggcatccactcccactcggccactccccatgctttccttgcgcaacccagccccggcgccccgctgacctggtcgggtgcgcctccgcagctgccgctccggtgcccccaggccgcaggccgctgtcctcctgtgatgccatggtgatttggagttgctcttcttgtctccatggattcattcccagagcggcatggaggaggcactacccactcttgtctcccaggcctcctgcatcgccgccgcctatccaccacttctcctccgctagacggtccaccaagaaatctgccccaaaggcgccaatgggctcttccattcctgccgcaaaggcgctaatagactcttccagagagcccttctatgtcatccgcaagggggatgtcattggcgtctataagaacctcagtgattgccaagcccaagccagcaaatcggtacttcatccttcagtcactgtctacaaaggctattctctgcgtaaagaaactgaggaatatcttgctgcacgtgggttcaggaacgctgtctgttccattggtgcagcggatgcaagtgacgaattgtttggcgatctggttccctgcccttttcagcaacctgatgagaacacacaatctattttgaaaatgtcacagggacaggagatggaaacaagatcatcagagcatcccaaagttgctgatctggaaccattaccagatagcgaactctcttgtattcttgaatttgatggagcttgtaaaggaaatcctgggaaatcaggtgctggagtcattattcggcggttagatggatctgtgattgctgtactacgtgagggtttgggtattatgaccaacaacgctgctgaatatcgtgcattgatcctggggctaaattatgcttccaagaagggattcaagtatattcgttgtcaaggttcaaggtgcctggcgtgctaggagcgataatatgtctatcttgtgcgatatagccaaggaacttaaggaaacattccttacatttcaaatcaatcatgttttgagggaattcaactccgatgctgacgttcaagctaactttggatgccaacttgctgttgatgaagttcaagagctgtccgtttgaattgccattggcagagaaaacaagacacggtgcttgagagtagactgttaatcaatactaattgacccacgtgatcatatcacagggtgcaaagagctgtttcggctttttccaagagctgtttcgtttttaccggtaaaaagatggattggaaagaggagaaactggtagagagccacaagttctagcttcatgggctctgtgcgctgctaaagtaacaaacaacacgtagccgaagcaggtgagatatgcaccaagacctgcaatattttgctgttggtttggttttgtgttgccatgaggattgaggagcttgattctttgtacatgcaattgtgaactgaattgaagtatacttaactcacaaatacatgatttcagaaattattgagggtttattcgtttctttctcaatttatgtggattggatggatgaaatttaatctctagaaagtcaaaatttcttattttttcaattacatctaatccacgtggaatagcaataaccgaaaacctcaatgaaaacgaccgtgtatccttgaaatctg

SEQ ID NO: 57591 - DNA, 1699 bp, Zea Mays
ctggttttgagagcacagggatttatgtgataccacatgccaaattcgaaaaccgcaaatatattttactcaaaaggagtaacagcaacggtaacccattaatcacaaagaaaacaaaactaatggacctaaagtagtagccgagagcccagcaaagaaggcatccactcccactcggccactccccatgctttccttgcgcaacccagccccggcgccccgctgacctggtcgggtgcgcctccgcagctgccgctccggtgcccccaggccgcaggccgctgtcctcctgtgatgccatggtgatttggagttgctcttcttgtctccatggattcattcccagagcggcatggaggaggcactacccactcttgtctcccaggcctcctgcatcgccgccgcctatccaccacttctcctccgctagacggtccaccaagaaatctgccccaaaggcgccaatgggctcttccattcctgccgcaaaggcgctaatagactcttccagagagcccttctatgtcatccgcaagggggatgtcattggcgtctataagaacctcagtgattgccaagcccaagccagcaaatcggtacttcatccttcagtcactgtctacaaaggctattctctgcgtaaagaaactgaggaatatcttgctgcacgtgggttcaggaacgctgtctgttccattggtgcagcggatgcaagtgacgaattgtttggcgatctggttccctgcccttttcagcaacctgatgagaacacacaatctattttgaaaatgtcacagggacaggagatggaaacaagatcatcagagcatcccaaagttgctgatctggaaccattaccagatagcgaactctcttgtattcttgaatttgatggagcttgtaaaggaaatcctgggaaatcaggtgctggagtcattattcggcggttagatggatctgtggttcaaggtgcctggcgtgctaggagcgataatatgtctatcttgtgcgatatagccaaggaacttaaggaaacattccttacatttcaaatcaatcatgttttgagggaattcaactccgatgctgacgttcaagctaactttggatgccaacttgctgttgatgaagttcaagagctgtccgtttgaattgccattggcagagaaaacaagacacggtgcttgagagtagactgttaatcaatactaattgacccacgtgatcatatcacagggtgcaaagagctgtttcggctttttccaagagctgtttcgtttttaccggtaaaaagatggattggaaagaggagaaactggtagagagccacaagttctagcttcatgggctctgtgcgctgctaaagtaacaaacaacacgtagccgaagcaggtgagatatgcaccaagacctgcaatattttgctgttggtttggttttgtgttgccatgaggattgaggagcttgattctttgtacatgcaattgtgaactgaattgaagtatacttaactcacaaatacatgatttcagaaattattgagggtttattcgtttctttctcaatttatgtggattggatggatgaaatttaatctctagaaagtcaaaatttcttattttttcaattacatctaatccacgtggaatagcaataaccgaaaacctcaatgaaaacgaccgtgtatccttgaaatctg

SEQ ID NO: 57592 - DNA, 1198 bp, Zea Mays
cttaagcgttaagctgatcttttcaaagttacatcttcagcaacctgatgagaacacacaatctattttgaaaatgtcacagggacaggagatggaaacaagatcatcagagcatcccaaagttgctgatctggaaccattaccagatagcgaactctcttgtattcttgaatttgatggagcttgtaaaggaaatcctgggaaatcaggtgctggagtcattattcggcggttagatggatctgtgattgctgtactacgtgagggtttgggtattatgaccaacaacgctgctgaatatcgtgcattgatcctggggctaaattatgcttccaagaagggattcaagtatattcgttgtcaaggtgattctaagcttgtctgtaaccaggttcaaggtgcctggcgtgctaggagcgataatatgtctatcttgtgcgatatagccaaggaacttaaggaaacattccttacatttcaaatcaatcatgttttgagggaattcaactccgatgctgacgttcaagctaactttggatgccaacttgctggtattgacctcgcctttgaattgctagctacgaaacagatacctgatgattgatgtcttcctttgtacagttgatgaagttcaagagctgtccgtttgaattgccattggcagagaaaacaagacacggtgcttgagagtagactgttaatcaatactaattgacccacgtgatcatatcacagggtgcaaagagctgtttcggctttttccaagagctgtttcgtttttaccggtaaaaagatggattggaaagaggagaaactggtagagagccacaagttctagcttcatgggctctgtgcgctgctaaagtaacaaacaacacgtagccgaagcaggtgagatatgcaccaagacctgcaatattttgctgttggtttggttttgtgttgccatgaggattgaggagcttgattctttgtacatgcaattgtgaactgaattgaagtatacttaactcacaaatacatgatttcagaaattattgagggtttattcgtttctttctcaatttatgtggattggatggatgaaatttaatctctagaaagtcaaaatttcttattttttcaattacatctaatccacgtggaatagcaataaccgaaaacctcaatgaaaacgaccgtgtatccttgaaatctg

SEQ ID NO: 57593 - DNA, 2797 bp, Zea Mays
acaccgcacacccttgcttgtctccaggcgtacttgcgtttagcgtctcttccctgctgccatctctgtccggagggcaagccatggcggcgggcggggacggcgtcgctcgccaggcggagctccgccggatcgagggcaacatctgcttcaagaaggcgcgcctcggcgccgccatcgactgctacaccgaggcaattgcgctctgccccgacgtcgccgtctactggatcaatcgggccctgtgccatttcaagcgcaaggagtgggccaaggtcgaagaggacagcaggagggctcttgcgcttgattacactttagtcaaggggcactatctgctggggtgtgcgctactcgagaaggaagaatctgctcttgctatcaaggaattcgaaaagggaagcttgtgaaactgctctgcaggagcatcactttctaactggtacacttgaggaagactccaacaggtcagacaacgagtattcagagcaaattaaactactatcagaggtcttcagccaagcgacagtcgccgatacaccaacagatgtgcccgattacctttgctgtcagataacattcgagatcttccgagacccagtgatcacaccgagtggtgtaacatatgagagggctgtacttgttgaacatctccacaaggttggcaatttcgacccggtgacgcgagaacctctgaaggagcatcagctggttccgaatctggccatcaaggaagcagtgcaggcctacctgaaagagcacagctgggcccacaagttgaactaattggatgccgtgtgctttgctgactgcagatgctgataaatcggggatggcctgttattagagttagattttatgttgtgttggaatgagattgattggatagctcgattcatcgttcttagtattgattgggtaacttgacctgtaactgcaattctgcaaacactcattggatggatgtaatgaagcaagtgtacatgaaacattggttggttcagctcactgcatgtatatggttgcagcattatatatggttggtcgtagacccagtgggcctcaaacaagttaggcctagtttggatactctagtaatgagtgggattgaagtggattaagatgtattgagagagtatttgatgtattggggatttacaccctctccaatcccttcaaaacactccaatcctaaagtatccaaactaggccttaggtgggccggcctctatccaaggcccagccttttacttggcgctgacaagacaaaagagaggagacgagaaagaaaacaaaccctagcccgctacccctgccccttctctcttcgtcgcgcctccgcctccgccgtcgtagcatcctcctccgccacctcggccatggcgacatccccagcgctcctcttcccttctccctcctcggcatcctctgcgccttcgtcggcgcgggtggaggcagtggtgcttttcaacgtctgcgacagctacgtgcggcgcccggaccaggcggaccgcgtcatcggcaccctcctcggttccctcctctccgacggcaccgtccacgtccgcaactcctatgtcgtcccccacagcgagtcagccgaccaggtcgccatcgacatcgactaccaccataacatgtacgcctcgcaccagaaggtgaaccccaaggaggtcatcgtcggatggttctcgactggatttggtgtttctggggggagtacgctcatccacgagttctattcaagggaagtacaaaaccccatccatcttacagtcgacactggcttcactaggggggaggcttccatcaaagcctacatctcatccaatctgtccctcagagatagtcaactcgctgcacaatttcaggaaatccctctggatctgaagatgattgaggcggaaaaggctggatttgagatcctgaaatctactatggtagagaagctccccaatgatctggaaggaatggagtcatcgatggggaagctttacattcttatcgatgagatctacaaatacgtcgatgatgttgtggaaggacgcgtggcacccgacaacagaattggaaggttcatctctgattcttttgcttcggtgccgaaattgtccccggctgctttcgataagacaggataaccttgcgctggtatacctgtcaagcatcacaaggacacaaatcagcatcgccgagaagttgaacactgctgctcaagtgctgtaggtttggcggtgtggcatctggtttggacgtggatggcttgatgctatctgtgatgcttggcgtaagtgtgattggtgacagaaatgcatttttgtactcattattattattgctaaatgagagacctgatggaaagggttagccaacgatgagatcccataatgttgccagaatgccagtagagtggtggatggcgagatgtttctgtttggatagtattctgtgctccaggttgaatatttgtaatgctcgttggttttgtgtagcgacacatcggcaatgtggagcaatgaagagatttgctccacattttacgtcgtcatttagaggtgtggtggcatgcaatgtgatgctgttgttgcaggaaaatcggttttgctgtcctgttatagcaagctttcctcctgcggccctgcttttcatttccctcttgattcttgcctctgcccttcgaaaccggtctaggccgggaacaatcacgtcatcccatgttatgtgtctagcctgaacgaaccgtccgctactctttttttattataatataagataatgataagaagctattcaaaat

SEQ ID NO: 57594 - DNA, 3192 bp, Zea Mays
acaccgcacacccttgcttgtctccaggcgtacttgcgtttagcgtctcttccctgctgccatctctgtccggagggcaagccatggcggcgggcggggacggcgtcgctcgccaggcggagctccgccggatcgagggcaacatctgcttcaagaaggcgcgcctcggcgccgccatcgactgctacaccgaggcaattgcgctctgccccgacgtcgccgtctactggatcaatcgggccctgtgccatttcaagcgcaaggagtgggccaaggtcgaagaggacagcaggagggctcttgcgcttgattacactttagtcaaggggcactatctgctggggtgtgcgctactcgagaaggaagaatctgctcttgctatcaaggaattcgaaaaggctctaactctcttaaagtctgtggattcaacgtatgaaatggctgaggacatttggcaggtccttgcaaaggcaaaatacttagattgggagaagcattccactgaacgactatggaggatggaaagtttgaaggaagcttgtgaaactgctctgcaggagcatcactttctaactggtacacttgaggaagactccaacaggtcagacaacgagtattcagagcaaattaaactactatcagaggtcttcagccaagcgacagtcgccgatacaccaacagatgtgcccgattacctttgctgtcagataacattcgagatcttccgagacccagtgatcacaccgagtggtgtaacatatgagagggctgtacttgttgaacatctccacaaggttggcaatttcgacccggtgacgcgagaacctctgaaggagcatcagctggttccgaatctggccatcaaggaagcagtgcaggcctacctgaaagagcacagctgggcccacaagttgaactaattggatgccgtgtgctttgctgactgcagatgctgataaatcggggatggcctgttattagagttagattttatgttgtgttggaatgagattgattggatagctcgattcatcgttcttagtattgattgggtaacttgacctgtaactgcaattctgcaaacactcattggatggatgtaatgaagcaagtgtacatgaaacattggttggttcagctcactgcatgtatatggttgcagcattatatatggttggtcgtagacccagtgggcctcaaacaagttaggcctagtttggatactctagtaatgagtgggattgaagtggattaagatgtattgagagagtatttgatgtattggggatttacaccctctccaatcccttcaaaacactccaatcctaaagtatccaaactaggccttaggtgggccggcctctatccaaggcccagccttttacttggcgctgacaagacaaaagagaggagacgagaaagaaaacaaaccctagcccgctacccctgccccttctctcttcgtcgcgcctccgcctccgccgtcgtagcatcctcctccgccacctcggccatggcgacatccccagcgctcctcttcccttctccctcctcggcatcctctgcgccttcgtcggcgcgggtggaggcagtggtgcttttcaacgtctgcgacagctacgtgcggcgcccggaccaggcggaccgcgtcatcggcaccctcctcggttccctcctctccgacggcaccgtccacgtccgcaactcctatgtcgtcccccacagcgagtcagccgaccaggtcgccatcgacatcgactaccaccataacatgtacgcctcgcaccagaaggtgaaccccaaggaggtcatcgtcggatggttctcgactggatttggtgtttctggggggagtacgctcatccacgagttctattcaagggaagtacaaaaccccatccatcttacagtcgacactggcttcactaggggggaggcttccatcaaagcctacatctcatccaatctgtccctcagagatagtcaactcgctgcacaatttcaggaaatccctctggatctgaagatgattgaggcggaaaaggctggatgtatgttaccggtgaatagcagatatataccttctatctgggggagatctcattttgcacctgtattagttggtccttctgttactgtgttgaacttctcaggaatagtcacatcagtagttggatttagtaataatgtctctgtttctatttctgtttctgtattaatttctcgtagacaactgatgtttgtaagaaccatattttgctctgctacatcctcagttttagtagcagaacattttgaagcttccatcactcttactaccttctgttacagttgagatcctgaaatctactatggtagagaagctccccaatgatctggaaggaatggagtcatcgatggggaagctttacattcttatcgatgagatctacaaatacgtcgatgatgttgtggaaggacgcgtggcacccgacaacagaattggaaggttcatctctgattcttttgcttcggtgccgaaattgtccccggctgctttcgataagcttttcaatgacaagattcaggataaccttgcgctggtatacctgtcaagcatcacaaggacacaaatcagcatcgccgagaagttgaacactgctgctcaagtgctgtaggtttggcggtgtggcatctggtttggacgtggatggcttgatgctatctgtgatgcttggcgtaagtgtgattggtgacagaaatgcatttttgtactcattattattattgctaaatgagagacctgatggaaagggttagccaacgatgagatcccataatgttgccagaatgccagtagagtggtggatggcgagatgtttctgtttggatagtattctgtgctccaggttgaatatttgtaatgctcgttggttttgtgtagcgacacattttacgtcgtcatttagaggtgtggtggcatgcaatgtgatgctgttgttgcaggaaaatcggttttgctgtcctgttatagcaagctttcctcctgcggccctgcttttcatttccctcttgattcttgcctctgcccttcgaaaccggtctaggccgggaacaatcacgtcatcccatgttatgtgtctagcctgaacgaaccgtccgctactctttttttattataatataagataatgataagaagctattcaaaat

SEQ ID NO: 57595 - DNA, 3094 bp, Zea Mays
acaccgcacacccttgcttgtctccaggcgtacttgcgtttagcgtctcttccctgctgccatctctgtccggagggcaagccatggcggcgggcggggacggcgtcgctcgccaggcggagctccgccggatcgagggcaacatctgcttcaagaaggcgcgcctcggcgccgccatcgactgctacaccgaggcaattgcgctctgccccgacgtcgccgtctactggatcaatcgggccctgtgccatttcaagcgcaaggagtgggccaaggtcgaagaggacagcaggagggctcttgcgcttgattacactttagtcaaggggcactatctgctggggtgtgcgctactcgagaaggaagaatctgctcttgctatcaaggaattcgaaaagggaagcttgtgaaactgctctgcaggagcatcactttctaactggtacacttgaggaagactccaacaggtcagacaacgagtattcagagcaaattaaactactatcagaggtcttcagccaagcgacagtcgccgatacaccaacagatgtgcccgattacctttgctgtcagataacattcgagatcttccgagacccagtgatcacaccgagtggtgtaacatatgagagggctgtacttgttgaacatctccacaaggttggcaatttcgacccggtgacgcgagaacctctgaaggagcatcagctggttccgaatctggccatcaaggaagcagtgcaggcctacctgaaagagcacagctgggcccacaagttgaactaattggatgccgtgtgctttgctgactgcagatgctgataaatcggggatggcctgttattagagttagattttatgttgtgttggaatgagattgattggatagctcgattcatcgttcttagtattgattgggtaacttgacctgtaactgcaattctgcaaacactcattggatggatgtaatgaagcaagtgtacatgaaacattggttggttcagctcactgcatgtatatggttgcagcattatatatggttggtcgtagacccagtgggcctcaaacaagttaggcctagtttggatactctagtaatgagtgggattgaagtggattaagatgtattgagagagtatttgatgtattggggatttacaccctctccaatcccttcaaaacactccaatcctaaagtatccaaactaggccttaggtgggccggcctctatccaaggcccagccttttacttggcgctgacaagacaaaagagaggagacgagaaagaaaacaaaccctagcccgctacccctgccccttctctcttcgtcgcgcctccgcctccgccgtcgtagcatcctcctccgccacctcggccatggcgacatccccagcgctcctcttcccttctccctcctcggcatcctctgcgccttcgtcggcgcgggtggaggcagtggtgcttttcaacgtctgcgacagctacgtgcggcgcccggaccaggcggaccgcgtcatcggcaccctcctcggttccctcctctccgacggcaccgtccacgtccgcaactcctatgtcgtcccccacagcgagtcagccgaccaggtcgccatcgacatcgactaccaccataacatgtacgcctcgcaccagaaggtgaaccccaaggaggtcatcgtcggatggttctcgactggatttggtgtttctggggggagtacgctcatccacgagttctattcaagggaagtacaaaaccccatccatcttacagtcgacactggcttcactaggggggaggcttccatcaaagcctacatctcatccaatctgtccctcagagatagtcaactcgctgcacaatttcaggaaatccctctggatctgaagatgattgaggcggaaaaggctggatgtatgttaccggtgaatagcagatatataccttctatctgggggagatctcattttgcacctgtattagttggtccttctgttactgtgttgaacttctcaggaatagtcacatcagtagttggatttagtaataatgtctctgtttctatttctgtttctgtattaatttctcgtagacaactgatgtttgtaagaaccatattttgctctgctacatcctcagttttagtagcagaacattttgaagcttccatcactcttactaccttctgttacagttgagatcctgaaatctactatggtagagaagctccccaatgatctggaaggaatggagtcatcgatggggaagctttacattcttatcgatgagatctacaaatacgtcgatgatgttgtggaaggacgcgtggcacccgacaacagaattggaaggttcatctctgattcttttgcttcggtgccgaaattgtccccggctgctttcgataagcttttcaatgacaagattcaggataaccttgcgctggtatacctgtcaagcatcacaaggacacaaatcagcatcgccgagaagttgaacactgctgctcaagtgctgtaggtttggcggtgtggcatctggtttggacgtggatggcttgatgctatctgtgatgcttggcgtaagtgtgattggtgacagaaatgcatttttgtactcattattattattgctaaatgagagacctgatggaaagggttagccaacgatgagatcccataatgttgccagaatgccagtagagtggtggatggcgagatgtttctgtttggatagtattctgtgctccaggttgaatatttgtaatgctcgttggttttgtgtagcgacacatcggcaatgtggagcaatgaagagatttgctccacattttacgtcgtcatttagaggtgtggtggcatgcaatgtgatgctgttgttgcaggaaaatcggttttgctgtcctgttatagcaagctttcctcctgcggccctgcttttcatttccctcttgattcttgcctctgcccttcgaaaccggtctaggccgggaacaatcacgtcatcccatgttatgtgtctagcctgaacgaaccgtccgctactctttttttattataatataagataatgataagaagctattcaaaat

SEQ ID NO: 57596 - DNA, 2948 bp, Zea Mays
acaccgcacacccttgcttgtctccaggcgtacttgcgtttagcgtctcttccctgctgccatctctgtccggagggcaagccatggcggcgggcggggacggcgtcgctcgccaggcggagctccgccggatcgagggcaacatctgcttcaagaaggcgcgcctcggcgccgccatcgactgctacaccgaggcaattgcgctctgccccgacgtcgccgtctactggatcaatcgggccctgtgccatttcaagcgcaaggagtgggccaaggtcgaagaggacagcaggagggctcttgcgcttgattacactttagtcaaggggcactatctgctggggtgtgcgctactcgagaaggaagaatctgctcttgctatcaaggaattcgaaaaggctctaactctcttaaagtctgtggattcaacgtatgaaatggctgaggacatttggcaggtccttgcaaaggcaaaatacttagattgggagaagcattccactgaacgactatggaggatggaaagtttgaaggaagcttgtgaaactgctctgcaggagcatcactttctaactggtacacttgaggaagactccaacaggtcagacaacgagtattcagagcaaattaaactactatcagaggtcttcagccaagcgacagtcgccgatacaccaacagatgtgcccgattacctttgctgtcagataacattcgagatcttccgagacccagtgatcacaccgagtggtgtaacatatgagagggctgtacttgttgaacatctccacaaggttggcaatttcgacccggtgacgcgagaacctctgaaggagcatcagctggttccgaatctggccatcaaggaagcagtgcaggcctacctgaaagagcacagctgggcccacaagttgaactaattggatgccgtgtgctttgctgactgcagatgctgataaatcggggatggcctgttattagagttagattttatgttgtgttggaatgagattgattggatagctcgattcatcgttcttagtattgattgggtaacttgacctgtaactgcaattctgcaaacactcattggatggatgtaatgaagcaagtgtacatgaaacattggttggttcagctcactgcatgtatatggttgcagcattatatatggttggtcgtagacccagtgggcctcaaacaagttaggcctagtttggatactctagtaatgagtgggattgaagtggattaagatgtattgagagagtatttgatgtattggggatttacaccctctccaatcccttcaaaacactccaatcctaaagtatccaaactaggccttaggtgggccggcctctatccaaggcccagccttttacttggcgctgacaagacaaaagagaggagacgagaaagaaaacaaaccctagcccgctacccctgccccttctctcttcgtcgcgcctccgcctccgccgtcgtagcatcctcctccgccacctcggccatggcgacatccccagcgctcctcttcccttctccctcctcggcatcctctgcgccttcgtcggcgcgggtggaggcagtggtgcttttcaacgtctgcgacagctacgtgcggcgcccggaccaggcggaccgcgtcatcggcaccctcctcggttccctcctctccgacggcaccgtccacgtccgcaactcctatgtcgtcccccacagcgagtcagccgaccaggtcgccatcgacatcgactaccaccataacatgtacgcctcgcaccagaaggtgaaccccaaggaggtcatcgtcggatggttctcgactggatttggtgtttctggggggagtacgctcatccacgagttctattcaagggaagtacaaaaccccatccatcttacagtcgacactggcttcactaggggggaggcttccatcaaagcctacatctcatccaatctgtccctcagagatagtcaactcgctgcacaatttcaggaaatccctctggatctgaagatgattgaggcggaaaaggctggatttgagatcctgaaatctactatggtagagaagctccccaatgatctggaaggaatggagtcatcgatggggaagctttacattcttatcgatgagatctacaaatacgtcgatgatgttgtggaaggacgcgtggcacccgacaacagaattggaaggttcatctctgattcttttgcttcggtgccgaaattgtccccggctgctttcgataagcttttcaatgacaagattcaggataaccttgcgctggtatacctgtcaagcatcacaaggacacaaatcagcatcgccgagaagttgaacactgctgctcaagtgctgtaggtttggcggtgtggcatctggtttggacgtggatggcttgatgctatctgtgatgcttggcgtaagtgtgattggtgacagaaatgcatttttgtactcattattattattgctaaatgagagacctgatggaaagggttagccaacgatgagatcccataatgttgccagaatgccagtagagtggtggatggcgagatgtttctgtttggatagtattctgtgctccaggttgaatatttgtaatgctcgttggttttgtgtagcgacacatcggcaatgtggagcaatgaagagatttgctccacattttacgtcgtcatttagaggtgtggtggcatgcaatgtgatgctgttgttgcaggaaaatcggttttgctgtcctgttatagcaagctttcctcctgcggccctgcttttcatttccctcttgattcttgcctctgcccttcgaaaccggtctaggccgggaacaatcacgtcatcccatgttatgtgtctagcctgaacgaaccgtccgctactctttttttattataatataagataatgataagaagctattcaaaat

SEQ ID NO: 57597 - DNA, 2888 bp, Zea Mays
acaccgcacacccttgcttgtctccaggcgtacttgcgtttagcgtctcttccctgctgccatctctgtccggagggcaagccatggcggcgggcggggacggcgtcgctcgccaggcggagctccgccggatcgagggcaacatctgcttcaagaaggcgcgcctcggcgccgccatcgactgctacaccgaggcaattgcgctctgccccgacgtcgccgtctactggatcaatcgggccctgtgccatttcaagcgcaaggagtgggccaaggtcgaagaggacagcaggagggctcttgcgcttgattacactttagtcaaggggcactatctgctggggtgtgcgctactcgagaaggaagaatctgctcttgctatcaaggaattcgaaaaggtccttgcaaaggcaaaatacttagattgggagaagcattccactgaacgactatggaggatggaaagtttgaaggaagcttgtgaaactgctctgcaggagcatcactttctaactggtacacttgaggaagactccaacaggtcagacaacgagtattcagagcaaattaaactactatcagaggtcttcagccaagcgacagtcgccgatacaccaacagatgtgcccgattacctttgctgtcagataacattcgagatcttccgagacccagtgatcacaccgagtggtgtaacatatgagagggctgtacttgttgaacatctccacaaggttggcaatttcgacccggtgacgcgagaacctctgaaggagcatcagctggttccgaatctggccatcaaggaagcagtgcaggcctacctgaaagagcacagctgggcccacaagttgaactaattggatgccgtgtgctttgctgactgcagatgctgataaatcggggatggcctgttattagagttagattttatgttgtgttggaatgagattgattggatagctcgattcatcgttcttagtattgattgggtaacttgacctgtaactgcaattctgcaaacactcattggatggatgtaatgaagcaagtgtacatgaaacattggttggttcagctcactgcatgtatatggttgcagcattatatatggttggtcgtagacccagtgggcctcaaacaagttaggcctagtttggatactctagtaatgagtgggattgaagtggattaagatgtattgagagagtatttgatgtattggggatttacaccctctccaatcccttcaaaacactccaatcctaaagtatccaaactaggccttaggtgggccggcctctatccaaggcccagccttttacttggcgctgacaagacaaaagagaggagacgagaaagaaaacaaaccctagcccgctacccctgccccttctctcttcgtcgcgcctccgcctccgccgtcgtagcatcctcctccgccacctcggccatggcgacatccccagcgctcctcttcccttctccctcctcggcatcctctgcgccttcgtcggcgcgggtggaggcagtggtgcttttcaacgtctgcgacagctacgtgcggcgcccggaccaggcggaccgcgtcatcggcaccctcctcggttccctcctctccgacggcaccgtccacgtccgcaactcctatgtcgtcccccacagcgagtcagccgaccaggtcgccatcgacatcgactaccaccataacatgtacgcctcgcaccagaaggtgaaccccaaggaggtcatcgtcggatggttctcgactggatttggtgtttctggggggagtacgctcatccacgagttctattcaagggaagtacaaaaccccatccatcttacagtcgacactggcttcactaggggggaggcttccatcaaagcctacatctcatccaatctgtccctcagagatagtcaactcgctgcacaatttcaggaaatccctctggatctgaagatgattgaggcggaaaaggctggatttgagatcctgaaatctactatggtagagaagctccccaatgatctggaaggaatggagtcatcgatggggaagctttacattcttatcgatgagatctacaaatacgtcgatgatgttgtggaaggacgcgtggcacccgacaacagaattggaaggttcatctctgattcttttgcttcggtgccgaaattgtccccggctgctttcgataagcttttcaatgacaagattcaggataaccttgcgctggtatacctgtcaagcatcacaaggacacaaatcagcatcgccgagaagttgaacactgctgctcaagtgctgtaggtttggcggtgtggcatctggtttggacgtggatggcttgatgctatctgtgatgcttggcgtaagtgtgattggtgacagaaatgcatttttgtactcattattattattgctaaatgagagacctgatggaaagggttagccaacgatgagatcccataatgttgccagaatgccagtagagtggtggatggcgagatgtttctgtttggatagtattctgtgctccaggttgaatatttgtaatgctcgttggttttgtgtagcgacacatcggcaatgtggagcaatgaagagatttgctccacattttacgtcgtcatttagaggtgtggtggcatgcaatgtgatgctgttgttgcaggaaaatcggttttgctgtcctgttatagcaagctttcctcctgcggccctgcttttcatttccctcttgattcttgcctctgcccttcgaaaccggtctaggccgggaacaatcacgtcatcccatgttatgtgtctagcctgaacgaaccgtccgctactctttttttattataatataagataatgataagaagctattcaaaat

SEQ ID NO: 57598 - DNA, 2778 bp, Zea Mays
acaccgcacacccttgcttgtctccaggcgtacttgcgtttagcgtctcttccctgctgccatctctgtccggagggcaagccatggcggcgggcggggacggcgtcgctcgccaggcggagctccgccggatcgagggcaacatctgcttcaagaaggcgcgcctcggcgccgccatcgactgctacaccgaggcaattgcgctctgccccgacgtcgccgtctactggatcaatcgggccctgtgccatttcaagcgcaaggagtgggccaaggtcgaagaggacagcaggagggctcttgcgcttgattacactttagtcaaggggcactatctgctggggtgtgcgctactcgagaaggaagaatctgctcttgctatcaaggaattcgaaaagggaagcttgtgaaactgctctgcaggagcatcactttctaactggtacacttgaggaagactccaacaggtcagacaacgagtattcagagcaaattaaactactatcagaggtcttcagccaagcgacagtcgccgatacaccaacagatgtgcccgattacctttgctgtcagataacattcgagatcttccgagacccagtgatcacaccgagtggtgtaacatatgagagggctgtacttgttgaacatctccacaaggttggcaatttcgacccggtgacgcgagaacctctgaaggagcatcagctggttccgaatctggccatcaaggaagcagtgcaggcctacctgaaagagcacagctgggcccacaagttgaactaattggatgccgtgtgctttgctgactgcagatgctgataaatcggggatggcctgttattagagttagattttatgttgtgttggaatgagattgattggatagctcgattcatcgttcttagtattgattgggtaacttgacctgtaactgcaattctgcaaacactcattggatggatgtaatgaagcaagtgtacatgaaacattggttggttcagctcactgcatgtatatggttgcagcattatatatggttggtcgtagacccagtgggcctcaaacaagttaggcctagtttggatactctagtaatgagtgggattgaagtggattaagatgtattgagagagtatttgatgtattggggatttacaccctctccaatcccttcaaaacactccaatcctaaagtatccaaactaggccttaggtgggccggcctctatccaaggcccagccttttacttggcgctgacaagacaaaagagaggagacgagaaagaaaacaaaccctagcccgctacccctgccccttctctcttcgtcgcgcctccgcctccgccgtcgtagcatcctcctccgccacctcggccatggcgacatccccagcgctcctcttcccttctccctcctcggcatcctctgcgccttcgtcggcgcgggtggaggcagtggtgcttttcaacgtctgcgacagctacgtgcggcgcccggaccaggcggaccgcgtcatcggcaccctcctcggttccctcctctccgacggcaccgtccacgtccgcaactcctatgtcgtcccccacagcgagtcagccgaccaggtcgccatcgacatcgactaccaccataacatgtacgcctcgcaccagaaggtgaaccccaaggaggtcatcgtcggatggttctcgactggatttggtgtttctggggggagtacgctcatccacgagttctattcaagggaagtacaaaaccccatccatcttacagtcgacactggcttcactaggggggaggcttccatcaaagcctacatctcatccaatctgtccctcagagatagtcaactcgctgcacaatttcaggaaatccctctggatctgaagatgattgaggcggaaaaggctggatttgagatcctgaaatctactatggtagagaagctccccaatgatctggaaggaatggagtcatcgatggggaagctttacattcttatcgatgagatctacaaatacgtcgatgatgttgtggaaggacgcgtggcacccgacaacagaattggaaggttcatctctgattcttttgcttcggtgccgaaattgtccccggctgctttcgataagcttttcaatgacaagattcaggataaccttgcgctggtatacctgtcaagcatcacaaggacacaaatcagcatcgccgagaagttgaacactgctgctcaagtgctgtaggtttggcggtgtggcatctggtttggacgtggatggcttgatgctatctgtgatgcttggcgtaagtgtgattggtgacagaaatgcatttttgtactcattattattattgctaaatgagagacctgatggaaagggttagccaacgatgagatcccataatgttgccagaatgccagtagagtggtggatggcgagatgtttctgtttggatagtattctgtgctccaggttgaatatttgtaatgctcgttggttttgtgtagcgacacattttacgtcgtcatttagaggtgtggtggcatgcaatgtgatgctgttgttgcaggaaaatcggttttgctgtcctgttatagcaagctttcctcctgcggccctgcttttcatttccctcttgattcttgcctctgcccttcgaaaccggtctaggccgggaacaatcacgtcatcccatgttatgtgtctagcctgaacgaaccgtccgctactctttttttattataatataagataatgataagaagctattcaaaat

SEQ ID NO: 57599 - DNA, 3050 bp, Zea Mays
acaccgcacacccttgcttgtctccaggcgtacttgcgtttagcgtctcttccctgctgccatctctgtccggagggcaagccatggcggcgggcggggacggcgtcgctcgccaggcggagctccgccggatcgagggcaacatctgcttcaagaaggcgcgcctcggcgccgccatcgactgctacaccgaggcaattgcgctctgccccgacgtcgccgtctactggatcaatcgggccctgtgccatttcaagcgcaaggagtgggccaaggtcgaagaggacagcaggagggctcttgcgcttgattacactttagtcaaggtcacattcttgtttcttctttcgtctcaaaactaaagcgccgacttcagttacctctacattatgggcactatctgctggggtgtgcgctactcgagaaggaagaatctgctcttgctatcaaggaattcgaaaaggctctaactctcttaaagtctgtggattcaacgtatgaaatggctgaggacatttggcaggtccttgcaaaggcaaaatacttagattgggagaagcattccactgaacgactatggaggatggaaagtttgaaggaagcttgtgaaactgctctgcaggagcatcactttctaactggtacacttgaggaagactccaacaggtcagacaacgagtattcagagcaaattaaactactatcagaggtcttcagccaagcgacagtcgccgatacaccaacagatgtgcccgattacctttgctgtcagataacattcgagatcttccgagacccagtgatcacaccgagtggtgtaacatatgagagggctgtacttgttgaacatctccacaaggtgtgcccttccgctgacgtgaagctgtttactttttgttggcaatttcgacccggtgacgcgagaacctctgaaggagcatcagctggttccgaatctggccatcaaggaagcagtgcaggcctacctgaaagagcacagctgggcccacaagttgaactaattggatgccgtgtgctttgctgactgcagatgctgataaatcggggatggcctgttattagagttagattttatgttgtgttggaatgagattgattggatagctcgattcatcgttcttagtattgattgggtaacttgacctgtaactgcaattctgcaaacactcattggatggatgtaatgaagcaagtgtacatgaaacattggttggttcagctcactgcatgtatatggttgcagcattatatatggttggtcgtagacccagtgggcctcaaacaagttaggcctagtttggatactctagtaatgagtgggattgaagtggattaagatgtattgagagagtatttgatgtattggggatttacaccctctccaatcccttcaaaacactccaatcctaaagtatccaaactaggccttaggtgggccggcctctatccaaggcccagccttttacttggcgctgacaagacaaaagagaggagacgagaaagaaaacaaaccctagcccgctacccctgccccttctctcttcgtcgcgcctccgcctccgccgtcgtagcatcctcctccgccacctcggccatggcgacatccccagcgctcctcttcccttctccctcctcggcatcctctgcgccttcgtcggcgcgggtggaggcagtggtgcttttcaacgtctgcgacagctacgtgcggcgcccggaccaggcggaccgcgtcatcggcaccctcctcggttccctcctctccgacggcaccgtccacgtccgcaactcctatgtcgtcccccacagcgagtcagccgaccaggtcgccatcgacatcgactaccaccataacatgtacgcctcgcaccagaaggtgaaccccaaggaggtcatcgtcggatggttctcgactggatttggtgtttctggggggagtacgctcatccacgagttctattcaagggaagtacaaaaccccatccatcttacagtcgacactggcttcactaggggggaggcttccatcaaagcctacatctcatccaatctgtccctcagagatagtcaactcgctgcacaatttcaggaaatccctctggatctgaagatgattgaggcggaaaaggctggatttgagatcctgaaatctactatggtagagaagctccccaatgatctggaaggaatggagtcatcgatggggaagctttacattcttatcgatgagatctacaaatacgtcgatgatgttgtggaaggacgcgtggcacccgacaacagaattggaaggttcatctctgattcttttgcttcggtgccgaaattgtccccggctgctttcgataagcttttcaatgacaagattcaggataaccttgcgctggtatacctgtcaagcatcacaaggacacaaatcagcatcgccgagaagttgaacactgctgctcaagtgctgtaggtttggcggtgtggcatctggtttggacgtggatggcttgatgctatctgtgatgcttggcgtaagtgtgattggtgacagaaatgcatttttgtactcattattattattgctaaatgagagacctgatggaaagggttagccaacgatgagatcccataatgttgccagaatgccagtagagtggtggatggcgagatgtttctgtttggatagtattctgtgctccaggttgaatatttgtaatgctcgttggttttgtgtagcgacacatcggcaatgtggagcaatgaagagatttgctccacattttacgtcgtcatttagaggtgtggtggcatgcaatgtgatgctgttgttgcaggaaaatcggttttgctgtcctgttatagcaagctttcctcctgcggccctgcttttcatttccctcttgattcttgcctctgcccttcgaaaccggtctaggccgggaacaatcacgtcatcccatgttatgtgtctagcctgaacgaaccgtccgctactctttttttattataatataagataatgataagaagctattcaaaat

SEQ ID NO: 57600 - DNA, 2851 bp, Zea Mays
acaccgcacacccttgcttgtctccaggcgtacttgcgtttagcgtctcttccctgctgccatctctgtccggagggcaagccatggcggcgggcggggacggcgtcgctcgccaggcggagctccgccggatcgagggcaacatctgcttcaagaaggcgcgcctcggcgccgccatcgactgctacaccgaggcaattgcgctctgccccgacgtcgccgtctactggatcaatcgggccctgtgccatttcaagcgcaaggagtgggccaaggtcgaagaggacagcaggagggctcttgcgcttgattacactttagtcaaggggcactatctgctggggtgtgcgctactcgagaaggaagaatctgctcttgctatcaaggaattcgaaaagggaagcttgtgaaactgctctgcaggagcatcactttctaactggtacacttgaggaagactccaacaggtcagacaacgagtattcagagcaaattaaactactatcagaggtcttcagccaagcgacagtcgccgatacaccaacagatgtgcccgattacctttgctgtcagataacattcgagatcttccgagacccagtgatcacaccgagtggtgtaacatatgagagggctgtacttgttgaacatctccacaaggtgtgcccttccgctgacgtgaagctgtttactttttgttggcaatttcgacccggtgacgcgagaacctctgaaggagcatcagctggttccgaatctggccatcaaggaagcagtgcaggcctacctgaaagagcacagctgggcccacaagttgaactaattggatgccgtgtgctttgctgactgcagatgctgataaatcggggatggcctgttattagagttagattttatgttgtgttggaatgagattgattggatagctcgattcatcgttcttagtattgattgggtaacttgacctgtaactgcaattctgcaaacactcattggatggatgtaatgaagcaagtgtacatgaaacattggttggttcagctcactgcatgtatatggttgcagcattatatatggttggtcgtagacccagtgggcctcaaacaagttaggcctagtttggatactctagtaatgagtgggattgaagtggattaagatgtattgagagagtatttgatgtattggggatttacaccctctccaatcccttcaaaacactccaatcctaaagtatccaaactaggccttaggtgggccggcctctatccaaggcccagccttttacttggcgctgacaagacaaaagagaggagacgagaaagaaaacaaaccctagcccgctacccctgccccttctctcttcgtcgcgcctccgcctccgccgtcgtagcatcctcctccgccacctcggccatggcgacatccccagcgctcctcttcccttctccctcctcggcatcctctgcgccttcgtcggcgcgggtggaggcagtggtgcttttcaacgtctgcgacagctacgtgcggcgcccggaccaggcggaccgcgtcatcggcaccctcctcggttccctcctctccgacggcaccgtccacgtccgcaactcctatgtcgtcccccacagcgagtcagccgaccaggtcgccatcgacatcgactaccaccataacatgtacgcctcgcaccagaaggtgaaccccaaggaggtcatcgtcggatggttctcgactggatttggtgtttctggggggagtacgctcatccacgagttctattcaagggaagtacaaaaccccatccatcttacagtcgacactggcttcactaggggggaggcttccatcaaagcctacatctcatccaatctgtccctcagagatagtcaactcgctgcacaatttcaggaaatccctctggatctgaagatgattgaggcggaaaaggctggatttgagatcctgaaatctactatggtagagaagctccccaatgatctggaaggaatggagtcatcgatggggaagctttacattcttatcgatgagatctacaaatacgtcgatgatgttgtggaaggacgcgtggcacccgacaacagaattggaaggttcatctctgattcttttgcttcggtgccgaaattgtccccggctgctttcgataagcttttcaatgacaagattcaggataaccttgcgctggtatacctgtcaagcatcacaaggacacaaatcagcatcgccgagaagttgaacactgctgctcaagtgctgtaggtttggcggtgtggcatctggtttggacgtggatggcttgatgctatctgtgatgcttggcgtaagtgtgattggtgacagaaatgcatttttgtactcattattattattgctaaatgagagacctgatggaaagggttagccaacgatgagatcccataatgttgccagaatgccagtagagtggtggatggcgagatgtttctgtttggatagtattctgtgctccaggttgaatatttgtaatgctcgttggttttgtgtagcgacacatcggcaatgtggagcaatgaagagatttgctccacattttacgtcgtcatttagaggtgtggtggcatgcaatgtgatgctgttgttgcaggaaaatcggttttgctgtcctgttatagcaagctttcctcctgcggccctgcttttcatttccctcttgattcttgcctctgcccttcgaaaccggtctaggccgggaacaatcacgtcatcccatgttatgtgtctagcctgaacgaaccgtccgctactctttttttattataatataagataatgataagaagctattcaaaat

SEQ ID NO: 57601 - DNA, 2931 bp, Zea Mays
acaccgcacacccttgcttgtctccaggcgtacttgcgtttagcgtctcttccctgctgccatctctgtccggagggcaagccatggcggcgggcggggacggcgtcgctcgccaggcggagctccgccggatcgagggcaacatctgcttcaagaaggcgcgcctcggcgccgccatcgactgctacaccgaggcaattgcgctctgccccgacgtcgccgtctactggatcaatcgggccctgtgccatttcaagcgcaaggagtgggccaaggtcgaagaggacagcaggagggctcttgcgcttgattacactttagtcaaggggcactatctgctggggtgtgcgctactcgagaaggaagaatctgctcttgctatcaaggaattcgaaaaggctctaactctcttaaagtctgtggattcaacgtatgaaatggctgaggacatttggcaggtccttgcaaaggcaaaatacttagattgggagaagcattccactgaacgactatggaggatggaaagtttgaaggaagcttgtgaaactgctctgcaggagcatcactttctaactggtacacttgaggaagactccaacaggtcagacaacgagtattcagagcaaattaaactactatcagaggtcttcagccaagcgacagtcgccgatacaccaacagatgtgcccgattacctttgctgtcagataacattcgagatcttccgagacccagtgatcacaccgagtggtgtaacatatgagagggctgtacttgttgaacatctccacaaggttggcaatttcgacccggtgacgcgagaacctctgaaggagcatcagctggttccgaatctggccatcaaggaagcagtgcaggcctacctgaaagagcacagctgggcccacaagttgaactaattggatgccgtgtgctttgctgactgcagatgctgataaatcggggatggcctgttattagagttagattttatgttgtgttggaatgagattgattggatagctcgattcatcgttcttagtattgattgggtaacttgacctgtaactgcaattctgcaaacactcattggatggatgtaatgaagcaagtgtacatgaaacattggttggttcagctcactgcatgtatatggttgcagcattatatatggttggtcgtagacccagtgggcctcaaacaagttaggcctagtttggatactctagtaatgagtgggattgaagtggattaagatgtattgagagagtatttgatgtattggggatttacaccctctccaatcccttcaaaacactccaatcctaaagtatccaaactaggccttaggtgggccggcctctatccaaggcccagccttttacttggcgctgacaagacaaaagagaggagacgagaaagaaaacaaaccctagcccgctacccctgccccttctctcttcgtcgcgcctccgcctccgccgtcgtagcatcctcctccgccacctcggccatggcgacatccccagcgctcctcttcccttctccctcctcggcatcctctgcgccttcgtcggcgcgggtggaggcagtggtgcttttcaacgtctgcgacagctacgtgcggcgcccggaccaggcggaccgcgtcatcggcaccctcctcggttccctcctctccgacggcaccgtccacgtccgcaactcctatgtcgtcccccacagcgagtcagccgaccaggtcgccatcgacatcgactaccaccataacatgtacgcctcgcaccagaaggtgaaccccaaggaggtcatcgtcggatggttctcgactggatttggtgtttctggggggagtacgctcatccacgagttctattcaagggaagtacaaaaccccatccatcttacagtcgacactggcttcactaggggggaggcttccatcaaagcctacatctcatccaatctgtccctcagagatagtcaactcgctgcacaatttcaggaaatccctctggatctgaagatgattgaggcggaaaaggctggatttgagatcctgaaatctactatggtagagaagctccccaatgatctggaaggaatggagtcatcgatggggaagctttacattcttatcgatgagatctacaaatacgtcgatgatgttgtggaaggacgcgtggcacccgacaacagaattggaaggttcatctctgattcttttgcttcggtgccgaaattgtccccggctgctttcgataagacaggataaccttgcgctggtatacctgtcaagcatcacaaggacacaaatcagcatcgccgagaagttgaacactgctgctcaagtgctgtaggtttggcggtgtggcatctggtttggacgtggatggcttgatgctatctgtgatgcttggcgtaagtgtgattggtgacagaaatgcatttttgtactcattattattattgctaaatgagagacctgatggaaagggttagccaacgatgagatcccataatgttgccagaatgccagtagagtggtggatggcgagatgtttctgtttggatagtattctgtgctccaggttgaatatttgtaatgctcgttggttttgtgtagcgacacatcggcaatgtggagcaatgaagagatttgctccacattttacgtcgtcatttagaggtgtggtggcatgcaatgtgatgctgttgttgcaggaaaatcggttttgctgtcctgttatagcaagctttcctcctgcggccctgcttttcatttccctcttgattcttgcctctgcccttcgaaaccggtctaggccgggaacaatcacgtcatcccatgttatgtgtctagcctgaacgaaccgtccgctactctttttttattataatataagataatgataagaagctattcaaaat

SEQ ID NO: 57602 - DNA, 2879 bp, Zea Mays
acaccgcacacccttgcttgtctccaggcgtacttgcgtttagcgtctcttccctgctgccatctctgtccggagggcaagccatggcggcgggcggggacggcgtcgctcgccaggcggagctccgccggatcgagggcaacatctgcttcaagaaggcgcgcctcggcgccgccatcgactgctacaccgaggcaattgcgctctgccccgacgtcgccgtctactggatcaatcgggccctgtgccatttcaagcgcaaggagtgggccaaggtcgaagaggacagcaggagggctcttgcgcttgattacactttagtcaaggtcacattcttgtttcttctttcgtctcaaaactaaagcgccgacttcagttacctctacattatgggcactatctgctggggtgtgcgctactcgagaaggaagaatctgctcttgctatcaaggaattcgaaaagggaagcttgtgaaactgctctgcaggagcatcactttctaactggtacacttgaggaagactccaacaggtcagacaacgagtattcagagcaaattaaactactatcagaggtcttcagccaagcgacagtcgccgatacaccaacagatgtgcccgattacctttgctgtcagataacattcgagatcttccgagacccagtgatcacaccgagtggtgtaacatatgagagggctgtacttgttgaacatctccacaaggttggcaatttcgacccggtgacgcgagaacctctgaaggagcatcagctggttccgaatctggccatcaaggaagcagtgcaggcctacctgaaagagcacagctgggcccacaagttgaactaattggatgccgtgtgctttgctgactgcagatgctgataaatcggggatggcctgttattagagttagattttatgttgtgttggaatgagattgattggatagctcgattcatcgttcttagtattgattgggtaacttgacctgtaactgcaattctgcaaacactcattggatggatgtaatgaagcaagtgtacatgaaacattggttggttcagctcactgcatgtatatggttgcagcattatatatggttggtcgtagacccagtgggcctcaaacaagttaggcctagtttggatactctagtaatgagtgggattgaagtggattaagatgtattgagagagtatttgatgtattggggatttacaccctctccaatcccttcaaaacactccaatcctaaagtatccaaactaggccttaggtgggccggcctctatccaaggcccagccttttacttggcgctgacaagacaaaagagaggagacgagaaagaaaacaaaccctagcccgctacccctgccccttctctcttcgtcgcgcctccgcctccgccgtcgtagcatcctcctccgccacctcggccatggcgacatccccagcgctcctcttcccttctccctcctcggcatcctctgcgccttcgtcggcgcgggtggaggcagtggtgcttttcaacgtctgcgacagctacgtgcggcgcccggaccaggcggaccgcgtcatcggcaccctcctcggttccctcctctccgacggcaccgtccacgtccgcaactcctatgtcgtcccccacagcgagtcagccgaccaggtcgccatcgacatcgactaccaccataacatgtacgcctcgcaccagaaggtgaaccccaaggaggtcatcgtcggatggttctcgactggatttggtgtttctggggggagtacgctcatccacgagttctattcaagggaagtacaaaaccccatccatcttacagtcgacactggcttcactaggggggaggcttccatcaaagcctacatctcatccaatctgtccctcagagatagtcaactcgctgcacaatttcaggaaatccctctggatctgaagatgattgaggcggaaaaggctggatttgagatcctgaaatctactatggtagagaagctccccaatgatctggaaggaatggagtcatcgatggggaagctttacattcttatcgatgagatctacaaatacgtcgatgatgttgtggaaggacgcgtggcacccgacaacagaattggaaggttcatctctgattcttttgcttcggtgccgaaattgtccccggctgctttcgataagcttttcaatgacaagattcaggataaccttgcgctggtatacctgtcaagcatcacaaggacacaaatcagcatcgccgagaagttgaacactgctgctcaagtgctgtaggtttggcggtgtggcatctggtttggacgtggatggcttgatgctatctgtgatgcttggcgtaagtgtgattggtgacagaaatgcatttttgtactcattattattattgctaaatgagagacctgatggaaagggttagccaacgatgagatcccataatgttgccagaatgccagtagagtggtggatggcgagatgtttctgtttggatagtattctgtgctccaggttgaatatttgtaatgctcgttggttttgtgtagcgacacatcggcaatgtggagcaatgaagagatttgctccacattttacgtcgtcatttagaggtgtggtggcatgcaatgtgatgctgttgttgcaggaaaatcggttttgctgtcctgttatagcaagctttcctcctgcggccctgcttttcatttccctcttgattcttgcctctgcccttcgaaaccggtctaggccgggaacaatcacgtcatcccatgttatgtgtctagcctgaacgaaccgtccgctactctttttttattataatataagataatgataagaagctattcaaaat

SEQ ID NO: 57603 - DNA, 2883 bp, Zea Mays
gtctcttgcacgcttgatgctctaactctcttaaagtctgtggattcaacgtatgaaatggctgaggacatttggcaggtccttgcaaaggcaaaatacttagattgggagaagcattccactgaacgactatggaggatggaaagtttgaatctcttaacagaagcgtatccccgtggacatgcagggaagcttgtgaaactgctctgcaggagcatcactttctaactggtacacttgaggaagactccaacaggtcagacaacgagtattcagagcaaattaaactactatcagaggtcttcagccaagcgacagtcgccgatacaccaacagatgtgcccgattacctttgctgtcagataacattcgagatcttccgagacccagtgatcacaccgagtggtgtaacatatgagagggctgtacttgttgaacatctccacaaggttggcaatttcgacccggtgacgcgagaacctctgaaggagcatcagctggttccgaatctggccatcaaggaagcagtgcaggcctacctgaaagagcacagctgggcccacaagttgaactaattggatgccgtgtgctttgctgactgcagatgctgataaatcggggatggcctgttattagagttagattttatgttgtgttggaatgagattgattggatagctcgattcatcgttcttagtattgattgggtaacttgacctgtaactgcaattctgcaaacactcattggatggatgtaatgaagcaagtgtacatgaaacattggttggttcagctcactgcatgtatatggttgcagcattatatatggttggtcgtagacccagtgggcctcaaacaagttaggcctagtttggatactctagtaatgagtgggattgaagtggattaagatgtattgagagagtatttgatgtattggggatttacaccctctccaatcccttcaaaacactccaatcctaaagtatccaaactaggccttaggtgggccggcctctatccaaggcccagccttttacttggcgctgacaagacaaaagagaggagacgagaaagaaaacaaaccctagcccgctacccctgccccttctctcttcgtcgcgcctccgcctccgccgtcgtagcatcctcctccgccacctcggccatggcgacatccccagcgctcctcttcccttctccctcctcggcatcctctgcgccttcgtcggcgcgggtggaggcagtggtgcttttcaacgtctgcgacagctacgtgcggcgcccggaccaggcggaccgcgtcatcggcaccctcctcggttccctcctctccgacggcaccgtccacgtccgcaactcctatgtcgtcccccacagcgagtcagccgaccaggtcgccatcgacatcgactaccaccataacatgtacgcctcgcaccagaaggtgaaccccaaggaggtcatcgtcggatggttctcgactggatttggtgtttctggggggagtacgctcatccacgagttctattcaagggaagtacaaaaccccatccatcttacagtcgacactggcttcactaggggggaggcttccatcaaagcctacatctcatccaatctgtccctcagagatagtcaactcgctgcacaatttcaggaaatccctctggatctgaagatgattgaggcggaaaaggctggatgtatgttaccggtgaatagcagatatataccttctatctgggggagatctcattttgcacctgtattagttggtccttctgttactgtgttgaacttctcaggaatagtcacatcagtagttggatttagtaataatgtctctgtttctatttctgtttctgtattaatttctcgtagacaactgatgtttgtaagaaccatattttgctctgctacatcctcagttttagtagcagaacattttgaagcttccatcactcttactaccttctgttacagttgagatcctgaaatctactatggtagagaagctccccaatgatctggaaggaatggagtcatcgatggggaagctttacattcttatcgatgagatctacaaatacgtcgatgatgttgtggaaggacgcgtggcacccgacaacagaattggaaggttcatctctgattcttttgcttcggtgccgaaattgtccccggctgctttcgataagcttttcaatgacaagattcaggataaccttgcgctggtatacctgtcaagcatcacaaggacacaaatcagcatcgccgagaagttgaacactgctgctcaagtgctgtaggtttggcggtgtggcatctggtttggacgtggatggcttgatgctatctgtgatgcttggcgtaagtgtgattggtgacagaaatgcatttttgtactcattattattattgctaaatgagagacctgatggaaagggttagccaacgatgagatcccataatgttgccagaatgccagtagagtggtggatggcgagatgtttctgtttggatagtattctgtgctccaggttgaatatttgtaatgctcgttggttttgtgtagcgacacatcggcaatgtggagcaatgaagagatttgctccacattttacgtcgtcatttagaggtgtggtggcatgcaatgtgatgctgttgttgcaggaaaatcggttttgctgtcctgttatagcaagctttcctcctgcggccctgcttttcatttccctcttgattcttgcctctgcccttcgaaaccggtctaggccgggaacaatcacgtcatcccatgttatgtgtctagcctgaacgaaccgtccgctactctttttttattataatataagataatgataagaagctattcaaaat

SEQ ID NO: 57604 - DNA, 5580 bp, Zea Mays
ataatttagacaaatctaattaagtttatatatttatatatgtaatatatttatatattatcttaaatcatatgagagagatgattatatactacatttatgttatagaggtgcaagtagaagaatgtgctataagttgtacatcgaaaaaatagcatgtaaatctatagaatcgatttccatctctcaccccatgaatttgagttaagcttatatgataactttggaaagtggtggaatgtcatattctaaaaaaatagtttatttcattagtaagattcaaattcttcgaaatgaaaggaaacaaacgggacctaattgtatttatgatctagaagcttagagttagataatgctgtttttatatttgaaaaaccaatccaattgttcagggatgaaaatgttccgtccaggggttagttgcaaccgcgggacagcgacagcagcaacacgattgcttgctttgttttagcgatttttttttctgtggcgttccaattccatcgaagacagagacggaggcgtttcttgttgtggctcccctctcctttcctcgtgttcctcgcggcaggaacaggaacacaaggacctccagtccaaggagattagaggaaggcgagagcattattctcatatcatttgtaaaataaataaatgtacttacttcgaccacgttggttcatcttcattgttgttatcatcatcatcctctgttcctgtgatggactgcattctctctctctctcgtctgcacccatcccgccatcattattgttccccacccaaccaaaacagcacaaaaacaacgggaggagaggagagggaggcagcagctgcctgaaccagccatttctctctcttgtctagtacttcctgccactgctagtagcacagtactacctctctctctcatcagtcaaatcaatcagagtcggaatcgagttgtgtagttggaaacgaaaaagaaacaacaagacaagcatctgctgcctcgtctcctcgggctccggccggcgacccgccctcgcccgtcgcccccgccgaggaagcatcgcatcgtacagcagcagtacatgcgacctagagagagagaaagagatagtccagaggaagcaaggaaggagtacgtcgtcgacgtcgatctattcctcctcctcctcctcctccgatccgtgaatccaaagtccagcacagccgcccgctgattaatcttggggggctaccggtccaccatacctcataagccaatagcaagcaaagcattcaagaaccggatttcccttgttgtttcggaagcagttaatggtcgagaggggccacaacctccagccgttgcagttcttgcgttgagttggattgggttgccaagccccgccaaataaaacaaaagggcttcctgtaatcctgcgctgcaccgatggtgatagcgtcgggagccgttgacaggggccacctgtccccgattgctcccctgtcagagtcgccgtcgtcctcatcattcttctcccaggatctcgtccccactgagaggcaagttggattctggaaatcgtcagagtcaatggtcgatcacaaagggagcaagcctattttcacttctccactcgataaggcccatcccataggctcaagtcctgcaggtggtctggaacatcaacgaggtcaagccttcaaggggaagctgggcatgcttaaccttggtaatttggtggaccaacaagaaaatgctcctggcataccttcgatttcttggggtgatgtcctcagtacctccaggtccagtcttggcttgtctacaggagggacggcttttgttgaaccacccagtgctgatcaacatgtgcaagactatggagactgcttttcatccagctccttcactgaagtcttcggtagaaaatcagcaagattgatggcaagtggcgtttatggccaatcagctggtgcaaatgattccggttatgacggagatgaacctctagggtccatgaaagaaatggaagctcaaactattggtgatctccttcctgatgacgatgacctgatgtcgggaattattgatggctttgaatacaccggcttgtctaaccaggatgatgccgatgaagatatattctacactggaggaggtttggagctagagcatgatgattccaacaacgtcgacaaatttcgtgatgtgtccttcaagattcaactttctgagaagcactctatcgataaacaccattccagagctcttattgtaaaaaatattaatccaggcatcgagggttctgatttaagggctctgtttcagcaatatggggacgtacagacattcgacacatcctgcaagagccatggaattgttacagtgtcttactatgacattagagctgcacaggacgcagtgagagcagtccataacaaacctctggggctgatgaaacttgatgttcaattttcccttcctaaggaaaatgttccaaacaaagatcccaacaatggaacactggtggtatctcttattgactcttccatctccagccatgatcttctccaaaaatttagtgtttatggcgatgtcaaggagatttacaagtctcctacaagctgcaataagaaatttgtagaattctatgatatcagagcagcacaagaagcactgaatgacctcaacaagggtgaaatatcatgctcacaaatcaaagttgagcatagcttttctggaggagcaggatcttgcttcgcagagcaatattcaggagaacagaagcaaaatgccgtagctcaccaacttaagaactctccacctgggaccattgggaagttagatactaagagttgggacagcagcactgttcataatttatattctccagttagaccgcaacacgataaatcacaacatggcttctctgtgaatcctcctcagaagttgtcatcgcctatcagaattgaatctacacagcagcatagtaatcaaactgcttttggtgaacatagtggatctcttggtcatggcaactttggaggtgggctgcaagccttccacccgcactcactgccagagtgtcacaatggtatttgcaatggctataactccatgacattaaatgcaaggaattctaacttcagatttactgaaggaatagactacaataatcacaaagttgaccacagtgaccttcatggtcattcctctgatcaaaatgaagcaattagagttgctggaattggaagttgcccccttcatggacatcactatacctggagtaactcaaatggttttcctcaaagcccctctgctccaatgatgtggcctaactttcagcaaccagtgcatatgcattgctaccctgctatgcctcctcacatccggcgcagtgctgcccatcctatggaccaacatcacttgggttcagctccaaacagtgttggtggttttgcaaatgcacactcttttcatccaggatcccttgaaagcgtagggtttcctggcagccctcagctgtatccatcagatctctctgtatttgcatctgccagaggaaattacagggagaccatgttctctgccataagtgccgggtttccatcaattcagcaaattcttcatgcgaccaacggaaggaatcctatgatgcacgtctccacctcatatgacgccactaatgatcgcataaggagccgcaggcatgatggaaatgctgcccagtctgaaaacaagaagcagtttgagctggaccttgaccgcatagctaagggtgaagactcgcgcaccacactgatgataaaaaacattcctaacaagtacaccagtaagctgcttttggctgtcattgatgagaatcaccgaggaacttatgatttcatctaccttccaattgattttaagaataaatgtaacgtgggatatgcattcatcaatatgacggatccacagcagatagttccattttacaagacattcaacggcaagaaatgggagaagttcaatagtgagaaagtggcatcacttgcgtacgccagaatccagggaaggaacgctttgattgctcatttccagaattctagcctgatgaatgaagagaaatggtgccgccctatgcttttccacaaagatggcccgaacgcaggagaccaggaaccattccctgtgggtaacaatgttcgttctcggtccgggaggaacagaccacttagcagtggttcggagactaccaaagaggcaagtccatcaacctctcctaactgaagagaagccggctcccgatattccaactcaggacaggcaggcggtatttgctcactaactggaggctgaagggcatgtaataaatcatccccagttttgctgcttctttttcttttggtcctcgtcagcaaggtgacctgacttgctgagtgtgactagctaacgagaattctgcactgcatgagcctgctgaagattcaccttaaagtaactatgccttggttttgccataccattgacgtcaacggctacaggtaatggagaagacctggagtggtagagggaggtgtgtttcaggcgggtgaaaattcaagttgtacagttgaactcaccaggattggaaaatggtcatcaattcaaatttgagttgtttttcttagggttcttcttgctatgtttgatctcgtttatgtgcgtgtcatgtgtccacggtgtgagcccaaatgtttgaatgccttgtctttgtgcaatttctctcaaacctcagattctggtgtgctggttcattccatgtcctcttttgtttttcaaattcaagatttattacatcataaacatgttacaaagatggggggtcatgttgccccgaacaatccaagtttcaaaacacatgctagatattacaggttggagaatgaagcccctagagaaaaggcatggatttggggtagttgcccgtcttgctttttttttgcaagaacatcagctatcttgtttctctctaggaacctgttgtgccaaaatcatggcgtaagccaacacctggctgccagttaacaaaattgcatctcgcagatcgagtgcagcagctaccttgaaattaaataggaattgcatcctggaagaaagaagcatggggaatacctgtagcaggtcggtctcccccaaaccaaaagaaatggctgcaacactgcgcacagcaaaggttccacacccaaaaaagagggcgcccagcacccactaccttcagcatgctctgccacggcttctggtcctcctcgctggactgtcatcagctcccgtggcattcacactgctccgagtcaccctgcggccgctgctcacagcagggctgccgttgccgtcatcatgcatatcaccactcttcctggtccgtttcataggagtgacgcacacatcaacctcttccactgcagcactgctcttcaccctcttgccaccagtctcagcatcagccttgtgcttcgtctgtttcgcagcagcatcttcatcagccgtgcgcttcttcggctgtttcgcagcagcatcttcaactaacacatccaccacttcagccgcgcccatctttgactttttatcatcttttgcaccctccattt

SEQ ID NO: 57605 - DNA, 5386 bp, Zea Mays
ataatttagacaaatctaattaagtttatatatttatatatgtaatatatttatatattatcttaaatcatatgagagagatgattatatactacatttatgttatagaggtgcaagtagaagaatgtgctataagttgtacatcgaaaaaatagcatgtaaatctatagaatcgatttccatctctcaccccatgaatttgagttaagcttatatgataactttggaaagtggtggaatgtcatattctaaaaaaatagtttatttcattagtaagattcaaattcttcgaaatgaaaggaaacaaacgggacctaattgtatttatgatctagaagcttagagttagataatgctgtttttatatttgaaaaaccaatccaattgttcagggatgaaaatgttccgtccaggggttagttgcaaccgcgggacagcgacagcagcaacacgattgcttgctttgttttagcgatttttttttctgtggcgttccaattccatcgaagacagagacggaggcgtttcttgttgtggctcccctctcctttcctcgtgttcctcgcggcaggaacaggaacacaaggacctccagtccaaggagattagaggaaggcgagagcattattctcatatcatttgtaaaataaataaatgtacttacttcgaccacgttggttcatcttcattgttgttatcatcatcatcctctgttcctgtgatggactgcattctctctctctctcgtctgcacccatcccgccatcattattgttccccacccaaccaaaacagcacaaaaacaacgggaggagaggagagggaggcagcagctgcctgaaccagccatttctctctcttgtctagtacttcctgccactgctagtagcacagtactacctctctctctcatcagtcaaatcaatcagagtcggaatcgagttgtgtagttggaaacgaaaaagaaacaacaagacaagcatctgctgcctcgtctcctcgggctccggccggcgacccgccctcgcccgtcgcccccgccgaggaagcatcgcatcgtacagcagcagtacatgcgacctagagagagagaaagaggaagcagttaatggtcgagaggggccacaacctccagccgttgcagttcttgcgttgagttggattgggttgccaagccccgccaaataaaacaaaagggcttcctgtaatcctgcgctgcaccgatggtgatagcgtcgggagccgttgacaggggccacctgtccccgattgctcccctgtcagagtcgccgtcgtcctcatcattcttctcccaggatctcgtccccactgagaggcaagttggattctggaaatcgtcagagtcaatggtcgatcacaaagggagcaagcctattttcacttctccactcgataaggcccatcccataggctcaagtcctgcaggtggtctggaacatcaacgaggtcaagccttcaaggggaagctgggcatgcttaaccttggtaatttggtggaccaacaagaaaatgctcctggcataccttcgatttcttggggtgatgtcctcagtacctccaggtccagtcttggcttgtctacaggagggacggcttttgttgaaccacccagtgctgatcaacatgtgcaagactatggagactgcttttcatccagctccttcactgaagtcttcggtagaaaatcagcaagattgatggcaagtggcgtttatggccaatcagctggtgcaaatgattccggttatgacggagatgaacctctagggtccatgaaagaaatggaagctcaaactattggtgatctccttcctgatgacgatgacctgatgtcgggaattattgatggctttgaatacaccggcttgtctaaccaggatgatgccgatgaagatatattctacactggaggaggtttggagctagagcatgatgattccaacaacgtcgacaaatttcgtgatgtgtccttcaagattcaactttctgagaagcactctatcgataaacaccattccagagctcttattgtaaaaaatattaatccaggcatcgagggttctgatttaagggctctgtttcagcaatatggggacgtacagacattcgacacatcctgcaagagccatggaattgttacagtgtcttactatgacattagagctgcacaggacgcagtgagagcagtccataacaaacctctggggctgatgaaacttgatgttcaattttcccttcctaaggaaaatgttccaaacaaagatcccaacaatggaacactggtggtatctcttattgactcttccatctccagccatgatcttctccaaaaatttagtgtttatggcgatgtcaaggagatttacaagtctcctacaagctgcaataagaaatttgtagaattctatgatatcagagcagcacaagaagcactgaatgacctcaacaagggtgaaatatcatgctcacaaatcaaagttgagcatagcttttctggaggagcaggatcttgcttcgcagagcaatattcaggagaacagaagcaaaatgccgtagctcaccaacttaagaactctccacctgggaccattgggaagttagatactaagagttgggacagcagcactgttcataatttatattctccagttagaccgcaacacgataaatcacaacatggcttctctgtgaatcctcctcagaagttgtcatcgcctatcagaattgaatctacacagcagcatagtaatcaaactgcttttggtgaacatagtggatctcttggtcatggcaactttggaggtgggctgcaagccttccacccgcactcactgccagagtgtcacaatggtatttgcaatggctataactccatgacattaaatgcaaggaattctaacttcagatttactgaaggaatagactacaataatcacaaagttgaccacagtgaccttcatggtcattcctctgatcaaaatgaagcaattagagttgctggaattggaagttgcccccttcatggacatcactatacctggagtaactcaaatggttttcctcaaagcccctctgctccaatgatgtggcctaactttcagcaaccagtgcatatgcattgctaccctgctatgcctcctcacatccggcgcagtgctgcccatcctatggaccaacatcacttgggttcagctccaaacagtgttggtggttttgcaaatgcacactcttttcatccaggatcccttgaaagcgtagggtttcctggcagccctcagctgtatccatcagatctctctgtatttgcatctgccagaggaaattacagggagaccatgttctctgccataagtgccgggtttccatcaattcagcaaattcttcatgcgaccaacggaaggaatcctatgatgcacgtctccacctcatatgacgccactaatgatcgcataaggagccgcaggcatgatggaaatgctgcccagtctgaaaacaagaagcagtttgagctggaccttgaccgcatagctaagggtgaagactcgcgcaccacactgatgataaaaaacattcctaacaagtacaccagtaagctgcttttggctgtcattgatgagaatcaccgaggaacttatgatttcatctaccttccaattgattttaagaataaatgtaacgtgggatatgcattcatcaatatgacggatccacagcagatagttccattttacaagacattcaacggcaagaaatgggagaagttcaatagtgagaaagtggcatcacttgcgtacgccagaatccagggaaggaacgctttgattgctcatttccagaattctagcctgatgaatgaagagaaatggtgccgccctatgcttttccacaaagatggcccgaacgcaggagaccaggaaccattccctgtgggtaacaatgttcgttctcggtccgggaggaacagaccacttagcagtggttcggagactaccaaagaggcaagtccatcaacctctcctaactgaagagaagccggctcccgatattccaactcaggacaggcaggcggtatttgctcactaactggaggctgaagggcatgtaataaatcatccccagttttgctgcttctttttcttttggtcctcgtcagcaaggtgacctgacttgctgagtgtgactagctaacgagaattctgcactgcatgagcctgctgaagattcaccttaaagtaactatgccttggttttgccataccattgacgtcaacggctacaggtaatggagaagacctggagtggtagagggaggtgtgtttcaggcgggtgaaaattcaagttgtacagttgaactcaccaggattggaaaatggtcatcaattcaaatttgagttgtttttcttagggttcttcttgctatgtttgatctcgtttatgtgcgtgtcatgtgtccacggtgtgagcccaaatgtttgaatgccttgtctttgtgcaatttctctcaaacctcagattctggtgtgctggttcattccatgtcctcttttgtttttcaaattcaagatttattacatcataaacatgttacaaagatggggggtcatgttgccccgaacaatccaagtttcaaaacacatgctagatattacaggttggagaatgaagcccctagagaaaaggcatggatttggggtagttgcccgtcttgctttttttttgcaagaacatcagctatcttgtttctctctaggaacctgttgtgccaaaatcatggcgtaagccaacacctggctgccagttaacaaaattgcatctcgcagatcgagtgcagcagctaccttgaaattaaataggaattgcatcctggaagaaagaagcatggggaatacctgtagcaggtcggtctcccccaaaccaaaagaaatggctgcaacactgcgcacagcaaaggttccacacccaaaaaagagggcgcccagcacccactaccttcagcatgctctgccacggcttctggtcctcctcgctggactgtcatcagctcccgtggcattcacactgctccgagtcaccctgcggccgctgctcacagcagggctgccgttgccgtcatcatgcatatcaccactcttcctggtccgtttcataggagtgacgcacacatcaacctcttccactgcagcactgctcttcaccctcttgccaccagtctcagcatcagccttgtgcttcgtctgtttcgcagcagcatcttcatcagccgtgcgcttcttcggctgtttcgcagcagcatcttcaactaacacatccaccacttcagccgcgcccatctttgactttttatcatcttttgcaccctccattt

SEQ ID NO: 57606 - DNA, 4314 bp, Zea Mays
cccccaagcgaagctgaaggcggcggaaggaagcagttaatggtcgagaggggccacaacctccagccgttgcagttcttgcgttgagttggattgggttgccaagccccgccaaataaaacaaaagggcttcctgtaatcctgcgctgcaccgatggtgatagcgtcgggagccgttgacaggggccacctgtccccgattgctcccctgtcagagtcgccgtcgtcctcatcattcttctcccaggatctcgtccccactgagaggcaagttggattctggaaatcgtcagagtcaatggtcgatcacaaagggagcaagcctattttcacttctccactcgataaggcccatcccataggctcaagtcctgcaggtggtctggaacatcaacgaggtcaagccttcaaggggaagctgggcatgcttaaccttggtaatttggtggaccaacaagaaaatgctcctggcataccttcgatttcttggggtgatgtcctcagtacctccaggtccagtcttggcttgtctacaggagggacggcttttgttgaaccacccagtgctgatcaacatgtgcaagactatggagactgcttttcatccagctccttcactgaagtcttcggtagaaaatcaagattgatggcaagtggcgtttatggccaatcagctggtgcaaatgattccggttatgacggagatgaacctctagggtccatgaaagaaatggaagctcaaactattggtgatctccttcctgatgacgatgacctgatgtcgggaattattgatggctttgaatacaccggcttgtctaaccaggatgatgccgatgaagatatattctacactggaggaggtttggagctagagcatgatgattccaacaacgtcgacaaatttcgtgatgtgtccttcaagattcaactttctgagaagcactctatcgataaacaccattccagagctcttattgtaaaaaatattaatccaggcatcgagggttctgatttaagggctctgtttcagcaatatggggacgtacagacattcgacacatcctgcaagagccatggaattgttacagtgtcttactatgacattagagctgcacaggacgcagtgagagcagtccataacaaacctctggggctgatgaaacttgatgttcaattttcccttcctaaggaaaatgttccaaacaaagatcccaacaatggaacactggtggtatctcttattgactcttccatctccagccatgatcttctccaaaaatttagtgtttatggcgatgtcaaggagatttacaagtctcctacaagctgcaataagaaatttgtagaattctatgatatcagagcagcacaagaagcactgaatgacctcaacaagggtgaaatatcatgctcacaaatcaaagttgagcatagcttttctggaggagcaggatcttgcttcgcagagcaatattcaggagaacagaagcaaaatgccgtagctcaccaacttaagaactctccacctgggaccattgggaagttagatactaagagttgggacagcagcactgttcataatttatattctccagttagaccgcaacacgataaatcacaacatggcttctctgtgaatcctcctcagaagttgtcatcgcctatcagaattgaatctacacagcagcatagtaatcaaactgcttttggtgaacatagtggatctcttggtcatggcaactttggaggtgggctgcaagccttccacccgcactcactgccagagtgtcacaatggtatttgcaatggctataactccatgacattaaatgcaaggaattctaacttcagatttactgaaggaatagactacaataatcacaaagttgaccacagtgaccttcatggtcattcctctgatcaaaatgaagcaattagagttgctggaattggaagttgcccccttcatggacatcactatacctggagtaactcaaatggttttcctcaaagcccctctgctccaatgatgtggcctaactttcagcaaccagtgcatatgcattgctaccctgctatgcctcctcacatccggcgcagtgctgcccatcctatggaccaacatcacttgggttcagctccaaacagtgttggtggttttgcaaatgcacactcttttcatccaggatcccttgaaagcgtagggtttcctggcagccctcagctgtatccatcagatctctctgtatttgcatctgccagaggaaattacagggagaccatgttctctgccataagtgccgggtttccatcaattcagcaaattcttcatgcgaccaacggaaggaatcctatgatgcacgtctccacctcatatgacgccactaatgatcgcataaggagccgcaggcatgatggaaatgctgcccagtctgaaaacaagaagcagtttgagctggaccttgaccgcatagctaagggtgaagactcgcgcaccacactgatgataaaaaacattcctaacaagtacaccagtaagctgcttttggctgtcattgatgagaatcaccgaggaacttatgatttcatctaccttccaattgattttaagaataaatgtaacgtgggatatgcattcatcaatatgacggatccacagcagatagttccattttacaagacattcaacggcaagaaatgggagaagttcaatagtgagaaagtggcatcacttgcgtacgccagaatccagggaaggaacgctttgattgctcatttccagaattctagcctgatgaatgaagagaaatggtgccgccctatgcttttccacaaagatggcccgaacgcaggagaccaggaaccattccctgtgggtaacaatgttcgttctcggtccgggaggaacagaccacttagcagtggttcggagactaccaaagaggcaagtccatcaacctctcctaactgaagagaagccggctcccgatattccaactcaggacaggcaggcggtatttgctcactaactggaggctgaagggcatgtaataaatcatccccagttttgctgcttctttttcttttggtcctcgtcagcaaggtgacctgacttgctgagtgtgactagctaacgagaattctgcactgcatgagcctgctgaagattcaccttaaagtaactatgccttggttttgccataccattgacgtcaacggctacaggtaatggagaagacctggagtggtagagggaggtgtgtttcaggcgggtgaaaattcaagttgtacagttgaactcaccaggattggaaaatggtcatcaattcaaatttgagttgtttttcttagggttcttcttgctatgtttgatctcgtttatgtgcgtgtcatgtgtccacggtgtgagcccaaatgtttgaatgccttgtctttgtgcaatttctctcaaacctcagattctggtgtgctggttcattccatgtcctcttttgtttttcaaattcaagatttattacatcataaacatgttacaaagatggggggtcatgttgccccgaacaatccaagtttcaaaacacatgctagatattacaggttggagaatgaagcccctagagaaaaggcatggatttggggtagttgcccgtcttgctttttttttgcaagaacatcagctatcttgtttctctctaggaacctgttgtgccaaaatcatggcgtaagccaacacctggctgccagttaacaaaattgcatctcgcagatcgagtgcagcagctaccttgaaattaaataggaattgcatcctggaagaaagaagcatggggaatacctgtagcaggtcggtctcccccaaaccaaaagaaatggctgcaacactgcgcacagcaaaggttccacacccaaaaaagagggcgcccagcacccactaccttcagcatgctctgccacggcttctggtcctcctcgctggactgtcatcagctcccgtggcattcacactgctccgagtcaccctgcggccgctgctcacagcagggctgccgttgccgtcatcatgcatatcaccactcttcctggtccgtttcataggagtgacgcacacatcaacctcttccactgcagcactgctcttcaccctcttgccaccagtctcagcatcagccttgtgcttcgtctgtttcgcagcagcatcttcatcagccgtgcgcttcttcggctgtttcgcagcagcatcttcaactaacacatccaccacttcagccgcgcccatctttgactttttatcatcttttgcaccctccattt

SEQ ID NO: 57607 - DNA, 4030 bp, Zea Mays
cctaatccattggcgtccaacttttaaggagcaagcctattttcacttctccactcgataaggcccatcccataggctcaagtcctgcaggtggtctggaacatcaacgaggtcaagccttcaaggggaagctgggcatgcttaaccttggtaatttggtggaccaacaagaaaatgctcctggcataccttcgatttcttggggtgatgtcctcagtacctccaggtccagtcttggcttgtctacaggagggacggcttttgttgaaccacccagtgctgatcaacatgtgcaagactatggagactgcttttcatccagctccttcactgaagtcttcggtagaaaatcagcaagattgatggcaagtggcgtttatggccaatcagctggtgcaaatgattccggttatgacggagatgaacctctagggtccatgaaagaaatggaagctcaaactattggtgatctccttcctgatgacgatgacctgatgtcgggaattattgatggctttgaatacaccggcttgtctaaccaggatgatgccgatgaagatatattctacactggaggaggtttggagctagagcatgatgattccaacaacgtcgacaaatttcgtgatgtgtccttcaagattcaactttctgagaagcactctatcgataaacaccattccagagctcttattgtaaaaaatattaatccaggcatcgagggttctgatttaagggctctgtttcagcaatatggggacgtacagacattcgacacatcctgcaagagccatggaattgttacagtgtcttactatgacattagagctgcacaggacgcagtgagagcagtccataacaaacctctggggctgatgaaacttgatgttcaattttcccttcctaaggaaaatgttccaaacaaagatcccaacaatggaacactggtggtatctcttattgactcttccatctccagccatgatcttctccaaaaatttagtgtttatggcgatgtcaaggagatttacaagtctcctacaagctgcaataagaaatttgtagaattctatgatatcagagcagcacaagaagcactgaatgacctcaacaagggtgaaatatcatgctcacaaatcaaagttgagcatagcttttctggaggagcaggatcttgcttcgcagagcaatattcaggagaacagaagcaaaatgccgtagctcaccaacttaagaactctccacctgggaccattgggaagttagatactaagagttgggacagcagcactgttcataatttatattctccagttagaccgcaacacgataaatcacaacatggcttctctgtgaatcctcctcagaagttgtcatcgcctatcagaattgaatctacacagcagcatagtaatcaaactgcttttggtgaacatagtggatctcttggtcatggcaactttggaggtgggctgcaagccttccacccgcactcactgccagagtgtcacaatggtatttgcaatggctataactccatgacattaaatgcaaggaattctaacttcagatttactgaaggaatagactacaataatcacaaagttgaccacagtgaccttcatggtcattcctctgatcaaaatgaagcaattagagttgctggaattggaagttgcccccttcatggacatcactatacctggagtaactcaaatggttttcctcaaagcccctctgctccaatgatgtggcctaactttcagcaaccagtgcatatgcattgctaccctgctatgcctcctcacatccggcgcagtgctgcccatcctatggaccaacatcacttgggttcagctccaaacagtgttggtggttttgcaaatgcacactcttttcatccaggatcccttgaaagcgtagggtttcctggcagccctcagctgtatccatcagatctctctgtatttgcatctgccagaggaaattacagggagaccatgttctctgccataagtgccgggtttccatcaattcagcaaattcttcatgcgaccaacggaaggaatcctatgatgcacgtctccacctcatatgacgccactaatgatcgcataaggagccgcaggcatgatggaaatgctgcccagtctgaaaacaagaagcagtttgagctggaccttgaccgcatagctaagggtgaagactcgcgcaccacactgatgataaaaaacattcctaacaagtacaccagtaagctgcttttggctgtcattgatgagaatcaccgaggaacttatgatttcatctaccttccaattgattttaagaataaatgtaacgtgggatatgcattcatcaatatgacggatccacagcagatagttccattttacaagacattcaacggcaagaaatgggagaagttcaatagtgagaaagtggcatcacttgcgtacgccagaatccagggaaggaacgctttgattgctcatttccagaattctagcctgatgaatgaagagaaatggtgccgccctatgcttttccacaaagatggcccgaacgcaggagaccaggaaccattccctgtgggtaacaatgttcgttctcggtccgggaggaacagaccacttagcagtggttcggagactaccaaagaggcaagtccatcaacctctcctaactgaagagaagccggctcccgatattccaactcaggacaggcaggcggtatttgctcactaactggaggctgaagggcatgtaataaatcatccccagttttgctgcttctttttcttttggtcctcgtcagcaaggtgacctgacttgctgagtgtgactagctaacgagaattctgcactgcatgagcctgctgaagattcaccttaaagtaactatgccttggttttgccataccattgacgtcaacggctacaggtaatggagaagacctggagtggtagagggaggtgtgtttcaggcgggtgaaaattcaagttgtacagttgaactcaccaggattggaaaatggtcatcaattcaaatttgagttgtttttcttagggttcttcttgctatgtttgatctcgtttatgtgcgtgtcatgtgtccacggtgtgagcccaaatgtttgaatgccttgtctttgtgcaatttctctcaaacctcagattctggtgtgctggttcattccatgtcctcttttgtttttcaaattcaagatttattacatcataaacatgttacaaagatggggggtcatgttgccccgaacaatccaagtttcaaaacacatgctagatattacaggttggagaatgaagcccctagagaaaaggcatggatttggggtagttgcccgtcttgctttttttttgcaagaacatcagctatcttgtttctctctaggaacctgttgtgccaaaatcatggcgtaagccaacacctggctgccagttaacaaaattgcatctcgcagatcgagtgcagcagctaccttgaaattaaataggaattgcatcctggaagaaagaagcatggggaatacctgtagcaggtcggtctcccccaaaccaaaagaaatggctgcaacactgcgcacagcaaaggttccacacccaaaaaagagggcgcccagcacccactaccttcagcatgctctgccacggcttctggtcctcctcgctggactgtcatcagctcccgtggcattcacactgctccgagtcaccctgcggccgctgctcacagcagggctgccgttgccgtcatcatgcatatcaccactcttcctggtccgtttcataggagtgacgcacacatcaacctcttccactgcagcactgctcttcaccctcttgccaccagtctcagcatcagccttgtgcttcgtctgtttcgcagcagcatcttcatcagccgtgcgcttcttcggctgtttcgcagcagcatcttcaactaacacatccaccacttcagccgcgcccatctttgactttttatcatcttttgcaccctccattt

SEQ ID NO: 57608 - DNA, 1347 bp, Zea Mays
cccccccctccctcgacctctctttcttgttgcacgcctgcctgggcgaaccgtcgccgctatacaccaggcgcccagggcttcgccggcgccgagtagccaccagctgccgctcaacattcacctctgccaagggcatggaccacatgacgatgctcggcgccggagccccccaccagctctccagggctgaaccaatgcctgaccgtaggtcaaggttctggcagacggatgtgcagcctgtgcctcggatagacatcatctgtcctctgccttgtcgcccttcccgctcactgctcctcaataggcccagccccaagcctaatgggttagttctttcttcactctcctctttacaccacggacttccatgcaacatactaatgttgaataaaaaattgttgaaccggcctcataggttgcatactttcagcgttaactggtaagccataggttttcgtgtgttttgtatggctgcatccttgctagattttgagcgccaactggtagtccatacgttgcatgtttgtatttactttatttccatccatgctagatttttgagcgataattggtagtttgcatatctttgaatgcatgcatacatgctagatctggaaggccaatcggtatgcgtatgctccaagtaaggtcagcagccaagcacaagactggtccttttgctgaaactgtgttctgcggttgcagggcactcccattgtatggagcaaaccctacttatgatatcgttgatctcatccttagcaagaatgaccctgatgtggatactgattcaagcagccaggcggcctttttctgtggctcgcctcctgcccgcactaacaaccctgttatccatgacccacagtttggaaagaaagcaccatccttttctcctctaggaagctcttctggaaaaatggcagctggaagagctgaagtaggttctccgtcctgcaggtcgagcagcccaaaaatgagaatcgaaggttttgcttgcgggaacaaagagccccctcactgctttgcctgatgatccccattgaccctgcctaaccctgttttgctaccctgcaacctgtacattttcgctgcccagctgagagttcgtttcgttataagctgttaaactagctgagagtcccatgtgattgtggcttttgaaaattgcatgatccaaggggacggatgtaaataggtcgagttgtccggtgtatgtactagatgttgtatgcgtctggtaaatgtagtcatgctgggtgggtccatgtgtcggcgtctgtaaatacagccatgcatttggatgtgaaatttaaatgcgtcttcagttatgttgccatgctgttc

SEQ ID NO: 57609 - DNA, 2783 bp, Zea Mays
ctcacactcatcaagggcggctcactctcatgtcatgtggcggcgtccttctccctcgctgctccgtctctctcagtctctctcctgccctgtccgtcccactccccgtccagcggagagagaccctgtgggctgtggccgggcagccgtttcccctccccttccctctccgctccctccagagtctactgtagcgcagtgccgtagggtttcgcgtcctatccttcctcgcatcctccatggccgatcctgacgacctcggccgccgcctcgccgcggtcgccgtatccgagtctcctaccgccgccgcggctgcgctggagagcagcaacaacaacctgttccaggtgatgcgcgccgtggaggacgcggaggccaccatccgccagcagctggaggagaacagccggttgaaggacgagctgatgctcaagacgcgggagctccacagaattaggtcagaagccacagaccaagcttcctctcatgggatccgtatccatcaggatcgcgctcttggtgcccacacagacacctcctccactgctcccatcaggactaccgctacagcagcagaggccttcgaatggggagctggggatgccggcatcaaccacaagtaccttgaggccaaccaggctaatggaattccccgtaaatcaccgagcgctcccgatagcgctttcccatctcagctatctaccccgtcttcgcgatccctttcaccaactaggcaccacaaagaaacagactatgattctaggctcaacttatccggacaaggcgcactgcctgtttcagacctcaactcaaacgtcgtcatctggaagcaggatctccttgttaaggtcaaagaacaaggggaggagattgcacagctgagaaggcatctttctgactactctgtcaaggaggcccaaatacttaatgagaaacatgtcctggaaaaacgcattgcatatatgcgcatggcatttgatcagcagcagcaagatctggttgatgctgcatcgaaagctttgtcctacagacaggatattatcgaagaaaacatccgtcttacatatgcattgcaggcagcacatcaagagagatctacattcgtatcttctttattgcctcttctatcagaatataaccttcagcctcctgttcttgatgctcagtctattgttagcaatctgaaggttctgtttaagcatttgcaagaaaaacttattattactgaggagaagctgaaggaatcacaataccagattactccttggcatgctgaatcttcaaataatacaagtgctgctgcacagtcgccttctcatcctcctggaaatgcattgatcaaagccaaccttgacattgtgccccagcaagcatattctcatgtacattctccagtttcttctcctgttcaaactaggcgtgactgggatttgttagggaatgaaaatcgtcaggtcattcgaagtgaggttgccacaacaagtgcagagcatgataatgttgggaggacctctccttcaaccagcagccataatatgaaggatgcccctcaaagaaccgatcatgattcccgtgctgttcgatttaacattgaatccaaggatcaaaacccatcattcaaggaccttattaagagtgatgcctcagaaagtctggagggagctgaggcccaaattccacaagaactttctgcgcagcaggattctggaggctcacctaatttgacatctggtcttgatgacgcaaatccaccatacccttatcttcctactgtccttgaggagcctagttcttctttttccgaagttgcagaggatgatccgcttccagccatagaaggactgcgaatcacaggtgaagcctttcctggaagagaacttcaagcaagtgggtactctatccatggaaccacaagttgtaattttgagtgggtacgccatttggacgatggatcaataaattttatagaaggtgcacggcagcccacctatttagtatctgctgatgatgtggactttgtactagcgattgaagtccagcctctggatgacaaaaaaaggaagggcgagattgtgaaggtttatgctaatgatcaaagaaaaattacatgtgaccctgaaaccaaggagcatattaagaaaattctctctctggggcatgtctcttatgaagttctattacctgttagatttttagatatgtgggaaccagctattttggcaataaagagggaaggttacagcgttaagtgtaatggacagcgcggtgtcgttgtcatggagaaatttcagcaagcgatgaccatcaatatcccatttgggcgtcctactgagttttcaattttgtctgctgatggtgctgagtacaatttaaagcctgcagagaatgccccatcacgagatgccattgttctaatactaaggctattcaggatgaaggctgttgagaagagcaagggaaaaagaaagggcatcttcttcaagtagtttgtagttgtagcagtattactacgtagtgtcatggcaggttgactgtatctgttacctatgttttcgcggttcatgtatgtagaaggaaagagcaagttgtctgcgtgcttatgtaaagttccgattcaattcgattagattcaattggcaccgtacccagttttttgtttgtttttgttctgttgtagggagggatgaattcattttccaattaatgttggtttgtttggccagattgtagattcgtcgggtgctgccgtaaagcagaagcaattcagacgggttaccccagct

SEQ ID NO: 57610 - DNA, 2760 bp, Zea Mays
ctcactctcatgtcatgtggcggcgtccttctccctcgctgctccgtctctctcagtctctctcctgccctgtccgtcccactccccgtccagcggagagagaccctgtgggctgtggccgggcagccgtttcccctccccttccctctccgctccctccagagtctactgtagcgcagtgccgtagggtttcgcgtcctatccttcctcgcatcctccatggccgatcctgacgacctcggccgccgcctcgccgcggtcgccgtatccgagtctcctaccgccgccgcggctgcgctggagagcagcaacaacaacctgttccaggtgatgcgcgccgtggaggacgcggaggccaccatccgccagcagctggaggagaacagccggttgaaggacgagctgatgctcaagacgcgggagctccacagaattaggtcagaagccacagaccaagcttcctctcatgggatccgtatccatcaggatcgcgctcttggtgcccacacagacacctcctccactgctcccatcaggactaccgctacagcagcagaggccttcgaatggggagctggggatgccggcatcaaccacaagtaccttgaggccaaccaggctaatggaattccccgtaaatcaccgagcgctcccgatagcgctttcccatctcagctatctaccccgtcttcgcgatccctttcaccaactaggcaccacaaagaaacagactatgattctaggctcaacttatccggacaaggcgcactgcctgtttcagacctcaactcaaacgtcgtcatctggaagcaggatctccttgttaaggtcaaagaacaaggggaggagattgcacagctgagaaggcatctttctgactactctgtcaaggaggcccaaatacttaatgagaaacatgtcctggaaaaacgcattgcatatatgcgcatggcatttgatcagcagcagcaagatctggttgatgctgcatcgaaagctttgtcctacagacaggatattatcgaagaaaacatccgtcttacatatgcattgcaggcagcacatcaagagagatctacattcgtatcttctttattgcctcttctatcagaatataaccttcagcctcctgttcttgatgctcagtctattgttagcaatctgaaggttctgtttaagcatttgcaagaaaaacttattattactgaggagaagctgaaggaatcacaataccagattactccttggcatgctgaatcttcaaataatacaagtgctgctgcacagtcgccttctcatcctcctggaaatgcattgatcaaagccaaccttgacattgtgccccagcaagcatattctcatgtacattctccagtttcttctcctgttcaaactaggcgtgactgggatttgttagggaatgaaaatcgtcaggtcattcgaagtgaggttgccacaacaagtgcagagcatgataatgttgggaggacctctccttcaaccagccataatatgaaggatgcccctcaaagaaccgatcatgattcccgtgctgttcgatttaacattgaatccaaggatcaaaacccatcattcaaggaccttattaagagtgatgcctcagaaagtctggagggagctgaggcccaaattccacaagaactttctgcgcagcaggattctggaggctcacctaatttgacatctggtcttgatgacgcaaatccaccatacccttatcttcctactgtccttgaggagcctagttcttctttttccgaagttgcagaggatgatccgcttccagccatagaaggactgcgaatcacaggtgaagcctttcctggaagagaacttcaagcaagtgggtactctatccatggaaccacaagttgtaattttgagtgggtacgccatttggacgatggatcaataaattttatagaaggtgcacggcagcccacctatttagtatctgctgatgatgtggactttgtactagcgattgaagtccagcctctggatgacaaaaaaaggaagggcgagattgtgaaggtttatgctaatgatcaaagaaaaattacatgtgaccctgaaaccaaggagcatattaagaaaattctctctctggggcatgtctcttatgaagttctattacctgttagatttttagatatgtgggaaccagctattttggcaataaagagggaaggttacagcgttaagtgtaatggacagcgcggtgtcgttgtcatggagaaatttcagcaagcgatgaccatcaatatcccatttgggcgtcctactgagttttcaattttgtctgctgatggtgctgagtacaatttaaagcctgcagagaatgccccatcacgagatgccattgttctaatactaaggctattcaggatgaaggctgttgagaagagcaagggaaaaagaaagggcatcttcttcaagtagtttgtagttgtagcagtattactacgtagtgtcatggcaggttgactgtatctgttacctatgttttcgcggttcatgtatgtagaaggaaagagcaagttgtctgcgtgcttatgtaaagttccgattcaattcgattagattcaattggcaccgtacccagttttttgtttgtttttgttctgttgtagggagggatgaattcattttccaattaatgttggtttgtttggccagattgtagattcgtcgggtgctgccgtaaagcagaagcaattcagacgggttaccccagct

SEQ ID NO: 57611 - DNA, 1695 bp, Zea Mays
cttctccctcgctgctccgtctctctcagtctctctcctgccctgtccgtcccactccccgtccagcggagagagaccctgtgggctgtggccgggcagccgtttcccctccccttccctctccgctccctccagagtctactgtagcgcagtgccgtagggtttcgcgtcctatccttcctcgcatcctccatggccgatcctgacgacctcggccgccgcctcgccgcggtcgccgtatccgagtctcctaccgccgccgcggctgcgctggagagcagcaacaacaacctgttccaggtgatgcgcgccgtggaggacgcggaggccaccatccgccagcagctggaggagaacagccggttgaaggacgagctgatgctcaagacgcgggagctccacagaattaggtcagaagccacagaccaagcttcctctcatgggatccgtatccatcaggatcgcgctcttggtgcccacacagacacctcctccactgctcccatcaggactaccgctacagcagcagaggccttcgaatggggagctggggatgccggcatcaaccacaagtaccttgaggccaaccaggctaatggaattccccgtaaatcaccgagcgctcccgatagcgctttcccatctcagctatctaccccgtcttcgcgatccctttcaccaactaggcaccacaaagaaacagactatgattctaggctcaacttatccggacaaggcgcactgcctgtttcagacctcaactcaaacgtcgtcatctggaagcaggatctccttgttaaggtcaaagaacaaggggaggagattgcacagctgagaaggcatctttctgactactctgtcaaggaggcccaaatacttaatgagaaacatgtcctggaaaaacgcattgcatatatgcgcatggcatttgatcagcagcagcaagatctggttgatgctgcatcgaaagctttgtcctacagacaggatattatcgaagaaaacatccgtcttacatatgcattgcaggcagcacatcaagagagatctacattcgtatcttctttattgcctcttctatcagaatataaccttcagcctcctgttcttgatgctcagtctattgttagcaatctgaaggttctgtttaagcatttgcaagaaaaacttattattactgaggagaagctgaaggaatcacaataccagattactccttggcatgctgaatcttcaaataatacaagtgctgctgcacagtcgccttctcatcctcctggaaatgcattgatcaaagccaaccttgacattgtgccccagcaagcatattctcatgtacattctccagtttcttctcctgttcaaactaggcgtgactgggatttgttagggaatgaaaatcgtcaggtcattcgaagtgaggttgccacaacaagtgcagagcatgataatgttgggaggacctctccttcaaccaggttgctggtggttacttcaaaaattcaataggatgtgttcttagctattttttgccgtttcacaattacaataatttcactatgtacatcccatttttgccacatgatgaaaatcttaatagtagtattagtctagctagcccccttttcttctttgttctgatgtaattaatttttgtacagtattttgaaaccatttctccaactatgattgttc

SEQ ID NO: 57612 - DNA, 2980 bp, Zea Mays
cttctccctcgctgctccgtctctctcagtctctctcctgccctgtccgtcccactccccgtccagcggagagagaccctgtgggctgtggccgggcagccgtttcccctccccttccctctccgctccctccagagtctactgtagcgcagtgccgtagggtttcgcgtcctatccttcctcgcatcctccatggccgatcctgacgacctcggccgccgcctcgccgcggtcgccgtatccgagtctcctaccgccgccgcggctgcgctggagagcagcaacaacaacctgttccaggtgatgcgcgccgtggaggacgcggaggccaccatccgccagcagctggaggagaacagccggttgaaggacgagctgatgctcaagacgcgggagctccacagaattaggtcagaagccacagaccaagcttcctctcatgggatccgtatccatcaggatcgcgctcttggtgcccacacagacacctcctccactgctcccatcaggactaccgctacagcagcagaggccttcgaatggggagctggggatgccggcatcaaccacaagtaccttgaggccaaccaggctaatggaattccccgtaaatcaccgagcgctcccgatagcgctttcccatctcagctatctaccccgtcttcgcgatccctttcaccaactaggcaccacaaagaaacagactatgattctaggctcaacttatccggacaaggcgcactgcctgtttcagacctcaactcaaacgtcgtcatctggaagcaggatctccttgttaaggtcaaagaacaaggggaggagattgcacagctgagaaggcatctttctgactactctgtcaaggaggcccaaatacttaatgagaaacatgtcctggaaaaacgcattgcatatatgcgcatggcatttgatcagcagcagcaagatctggttgatgctgcatcgaaagctttgtcctacagacaggatattatcgaagaaaacatccgtcttacatatgcattgcaggcagcacatcaagagagatctacattcgtatcttctttattgcctcttctatcagaatataaccttcagcctcctgttcttgatgctcagtctattgttagcaatctgaaggttctgtttaagcatttgcaagaaaaacttattattactgaggagaagctgaaggaatcacaataccagattactccttggcatgctgaatcttcaaataatacaagtgctgctgcacagtcgccttctcatcctcctggaaatgcattgatcaaagccaaccttgacattgtgccccagcaagcatattctcatgtacattctccagtttcttctcctgttcaaactaggcgtgactgggatttgttagggaatgaaaatcgtcaggtcattcgaagtgaggttgccacaacaagtgcagagcatgataatgttgggaggacctctccttcaaccagcagccataatatgaaggatgcccctcaaagaaccgatcatgattcccgtgctgttcgatttaacattgaatccaaggatcaaaacccatcattcaaggaccttattaagagtgatgcctcagaaagtctggagggagctgaggcccaaattccacaagaactttctgcgcagcaggattctggaggctcacctaatttgacatctggtcttgatgacgcaaatccaccatacccttatcttcctactgtccttgaggagcctagttcttctttttccgaagttgcagaggatgatccgcttccagccatagaaggactgcgaatcacaggtgaagcctttcctggaagagaacttcaagcaagtgggtactctatccatggaaccacaagttgtaattttgagtgggtacgccatttggacgatggatcaataaattttatagaaggtgcacggcagcccacctatttagtatctgctgatgatgtggactttgtactagcgattgaagtccagcctctggatgacaaaaaaaggaagggcgagattgtgaaggtttatgctaatgatcaaagaaaaattacatgtggtgagttcctgagagttttgttctttaagtaggggacatatatatatatattcttttctttcatttgcaccttgtatgttttcaaaaatcattgggtatctgagctccatttcttcttgagaggattgctggacaaacatgagctatgttagtgagagagaacaatcatgttatggtgtagaagggtttcgtttggcatattagatatatctcagtatctgctgagtaactcctatttgtgcagaccctgaaaccaaggagcatattaagaaaattctctctctggggcatgtctcttatgaagttctattacctgttagatttttagatatgtgggaaccagctattttggcaataaagagggaaggttacagcgttaagtgtaatggacagcgcggtgtcgttgtcatggagaaatttcagcaagcgatgaccatcaatatcccatttgggcgtcctactgagttttcaattttgtctgctgatggtgctgagtacaatttaaagcctgcagagaatgccccatcacgagatgccattgttctaatactaaggctattcaggatgaaggctgttgagaagagcaagggaaaaagaaagggcatcttcttcaagtagtttgtagttgtagcagtattactacgtagtgtcatggcaggttgactgtatctgttacctatgttttcgcggttcatgtatgtagaaggaaagagcaagttgtctgcgtgcttatgtaaagttccgattcaattcgattagattcaattggcaccgtacccagttttttgtttgtttttgttctgttgtagggagggatgaattcattttccaattaatgttggtttgtttggccagattgtagattcgtcgggtgctgccgtaaagcagaagcaattcagacgggttaccccagct

SEQ ID NO: 57613 - DNA, 2647 bp, Zea Mays
cttctccctcgctgctccgtctctctcagtctctctcctgccctgtccgtcccactccccgtccagcggagagagaccctgtgggctgtggccgggcagccgtttcccctccccttccctctccgctccctccagagtctactgtagcgcagtgccgtagggtttcgcgtcctatccttcctcgcatcctccatggccgatcctgacgacctcggccgccgcctcgccgcggtcgccgtatccgagtctcctaccgccgccgcggctgcgctggagagcagcaacaacaacctgttccaggtgatgcgcgccgtggaggacgcggaggccaccatccgccagcagctggaggagaacagccggttgaaggacgagctgatgctcaagacgcgggagctccacagaattaggtcagaagccacagaccaagcttcctctcatgggatccgtatccatcaggatcgcgctcttggtgcccacacagacacctcctccactgctcccatcaggactaccgctacagcagcagaggccttcgaatggggagctggggatgccggcatcaaccacaagtaccttgaggccaaccaggctaatggaattccccgtaaatcaccgagcgctcccgatagcgctttcccatctcagctatctaccccgtcttcgcgatccctttcaccaactaggcaccacaaagaaacagactatgattctaggctcaacttatccggacaaggcgcactgcctgtttcagacctcaactcaaacgtcgtcatctggaagcaggatctccttgttaaggtcaaagaacaaggggaggagattgcacagctgagaaggcatctttctgactactctgtcaaggaggcccaaatacttaatgagaaacatgtcctggaaaaacgcattgcatatatgcgcatggcatttgatcagcagcagcaagatctggttgatgctgcatcgaaagctttgtcctacagacaggatattatcgaagaaaacatccgtcttacatatgcattgcaggcagcacatcaagagagatctacattcgtatcttctttattgcctcttctatcagaatataaccttcagcctcctgttcttgatgctcagtctattgttagcaatctgaaggttctgtttaagcatttgcaagaaaaacttattattactgaggagaagctgaaggaatcacaataccagattactccttggcatgctgaatcttcaaataatacaagtgctgctgcacagtcgccttctcatcctcctggaaatgcattgatcaaagccaaccttgacattgtgccccagcaagcatattctcatgtacattctccagtttcttctcctgttcaaactaggcgtgactgggatttgttagggaatgaaaatcgtcaggtcattcgaagtgaggttgccacaacaagtgcagagcatgataatgttgggaggacctctccttcaaccagcagccataatatgaaggatgcccctcaaagaaccgatcatgattcccgtgctgttcgatttaacattgaatccaaggatcaaaacccatcattcaaggaccttattaagagtgatgcctcagaaagtctggagggagctgaggcccaaattccacaagaactttctgcgcagcaggattctggaggctcacctaatttgacatctggtcttgatgacgcaaatccaccatacccttatcttcctactgtccttgaggagcctagttcttctttttccgaagttgcagaggatgatccgcttccagccatagaaggactgcgaatcacaggtgaagcctttcctggaagagaacttcaagcaagtgggtactctatccatggaaccacaagttgtaattttgagtgggtacgccatttggacgatggatcaataaattttatagaaggtgcacggcagcccacctatttagtatctgctgatgatgtggactttgtactagcgattgaagtccagcctctggatgacaaaaaaaggaagggcgagattgtgaaggtttatgctaatgatcaaagaaaaattacatgtgaccctgaaaccaaggagcatattaagaaaattctctctctggggcatgtctcttatgaagttctattacctgttagatttttagatatgtgggaaccagctattttggcaataaagagggaaggttacagcgttaagtgtaatggacagcgcggtgtcgttgtcatggagaaatttcagcaagcgatgaccatcacgagatgccattgttctaatactaaggctattcaggatgaaggctgttgagaagagcaagggaaaaagaaagggcatcttcttcaagtagtttgtagttgtagcagtattactacgtagtgtcatggcaggttgactgtatctgttacctatgttttcgcggttcatgtatgtagaaggaaagagcaagttgtctgcgtgcttatgtaaagttccgattcaattcgattagattcaattggcaccgtacccagttttttgtttgtttttgttctgttgtagggagggatgaattcattttccaattaatgttggtttgtttggccagattgtagattcgtcgggtgctgccgtaaagcagaagcaattcagacgggttaccccagct

SEQ ID NO: 57614 - DNA, 1671 bp, Zea Mays
gtctctctcagtctctctcctgccctgtccgtcccactccccgtccagcggagagagaccctgtgggctgtggccgggcagccgtttcccctccccttccctctccgctccctccagagtctactgtagcgcagtgccgtagggtttcgcgtcctatccttcctcgcatcctccatggccgatcctgacgacctcggccgccgcctcgccgcggtcgccgtatccgagtctcctaccgccgccgcggctgcgctggagagcagcaacaacaacctgttccaggtgatgcgcgccgtggaggacgcggaggccaccatccgccagcagctggaggagaacagccggttgaaggacgagctgatgctcaagacgcgggagctccacagaattaggtcagaagccacagaccaagcttcctctcatgggatccgtatccatcaggatcgcgctcttggtgcccacacagacacctcctccactgctcccatcaggactaccgctacagcagcagaggccttcgaatggggagctggggatgccggcatcaaccacaagtaccttgaggccaaccaggctaatggaattccccgtaaatcaccgagcgctcccgatagcgctttcccatctcagctatctaccccgtcttcgcgatccctttcaccaactaggcaccacaaagaaacagactatgattctaggctcaacttatccggacaaggcgcactgcctgtttcagacctcaactcaaacgtcgtcatctggaagcaggatctccttgttaaggtcaaagaacaaggggaggagattgcacagctgagaaggcatctttctgactactctgtcaaggaggcccaaatacttaatgagaaacatgtcctggaaaaacgcattgcatatatgcgcatggcatttgatcagcagcagcaagatctggttgatgctgcatcgaaagctttgtcctacagacaggatattatcgaagaaaacatccgtcttacatatgcattgcaggcagcacatcaagagagatctacattcgtatcttctttattgcctcttctatcagaatataaccttcagcctcctgttcttgatgctcagtctattgttagcaatctgaaggttctgtttaagcatttgcaagaaaaacttattattactgagctgaaggaatcacaataccagattactccttggcatgctgaatcttcaaataatacaagtgctgctgcacagtcgccttctcatcctcctggaaatgcattgatcaaagccaaccttgacattgtgccccagcaagcatattctcatgtacattctccagtttcttctcctgttcaaactaggcgtgactgggatttgttagggaatgaaaatcgtcaggtcattcgaagtgaggttgccacaacaagtgcagagcatgataatgttgggaggacctctccttcaaccaggttgctggtggttacttcaaaaattcaataggatgtgttcttagctattttttgccgtttcacaattacaataatttcactatgtacatcccatttttgccacatgatgaaaatcttaatagtagtattagtctagctagcccccttttcttctttgttctgatgtaattaatttttgtacagtattttgaaaccatttctccaactatgattgttc

SEQ ID NO: 57615 - DNA, 2607 bp, Zea Mays
gtctctctcagtctctctcctgccctgtccgtcccactccccgtccagcggagagagaccctgtgggctgtggccgggcagccgtttcccctccccttccctctccgctccctccagagtctactgtagcgcagtgccgtagggtttcgcgtcctatccttcctcgcatcctccatggccgatcctgacgacctcggccgccgcctcgccgcggtcgccgtatccgagtctcctaccgccgccgcggctgcgctggagagcagcaacaacaacctgttccaggtgatgcgcgccgtggaggacgcggaggccaccatccgccagcagctggaggagaacagccggttgaaggacgagctgatgctcaagacgcgggagctccacagaattaggtcagaagccacagaccaagcttcctctcatgggatccgtatccatcaggatcgcgctcttggtgcccacacagacacctcctccactgctcccatcaggactaccgctacagcagcagaggccttcgaatggggagctggggatgccggcatcaaccacaagtaccttgaggccaaccaggctaatggaattccccgtaaatcaccgagcgctcccgatagcgctttcccatctcagctatctaccccgtcttcgcgatccctttcaccaactaggcaccacaaagaaacagactatgattctaggctcaacttatccggacaaggcgcactgcctgtttcagacctcaactcaaacgtcgtcatctggaagcaggatctccttgttaaggtcaaagaacaaggggaggagattgcacagctgagaaggcatctttctgactactctgtcaaggaggcccaaatacttaatgagaaacatgtcctggaaaaacgcattgcatatatgcgcatggcatttgatcagcagcagcaagatctggttgatgctgcatcgaaagctttgtcctacagacaggatattatcgaagaaaacatccgtcttacatatgcattgcaggttctgtttaagcatttgcaagaaaaacttattattactgaggagaagctgaaggaatcacaataccagattactccttggcatgctgaatcttcaaataatacaagtgctgctgcacagtcgccttctcatcctcctggaaatgcattgatcaaagccaaccttgacattgtgccccagcaagcatattctcatgtacattctccagtttcttctcctgttcaaactaggcgtgactgggatttgttagggaatgaaaatcgtcaggtcattcgaagtgaggttgccacaacaagtgcagagcatgataatgttgggaggacctctccttcaaccagcagccataatatgaaggatgcccctcaaagaaccgatcatgattcccgtgctgttcgatttaacattgaatccaaggatcaaaacccatcattcaaggaccttattaagagtgatgcctcagaaagtctggagggagctgaggcccaaattccacaagaactttctgcgcagcaggattctggaggctcacctaatttgacatctggtcttgatgacgcaaatccaccatacccttatcttcctactgtccttgaggagcctagttcttctttttccgaagttgcagaggatgatccgcttccagccatagaaggactgcgaatcacaggtgaagcctttcctggaagagaacttcaagcaagtgggtactctatccatggaaccacaagttgtaattttgagtgggtacgccatttggacgatggatcaataaattttatagaaggtgcacggcagcccacctatttagtatctgctgatgatgtggactttgtactagcgattgaagtccagcctctggatgacaaaaaaaggaagggcgagattgtgaaggtttatgctaatgatcaaagaaaaattacatgtgaccctgaaaccaaggagcatattaagaaaattctctctctggggcatgtctcttatgaagttctattacctgttagatttttagatatgtgggaaccagctattttggcaataaagagggaaggttacagcgttaagtgtaatggacagcgcggtgtcgttgtcatggagaaatttcagcaagcgatgaccatcaatatcccatttgggcgtcctactgagttttcaattttgtctgctgatggtgctgagtacaatttaaagcctgcagagaatgccccatcacgagatgccattgttctaatactaaggctattcaggatgaaggctgttgagaagagcaagggaaaaagaaagggcatcttcttcaagtagtttgtagttgtagcagtattactacgtagtgtcatggcaggttgactgtatctgttacctatgttttcgcggttcatgtatgtagaaggaaagagcaagttgtctgcgtgcttatgtaaagttccgattcaattcgattagattcaattggcaccgtacccagttttttgtttgtttttgttctgttgtagggagggatgaattcattttccaattaatgttggtttgtttggccagattgtagattcgtcgggtgctgccgtaaagcagaagcaattcagacgggttaccccagct

SEQ ID NO: 57616 - DNA, 1655 bp, Zea Mays
tgattgctacagaagacgaattattaaaattatagtttcaaaacaatcaagtgacgaaagttctgtttaagcatttgcaagaaaaacttattattactgaggagaagctgaaggaatcacaataccagattactccttggcatgctgaatcttcaaataatacaagtgctgctgcacagtcgccttctcatcctcctggaaatgcattgatcaaagccaaccttgacattgtgccccagcaagcatattctcatgtacattctccagtttcttctcctgttcaaactaggcgtgactgggatttgttagggaatgaaaatcgtcaggtcattcgaagtgaggttgccacaacaagtgcagagcatgataatgttgggaggacctctccttcaaccagcagccataatatgaaggatgcccctcaaagaaccgatcatgattcccgtgctgttcgatttaacattgaatccaaggatcaaaacccatcattcaaggaccttattaagagtgatgcctcagaaagtctggagggagctgaggcccaaattccacaagaactttctgcgcagcaggattctggaggctcacctaatttgacatctggtcttgatgacgcaaatccaccatacccttatcttcctactgtccttgaggagcctagttcttctttttccgaagttgcagaggatgatccgcttccagccatagaaggactgcgaatcacaggtgaagcctttcctggaagagaacttcaagcaagtgggtactctatccatggaaccacaagttgtaattttgagtgggtacgccatttggacgatggatcaataaattttatagaaggtgcacggcagcccacctatttagtatctgctgatgatgtggactttgtactagcgattgaagtccagcctctggatgacaaaaaaaggaagggcgagattgtgaaggtttatgctaatgatcaaagaaaaattacatgtgaccctgaaaccaaggagcatattaagaaaattctctctctggggcatgtctcttatgaagttctattacctgttagatttttagatatgtgggaaccagctattttggcaataaagagggaaggttacagcgttaagtgtaatggacagcgcggtgtcgttgtcatggagaaatttcagcaagcgatgaccatcaatatcccatttgggcgtcctactgagttttcaattttgtctgctgatggtgctgagtacaatttaaagcctgcagagaatgccccatcacgagatgccattgttctaatactaaggctattcaggatgaaggctgttgagaagagcaagggaaaaagaaagggcatcttcttcaagtagtttgtagttgtagcagtattactacgtagtgtcatggcaggttgactgtatctgttacctatgttttcgcggttcatgtatgtagaaggaaagagcaagttgtctgcgtgcttatgtaaagttccgattcaattcgattagattcaattggcaccgtacccagttttttgtttgtttttgttctgttgtagggagggatgaattcattttccaattaatgttggtttgtttggccagattgtagattcgtcgggtgctgccgtaaagcagaagcaattcagacgggttaccccagct

SEQ ID NO: 57617 - DNA, 4597 bp, Zea Mays
gtgacttcacttccagtctctagcgctgttttcgtgtttgctaccgccgcggcttctgcttctcccctccctagggcgggcgtgaatacgtgatccatcatctccatctccgtctgctgtggtgtgctggtttgagagactcgacggctggcgagacgagactgaagggcacaaatctctccgccatctgttagattccatcgtatcccccacgtcttggcgtcgcttcgtcggctgcgacctgcgagaagccggtgccgccgcgccggtggacgaagacgatcaaggattaggaacggcaaggtcccttgcgatccgatccaattcttcattcttcgattccttccttgggcgggcggctcccctcagcttccttccacatggctcgtcgcccgccgccgtcaccccctcccccggcgcaagggaacgggagtgggagcgggagcctcaccaccagagacgccctcgcctatctcaaggccgtcaaggacaagttccaggaaaagcgccacacgtacgagcagttcatccaggtcatgcgtgatttcaagagcgacaggctcgacagcaccggcgtgatcgcccgtgtcaagaccatcttccacggctacccggacctaatcctcggattcaacgccttcctgcccaaggagcatgccatcaggcctctggacctccgcgaggacaagaagcccgtcgattatcccagggccatcagccttgtcaacaggattaagagccgattccagcaggaggaacatgtctacaagtcattcctggggatcctcaataagtaccgcatgcataacaagcccatccaagatgtttacaacgaggtcaccgcactgttacatggccatccagatttactcgaggagttcagtcattttttgcctgatacgcccatgcctcctccgcaggcaggcactactactaaagttaggcatgatgacaataatgctataatgcattctgtcacgagagctcagacagtccaggtgaatcaacaaattatagaatcacccgtgttcaattccaaatctcagacagtccagagggggagagattttccatcaactgctgattgggacaccagtgctgatcgccttgatcttgagcatgatattcaaaaaagttgtattgagaaggagaaaattcgtgatgcctgcccacgtcagcatagaagaggttataaaaggaatgagaagaatgacgagtatgaaaatgaagatttggatgtggagcaatgcggtcacaaatcacaaagaaagatggagggtactggtgatgatacaccaggggatgctacattgtcctcattcaattgttcacacgcacaagagtttcaattttgtgagaaactaaaggcacatctagagcctgaagcttaccaagagttcttgaaatgccttcacatatacaaccaagatattattacaagaaatgaactaaaaagattggtaaaggatatacttcaacattacccagatcttgtgaatggattcaatgacttcttgggtcactgtgaaaatatagatggttttttggaaggaaccttcaataaaaggcaaacatcgcggatggttagacctgtggaaaaagagagatacaaggagaacgagggggatagcgatcctgagaaagagagatacaaggaaagcaaaaattctgaaagagtattgaccttcaattctaaggaaggagcagctcatgaagctagtacattccctagcaaagagaagtataacttatgcaaaccaatatcagagcttgatctatcaaattgtcagcggtgcactccaagttaccgacttttgcctaaaaattatccagtaccttctgcaagcaacaggactgacactgaagcttccgtgctgaatgatcgctgggtatcggtgacctcaggaagtgaagattattcatttaagcatatgcgcaaaaatcagtatgaagaaagcttgtttagatgtgaagatgacatgtttgagctggacatgctgttggaatctgttactgttgcaattgagcgtgttgagaagttggtggaaaggatggaaggcaattcactgaaaccagacagctctatctccctcgatgaacatttgactagtttgaatatgaggtgcattgagcggctatatggtgaccatggacttgatgttattgatgttcttcgaaaaaatgttggtgtgacattaccagttattttaaccaggcttaaacaaaagcaggaggagtggtcaaggtgccagtcagattttaataaagtttgggctgaggtatattcaaaaaattatcacaagtctcttgaccatcgcagtttttatttcaaacaacaagacacaaagaatttgaacacaaaagctctattatctcagattaaagaaatcagtgagaagaataggaagggggatgatgtgttacttgctattgctgctgggaataggtggccactagttgccaacatgtcatttgtgtatttggatatggacattcatgaagatctttatcagatcatcaaatactcttgcggagaactatgcaattcttcagatcaagttaacaaagtgatgaggatctggacaacatttttagagcctctgttagggattcatcatagggctcatggcgctgaagatgcagatatggtaaaatcaaagaggcgaactagagaagttggtttggcatgtggcgggaaaacaaataatgctgcagcaaagggtggtaatggctctaaaagtgctggagctgagtctgtggctgaatttatgggtaggaatgaaacaattccgtctatgaagagcataaaacatgacaggataacatctttgtatggagtgggtgtacatccatttagtgcatattcggtgtcccacaacaatttaaggcctgaaacagaagagggtgaattatctcctaatggtgatttcaaagaggaacacttctgtgttttcgaagatgaagctgtagatggaacttctaaacaaaatgaaggttctaccagcagatctccccagggtagacctaagaattatctcaagttttcaggcaaggatcattcaggtgcagaaaatgaaggtaacaagagagcccagaggtctgcagaggatagtgaaaatgcatctgaggctgatgaagatatctctggcagtgaatctgctggtgatgaggagtcttctcatgaagatcaggaggaagaagaggatgatatggatcttgatacaaaggcaaaaaatgactgcagagcagaggtaaatagggaggcacagggtttggatggaggaacatcattgtcattttcagaatgtttgcaaagtacagttaaaccaatttccaagtatgtttccactgcattaccaaaccatgaaaagaaactttctcacatattttatggaaatgactcattttatgttctgttcaggctacatcagatcttttatgagagaatattgtcagctaagacaaactgttccacatcagacaataactggaaagcttcaaggcacataaattctccagatcaatattcaaggtttatcagtgcactatacaacttgcttgatggttcttctgaccacaccaaatttgaagatgactgccgctccatcattgggactcagtcatatgttctctttactatagataaactgatatacaaaattgtgaagcagcttcaagcattagcatctgatgaaatggacaaccagcttctccagctttatttatatgaaaagtcgaggtctcctgggagcttctttgatctggtttatcacgaaaatgcacgagcccttctacatgatgacaacatataccgttttgaatgtcattctgatcctacagaattaactattcagctcatggagtatgggaatgaaaaacctgagttgactgctgtctcatttgatccaaccttttcaccgtatctttataatggttatctgtcaagtattgatgataccaaattggttgatgacgtcttccttaggaggaataagcggaagcaagggaggaatgatgactcccctacttccttgaagatcatggacaatgtcatgtttgctaatggtcttgaatgcaagatatcttgcgaatcttcaaaagtctcttatgtcctcgatactgaggatgtcttatttcgtacgagaaagaggagaagctctatctagtggaaccatgcctgcgctgcaaagacaaattttgtgaaaattaacaccgtaaaatcgatagtttcatttatctcttcagaccgtatagggtcttgtggtagagttatgttaattacaatggcatgcactggtgggatcctcgtgttgttgatctgtcacttcactggaatatattggtgattctttgtgttttactcgctaccaattatatatgagcgtgtagcatgggcgagtcacggaggcagtgttccgtatgtgtttttgcagttcaacgcgctgggttcactgtgttgcgttatgacaggtggaccctaaaacttaaggagtagctaatgcaagagtggggcgaacaaggaactatgagtgtgtttggtttgagtaatgaagtgatccatattcttctcactcctcacttttttatttggtttgtg

SEQ ID NO: 57618 - DNA, 4451 bp, Zea Mays
cacttccagtctctagcgctgttttcgtgtttgctaccgccgcggcttctgcttctcccctccctagggcgggcgtgaatacgtgatccatcatctccatctccgtctgctgtggtgtgctggtttgagagactcgacggctggcgagacgagactgaagggcacaaatctctccgccatctgttagattccatcgtatcccccacgtcttggcgtcgcttcgtcggctgcgacctgcgagaagccggtgccgccgcgccggtggacgaagacgatcaaggattaggaacggcaaggtcccttgcgatccgatccaattcttcattcttcgattccttccttgggcgggcggctcccctcagcttccttccacatggctcgtcgcccgccgccgtcaccccctcccccggcgcaagggaacgggagtgggagcgggagcctcaccaccagagacgccctcgcctatctcaaggccgtcaaggacaagttccaggaaaagcgccacacgtacgagcagttcatccaggtcatgcgtgatttcaagagcgacaggctcgacagcaccggcgtgatcgcccgtgtcaagaccatcttccacggctacccggacctaatcctcggattcaacgccttcctgcccaaggagcatgccatcaggcctctggacctccgcgaggacaagaagcccgtcgattatcccagggccatcagccttgtcaacaggattaagagccgattccagcaggaggaacatgtctacaagtcattcctggggatcctcaataagtaccgcatgcataacaagcccatccaagatgtttacaacgaggtcaccgcactgttacatggccatccagatttactcgaggagttcagtcattttttgcctgatacgcccatgcctcctccgcaggcaggcactactactaaagttaggcatgatgacaataatgctataatgcattctgtcacgagagctcagacagtccaggtgaatcaacaaattatagaatcacccgtgttcaattccaaatctcagacagtccagagggggagagattttccatcaactgctgattgggacaccagtgctgatcgccttgatcttgagcatgatattcaaaaaagttgtattgagaaggagaaaattcgtgatgcctgcccacgtcagcatagaagaggttataaaaggaatgagaagaatgacgagtatgaaaatgaagatttggatgtggagcaatgcggtcacaaatcacaaagaaagatggagggtactggtgatgatacaccaggggatgctacattgtcctcattcaattgttcacacgcacaagagtttcaattttgtgagaaactaaaggcacatctagagcctgaagcttaccaagagttcttgaaatgccttcacatatacaaccaagatattattacaagaaatgaactaaaaagattggtaaaggatatacttcaacattacccagatcttgtgaatggattcaatgacttcttgggtcactgtgaaaatatagatggttttttggaaggaaccttcaataaaaggcaaacatcgcggatggttagacctgtggaaaaagagagatacaaggagaacgagggggatagcgatcctgagaaagagagatacaaggaaagcaaaaattctgaaagagtattgaccttcaattctaaggaaggagcagctcatgaagctagtacattccctagcaaagagaagtataacttatgcaaaccaatatcagagcttgatctatcaaattgtcagcggtgcactccaagttaccgacttttgcctaaaaattatccagtaccttctgcaagcaacaggactgacactgaagcttccgtgctgaatgatcgctgggtatcggtgacctcaggaagtgaagattattcatttaagcatatgcgcaaaaatcagtatgaagaaagcttgtttagatgtgaagatgacatgtttgagctggacatgctgttggaatctgttactgttgcaattgagcgtgttgagaagttggtggaaaggatggaaggcaattcactgaaaccagacagctctatctccctcgatgaacatttgactagtttgaatatgaggtgcattgagcggctatatggtgaccatggacttgatgttattgatgttcttcgaaaaaatgttggtgtgacattaccagttattttaaccaggcttaaacaaaagcaggaggagtggtcaaggtgccagtcagattttaataaagtttgggctgaggtatattcaaaaaattatcacaagtctcttgaccatcgcagtttttatttcaaacaacaagacacaaagaatttgaacacaaaagctctattatctcagattaaagaaatcagtgagaagaataggaagggggatgatgtgttacttgctattgctgctgggaataggtggccactagttgccaacatgtcatttgtgtatttggatatggacattcatgaagatctttatcagatcatcaaatactcttgcggagaactatgcaattcttcagatcaagttaacaaagtgatgaggatctggacaacatttttagagcctctgttagggattcatcatagggctcatggcgctgaagatgcagatatggtaaaatcaaagaggcgaactagagaagttggtttggcatgtggcgggaaaacaaataatgctgcagcaaagggtggtaatggctctaaaagtgctggagctgagtctgtggctgaatttatgggtaggaatgaaacaattccgtctatgaagagcataaaacatgacaggataacatctttgtatggagtgggtgtacatccatttagtgcatattcggtgtcccacaacaatttaaggcctgaaacagaagagggtgaattatctcctaatggtgatttcaaagaggaacacttctgtgttttcgaagatgaagctgtagatggaacttctaaacaaaatgaaggttctaccagcagatctccccagggtagacctaagaattatctcaagttttcaggcaaggatcattcaggtgcagaaaatgaaggtaacaagagagcccagaggtctgcagaggatagtgaaaatgcatctgaggctgatgaagatatctctggcagtgaatctgctggtgatgaggagtcttctcatgaagatcaggaggaagaagaggatgatatggatcttgatacaaaggcaaaaaatgactgcagagcagaggtaaatagggaggcacagggtttggatggaggaacatcattgtcattttcagaatgtttgcaaagtacagttaaaccaatttccaagtatgtttccactgcattaccaaaccatgaaaagaaactttctcacatattttatggaaatgactcattttatgttctgttcaggctacatcagatcttttatgagagaatattgtcagctaagacaaactgttccacatcagacaataactggaaagcttcaaggcacataaattctccagatcaatattcaagcttcaagcattagcatctgatgaaatggacaaccagcttctccagctttatttatatgaaaagtcgaggtctcctgggagcttctttgatctggtttatcacgaaaatgcacgagcccttctacatgatgacaacatataccgttttgaatgtcattctgatcctacagaattaactattcagctcatggagtatgggaatgaaaaacctgagttgactgctgtctcatttgatccaaccttttcaccgtatctttataatggttatctgtcaagtattgatgataccaaattggttgatgacgtcttccttaggaggaataagcggaagcaagggaggaatgatgactcccctacttccttgaagatcatggacaatgtcatgtttgctaatggtcttgaatgcaagatatcttgcgaatcttcaaaagtctcttatgtcctcgatactgaggatgtcttatttcgtacgagaaagaggagaagctctatctagtggaaccatgcctgcgctgcaaagacaaattttgtgaaaattaacaccgtaaaatcgatagtttcatttatctcttcagaccgtatagggtcttgtggtagagttatgttaattacaatggcatgcactggtgggatcctcgtgttgttgatctgtcacttcactggaatatattggtgattctttgtgttttactcgctaccaattatatatgagcgtgtagcatgggcgagtcacggaggcagtgttccgtatgtgtttttgcagttcaacgcgctgggttcactgtgttgcgttatgacaggtggaccctaaaacttaaggagtagctaatgcaagagtggggcgaacaaggaactatgagtgtgtttggtttgagtaatgaagtgatccatattcttctcactcctcacttttttatttggtttgtg

SEQ ID NO: 57619 - DNA, 4779 bp, Zea Mays
cacttccagtctctagcgctgttttcgtgtttgctaccgccgcggcttctgcttctcccctccctagggcgggcgtgaatacgtgatccatcatctccatctccgtctgctgtggtgtgctggtttgagagactcgacggctggcgagacgagactgaagggcacaaatctctccgccatctgttagattccatcgtatcccccacgtcttggcgtcgcttcgtcggctgcgacctgcgagaagccggtgccgccgcgccggtggacgaagacgatcaaggattaggaacggcaaggtcccttgcgatccgatccaattcttcattcttcgattccttccttgggcgggcggctcccctcagcttccttccacatggctcgtcgcccgccgccgtcaccccctcccccggcgcaagggaacgggagtgggagcgggagcctcaccaccagagacgccctcgcctatctcaaggccgtcaaggacaagttccaggaaaagcgccacacgtacgagcagttcatccaggtcatgcgtgatttcaagagcgacaggctcgacagcaccggcgtgatcgcccgtgtcaagaccatcttccacggctacccggacctaatcctcggattcaacgccttcctgcccaaggagcatgccatcaggcctctggacctccgcgaggacaagaagcccgtcgattatcccagggccatcagccttgtcaacaggattaagagccgattccagcaggaggaacatgtctacaagtcattcctggggatcctcaataagtaccgcatgcataacaagcccatccaagatgtttacaacgaggtcaccgcactgttacatggccatccagatttactcgaggagttcagtcattttttgcctgatacgcccatgcctcctccgcaggcaggcactactactaaagttaggcatgatgacaataatgctataatgcattctgtcacgagagctcagacagtccaggtgaatcaacaaattatagaatcacccgtgttcaattccaaatctcagacagtccagagggggagagattttccatcaactgctgattgggacaccagtgctgatcgccttgatcttgagcatgatattcaaaaaagttgtattgagaaggagaaaattcgtgatgcctgcccacgtcagcatagaagaggttataaaaggaatgagaagaatgacgagtatgaaaatgaagatttggatgtggagcaatgcggtcacaaatcacaaagaaagatggagggtactggtgatgatacaccaggggatgctacattgtcctcattcaattgttcacacgcacaagagtttcaattttgtgagaaactaaaggcacatctagagcctgaagcttaccaagagttcttgaaatgccttcacatatacaaccaagatattattacaagaaatgaactaaaaagattggtaaaggatatacttcaacattacccagatcttgtgaatggattcaatgacttcttgggtcactgtgaaaatatagatggttttttggaaggaaccttcaataaaaggcaaacatcgcggatggttagacctgtggaaaaagagagatacaaggagaacgagggggatagcgatcctgagaaagagagatacaaggaaagcaaaaattctgaaagagtattgaccttcaattctaaggaaggagcagctcatgaagctagtacattccctagcaaagagaagtataacttatgcaaaccaatatcagagcttgatctatcaaattgtcagcggtgcactccaagttaccgacttttgcctaaaaattatccagtaccttctgcaagcaacaggactgacactgaagcttccgtgctgaatgatcgctgggtatcggtgacctcaggaagtgaagattattcatttaagcatatgcgcaaaaatcagtatgaagaaagcttgtttagatgtgaagatgacatgtttgagctggacatgctgttggaatctgttactgttgcaattgagcgtgttgagaagttggtggaaaggatggaaggcaattcactgaaaccagacagctctatctccctcgatgaacatttgactagtttgaatatgaggtgcattgagcggctatatggtgaccatggacttgatgttattgatgttcttcgaaaaaatgttggtgtgacattaccagttattttaaccaggcttaaacaaaagcaggaggagtggtcaaggtgccagtcagattttaataaagtttgggctgaggtatattcaaaaaattatcacaagtctcttgaccatcgcagtttttatttcaaacaacaagacacaaagaatttgaacacaaaagattaaagaaatcagtgagaagaataggaagggggatgatgtgttacttgctattgctgctgggaataggtggccactagttgccaacatgtcatttgtgtatttggatatggacattcatgaagatctttatcagatcatcaaatactcttgcggagaactatgcaattcttcagatcaagttaacaaagtgatgaggatctggacaacatttttagagcctctgttagggattcatcatagggctcatggcgctgaagatgcagatatggtaaaatcaaagaggcgaactagagaagttggtttggcatgtggcgggaaaacaaataatgctgcagcaaagggtggtaatggctctaaaagtgctggagctgagtctgtggctgaatttatgggtaggaatgaaacaattccgtctatgaaggataacatctttgtatggagtgggtgtacatccatttagtgcatattcggtgtcccacaacaatttaaggcctgaaacagaagagggtgaattatctcctaatggtgatttcaaagaggaacacttctgtgttttcgaagatgaagctgtagatggaacttctaaacaaaatgaaggttctaccagcagatctccccagggtagacctaagaattatctcaagttttcaggcaaggatcattcaggtgcagaaaatgaaggtaacaagagagcccagaggtctgcagaggatagtgaaaatgcatctgaggctgatgaagatatctctggcagtgaatctgctggtgatgaggagtcttctcatgaagatcaggaggaagaagaggatgatatggatcttgatacaaaggcaaaaaatgactgcagagcagaggtaaatagggaggcacagggtttggatggaggaacatcattgtcattttcagaatgtttgcaaagtacagttaaaccaatttccaagtatgtttccactgcattaccaaaccatgaaaagaaactttctcacatattttatggaaatgactcattttatgttctgttcaggctacatcaggttagtttctttttcttcaataacctctatataagtttgtgcttatgtggtctcattggctaacctttattgattgcagatcttttatgagagaatattgtcagctaagacaaactgttccacatcagacaataactggaaagcttcaaggcacataaattctccagatcaatattcaaggtttatcagtgcactatacaacttgcttgatggttcttctgaccacaccaaatttgaagatgactgccgctccatcattgggactcagtcatatgttctctttactatagataaactgatatacaaaattgtgaagcaggcaagctgtgtctatgaccatatctgttttatttgtttaatagttacattattaatttttttctagtctgcagcttcaagcagtaaccatatctgttttgttgtttagtagttacattattaatttttttctactctgcagcttcaagcattagcatctgatgaaatggacaaccagcttctccagctttatttatatgaaaagtcgaggtctcctgggagcttctttgatctggtttatcacgaaaatgcacgagcccttctacatgatgacaacatataccgttttgaatgtcattctgatcctacagaattaactattcagctcatggagtatgggaatgaaaaacctgagttgactgctgtctcatttgatccaaccttttcaccgtatctttataatggttatctgtcaagtattgatgataccaaattggttgatgacgtcttccttaggaggaataagcggaagcaagggaggaatgatgactcccctacttccttgaagatcatggacaatgtcatgtttgctaatggtcttgaatgcaagatatcttgcgaatcttcaaaagtctcttatgtcctcgatactgaggatgtcttatttcgtacgagaaagaggagaagctctatctagtggaaccatgcctgcgctgcaaagacaaattttgtgaaaattaacaccgtaaaatcgatagtttcatttatctcttcagaccgtatagggtcttgtggtagagttatgttaattacaatggcatgcactggtgggatcctcgtgttgttgatctgtcacttcactggaatatattggtgattctttgtgttttactcgctaccaattatatatgagcgtgtagcatgggcgagtcacggaggcagtgttccgtatgtgtttttgcagttcaacgcgctgggttcactgtgttgcgttatgacaggtggaccctaaaacttaaggagtagctaatgcaagagtggggcgaacaaggaactatgagtgtgtttggtttgagtaatgaagtgatccatattcttctcactcctcacttttttatttggtttgtg

SEQ ID NO: 57620 - DNA, 4496 bp, Zea Mays
cacttccagtctctagcgctgttttcgtgtttgctaccgccgcggcttctgcttctcccctccctagggcgggcgtgaatacgtgatccatcatctccatctccgtctgctgtggtgtgctggtttgagagactcgacggctggcgagacgagactgaagggcacaaatctctccgccatctgttagattccatcgtatcccccacgtcttggcgtcgcttcgtcggctgcgacctgcgagaagccggtgccgccgcgccggtggacgaagacgatcaaggattaggaacggcaaggtcccttgcgatccgatccaattcttcattcttcgattccttccttgggcgggcggctcccctcagcttccttccacatggctcgtcgcccgccgccgtcaccccctcccccggcgcaagggaacgggagtgggagcgggagcctcaccaccagagacgccctcgcctatctcaaggccgtcaaggacaagttccaggaaaagcgccacacgtacgagcagttcatccaggtcatgcgtgatttcaagagcgacaggctcgacagcaccggcgtgatcgcccgtgtcaagaccatcttccacggctacccggacctaatcctcggattcaacgccttcctgcccaaggagcatgccatcaggcctctggacctccgcgaggacaagaagcccgtcgattatcccagggccatcagccttgtcaacaggattaagagccgattccagcaggaggaacatgtctacaagtcattcctggggatcctcaataagtaccgcatgcataacaagcccatccaagatgtttacaacgaggtcaccgcactgttacatggccatccagatttactcgaggagttcagtcattttttgcctgatacgcccatgcctcctccgcaggcaggcactactactaaagttaggcatgatgacaataatgctataatgcattctgtcacgagagctcagacagtccaggtgaatcaacaaattatagaatcacccgtgttcaattccaaatctcagacagtccagagggggagagattttccatcaactgctgattgggacaccagtgctgatcgccttgatcttgagcatgatattcaaaaaagttgtattgagaaggagaaaattcgtgatgcctgcccacgtcagcatagaagaggttataaaaggaatgagaagaatgacgagtatgaaaatgaagatttggatgtggagcaatgcggtcacaaatcacaaagaaagatggagggtactggtgatgatacaccaggggatgctacattgtcctcattcaattgttcacacgcacaagagtttcaattttgtgagaaactaaaggcacatctagagcctgaagcttaccaagagttcttgaaatgccttcacatatacaaccaagatattattacaagaaatgaactaaaaagattggtaaaggatatacttcaacattacccagatcttgtgaatggattcaatgacttcttgggtcactgtgaaaatatagatggttttttggaaggaaccttcaataaaaggcaaacatcgcggatggttagacctgtggaaaaagagagatacaaggagaacgagggggatagcgatcctgagaaagagagatacaaggaaagcaaaaattctgaaagagtattgaccttcaattctaaggaaggagcagctcatgaagctagtacattccctagcaaagagaagtataacttatgcaaaccaatatcagagcttgatctatcaaattgtcagcggtgcactccaagttaccgacttttgcctaaaaattatccagtaccttctgcaagcaacaggactgacactgaagcttccgtgctgaatgatcgctgggtatcggtgacctcaggaagtgaagattattcatttaagcatatgcgcaaaaatcagtatgaagaaagcttgtttagatgtgaagatgacatgtttgagctggacatgctgttggaatctgttactgttgcaattgagcgtgttgagaagttggtggaaaggatggaaggcaattcactgaaaccagacagctctatctccctcgatgaacatttgactagtttgaatatgaggtgcattgagcggctatatggtgaccatggacttgatgttattgatgttcttcgaaaaaatgttggtgtgacattaccagttattttaaccaggcttaaacaaaagcaggaggagtggtcaaggtgccagtcagattttaataaagtttgggctgaggtatattcaaaaaattatcacaagtctcttgaccatcgcagtttttatttcaaacaacaagacacaaagaatttgaacacaaaagctctattatctcagattaaagaaatcagtgagaagaataggaagggggatgatgtgttacttgctattgctgctgggaataggtggccactagttgccaacatgtcatttgtgtatttggatatggacattcatgaagatctttatcagatcatcaaatactcttgcggagaactatgcaattcttcagatcaagttaacaaagtgatgaggatctggacaacatttttagagcctctgttagggattcatcatagggctcatggcgctgaagatgcagatatggtaaaatcaaagaggcgaactagagaagttggtttggcatgtggcgggaaaacaaataatgctgcagcaaagggtggtaatggctctaaaagtgctggagctgagtctgtggctgaatttatgggtaggaatgaaacaattccgtctatgaagagcataaaacatgacaggataacatctttgtatggagtgggtgtacatccatttagtgcatattcggtgtcccacaacaatttaaggcctgaaacagaagagggtgaattatctcctaatggtgatttcaaagaggaacacttctgtgttttcgaagatgaagctgtagatggaacttctaaacaaaatgaaggttctaccagcagatctccccagggtagacctaagaattatctcaagttttcaggcaaggatcattcaggtgcagaaaatgaaggtaacaagagagcccagaggtctgcagaggatagtgaaaatgcatctgaggctgatgaagatatctctggcagtgaatctgctggtgatgaggagtcttctcatgaagatcaggaggaagaagaggatgatatggatcttgatacaaaggcaaaaaatgactgcagagcagaggtaaatagggaggcacagggtttggatggaggaacatcattgtcattttcagaatgtttgcaaagtacagttaaaccaatttccaaatcttttatgagagaatattgtcagctaagacaaactgttccacatcagacaataactggaaagcttcaaggcacataaattctccagatcaatattcaaggtttatcagtgcactatacaacttgcttgatggttcttctgaccacaccaaatttgaagatgactgccgctccatcattgggactcagtcatatgttctctttactatagataaactgatatacaaaattgtgaagcagcttcaagcattagcatctgatgaaatggacaaccagcttctccagctttatttatatgaaaagtcgaggtctcctgggagcttctttgatctggtttatcacgaaaatgcacgagcccttctacatgatgacaacatataccgttttgaatgtcattctgatcctacagaattaactattcagctcatggagtatgggaatgaaaaacctgagttgactgctgtctcatttgatccaaccttttcaccgtatctttataatggttatctgtcaagtattgatgataccaaattggttgatgacgtcttccttaggaggaataagcggaagcaagggaggaatgatgactcccctacttccttgaagatcatggacaatgtcatgtttgctaatggtcttgaatgcaagatatcttgcgaatcttcaaaagtctcttatgtcctcgatactgaggatgtcttatttcgtacgagaaagaggagaagctctatctagtggaaccatgcctgcgctgcaaagacaaattttgtgaaaattaacaccgtaaaatcgatagtttcatttatctcttcagaccgtatagggtcttgtggtagagttatgttaattacaatggcatgcactggtgggatcctcgtgttgttgatctgtcacttcactggaatatattggtgattctttgtgttttactcgctaccaattatatatgagcgtgtagcatgggcgagtcacggaggcagtgttccgtatgtgtttttgcagttcaacgcgctgggttcactgtgttgcgttatgacaggtggaccctaaaacttaaggagtagctaatgcaagagtggggcgaacaaggaactatgagtgtgtttggtttgagtaatgaagtgatccatattcttctcactcctcacttttttatttggtttgtg

SEQ ID NO: 57621 - DNA, 4518 bp, Zea Mays
gcgctgttttcgtgtttgctaccgccgcggcttctgcttctcccctccctagggcgggcgtgaatacgtgatccatcatctccatctccgtctgctgtggtgtgctggtttgagagactcgacggctggcgagacgagactgaagggcacaaatctctccgccatctgttagattccatcgtatcccccacgtcttggcgtcgcttcgtcggctgcgacctgcgagaagccggtgccgccgcgccggtggacgaagacgatcaaggattaggaacggcaaggtcccttgcgatccgatccaattcttcattcttcgattccttccttgggcgggcggctcccctcagcttccttccacatggctcgtcgcccgccgccgtcaccccctcccccggcgcaagggaacgggagtgggagcgggagcctcaccaccagagacgccctcgcctatctcaaggccgtcaaggacaagttccaggaaaagcgccacacgtacgagcagttcatccaggtcatgcgtgatttcaagagcgacaggctcgacagcaccggcgtgatcgcccgtgtcaagaccatcttccacggctacccggacctaatcctcggattcaacgccttcctgcccaaggagcatgccatcaggcctctggacctccgcgaggacaagaagcccgtcgattatcccagggccatcagccttgtcaacaggattaagagccgattccagcaggaggaacatgtctacaagtcattcctggggatcctcaataagtaccgcatgcataacaagcccatccaagatgtttacaacgaggtcaccgcactgttacatggccatccagatttactcgaggagttcagtcattttttgcctgatacgcccatgcctcctccgcaggcaggcactactactaaagttaggcatgatgacaataatgctataatgcattctgtcacgagagctcagacagtccagagggggagagattttccatcaactgctgattgggacaccagtgctgatcgccttgatcttgagcatgatattcaaaaaagttgtattgagaaggagaaaattcgtgatgcctgcccacgtcagcatagaagaggttataaaaggaatgagaagaatgacgagtatgaaaatgaagatttggatgtggagcaatgcggtcacaaatcacaaagaaagatggagggtactggtgatgatacaccaggggatgctacattgtcctcattcaattgttcacacgcacaagagtttcaattttgtgagaaactaaaggcacatctagagcctgaagcttaccaagagttcttgaaatgccttcacatatacaaccaagatattattacaagaaatgaactaaaaagattggtaaaggatatacttcaacattacccagatcttgtgaatggattcaatgacttcttgggtcactgtgaaaatatagatggttttttggaaggaaccttcaataaaaggcaaacatcgcggatggttagacctgtggaaaaagagagatacaaggagaacgagggggatagcgatcctgagaaagagagatacaaggaaagcaaaaattctgaaagagtattgaccttcaattctaaggaaggagcagctcatgaagctagtacattccctagcaaagagaagtataacttatgcaaaccaatatcagagcttgatctatcaaattgtcagcggtgcactccaagttaccgacttttgcctaaaaattatccagtaccttctgcaagcaacaggactgacactgaagcttccgtgctgaatgatcgctgggtatcggtgacctcaggaagtgaagattattcatttaagcatatgcgcaaaaatcagtatgaagaaagcttgtttagatgtgaagatgacatgtttgagctggacatgctgttggaatctgttactgttgcaattgagcgtgttgagaagttggtggaaaggatggaaggcaattcactgaaaccagacagctctatctccctcgatgaacatttgactagtttgaatatgaggtgcattgagcggctatatggtgaccatggacttgatgttattgatgttcttcgaaaaaatgttggtgtgacattaccagttattttaaccaggcttaaacaaaagcaggaggagtggtcaaggtgccagtcagattttaataaagtttgggctgaggtatattcaaaaaattatcacaagtctcttgaccatcgcagtttttatttcaaacaacaagacacaaagaatttgaacacaaaagctctattatctcagattaaagaaatcagtgagaagaataggaagggggatgatgtgttacttgctattgctgctgggaataggtggccactagttgccaacatgtcatttgtgtatttggatatggacattcatgaagatctttatcagatcatcaaatactcttgcggagaactatgcaattcttcagatcaagttaacaaagtgatgaggatctggacaacatttttagagcctctgttagggattcatcatagggctcatggcgctgaagatgcagatatggtaaaatcaaagaggcgaactagagaagttggtttggcatgtggcgggaaaacaaataatgctgcagcaaagggtggtaatggctctaaaagtgctggagctgagtctgtggctgaatttatgggtaggaatgaaacaattccgtctatgaagagcataaaacatgacaggataacatctttgtatggagtgggtgtacatccatttagtgcatattcggtgtcccacaacaatttaaggcctgaaacagaagagggtgaattatctcctaatggtgatttcaaagaggaacacttctgtgttttcgaagatgaagctgtagatggaacttctaaacaaaatgaaggttctaccagcagatctccccagggtagacctaagaattatctcaagttttcaggcaaggatcattcaggtgcagaaaatgaaggtaacaagagagcccagaggtctgcagaggatagtgaaaatgcatctgaggctgatgaagatatctctggcagtgaatctgctggtgatgaggagtcttctcatgaagatcaggaggaagaagaggatgatatggatcttgatacaaaggcaaaaaatgactgcagagcagaggtaaatagggaggcacagggtttggatggaggaacatcattgtcattttcagaatgtttgcaaagtacagttaaaccaatttccaagtatgtttccactgcattaccaaaccatgaaaagaaactttctcacatattttatggaaatgactcattttatgttctgttcaggctacatcagatcttttatgagagaatattgtcagctaagacaaactgttccacatcagacaataactggaaagcttcaaggcacataaattctccagatcaatattcaaggtttatcagtgcactatacaacttgcttgatggttcttctgaccacaccaaatttgaagatgactgccgctccatcattgggactcagtcatatgttctctttactatagataaactgatatacaaaattgtgaagcagcttcaagcattagcatctgatgaaatggacaaccagcttctccagctttatttatatgaaaagtcgaggtctcctgggagcttctttgatctggtttatcacgaaaatgcacgagcccttctacatgatgacaacatataccgttttgaatgtcattctgatcctacagaattaactattcagctcatggagtatgggaatgaaaaacctgagttgactgctgtctcatttgatccaaccttttcaccgtatctttataatggttatctgtcaagtattgatgataccaaattggttgatgacgtcttccttaggaggaataagcggaagcaagggaggaatgatgactcccctacttccttgaagatcatggacaatgtcatgtttgctaatggtcttgaatgcaagatatcttgcgaatcttcaaaagtctcttatgtcctcgatactgaggatgtcttatttcgtacgagaaagaggagaagctctatctagtggaaccatgcctgcgctgcaaagacaaattttgtgaaaattaacaccgtaaaatcgatagtttcatttatctcttcagaccgtatagggtcttgtggtagagttatgttaattacaatggcatgcactggtgggatcctcgtgttgttgatctgtcacttcactggaatatattggtgattctttgtgttttactcgctaccaattatatatgagcgtgtagcatgggcgagtcacggaggcagtgttccgtatgtgtttttgcagttcaacgcgctgggttcactgtgttgcgttatgacaggtggaccctaaaacttaaggagtagctaatgcaagagtggggcgaacaaggaactatgagtgtgtttggtttgagtaatgaagtgatccatattcttctcactcctcacttttttatttggtttgtg

SEQ ID NO: 57622 - DNA, 4603 bp, Zea Mays
tgcttctcccctccctagggcgggcgtgaatacgtgatccatcatctccatctccgtctgctgtggtgtgctggtttgagagactcgacggctggcgagacgagactgaagggcacaaatctctccgccatctgttagattccatcgtatcccccacgtcttggcgtcgcttcgtcggctgcgacctgcgagaagccggtgccgccgcgccggtggacgaagacgatcaaggattaggaacggcaaggtcccttgcgatccgatccaattcttcattcttcgattccttccttgggcgggcggctcccctcagcttccttccacatggctcgtcgcccgccgccgtcaccccctcccccggcgcaagggaacgggagtgggagcgggagcctcaccaccagagacgccctcgcctatctcaaggccgtcaaggacaagttccaggaaaagcgccacacgtacgagcagttcatccaggtcatgcgtgatttcaagagcgacaggctcgacagcaccggcgtgatcgcccgtgtcaagaccatcttccacggctacccggacctaatcctcggattcaacgccttcctgcccaaggagcatgccatcaggcctctggacctccgcgaggacaagaagcccgtcgattatcccagggccatcagccttgtcaacaggattaaggccgattccagcaggaggaacatgtctacaagtcattcctggggatcctcaataagtaccgcatgcataacaagcccatccaagatgtttacaacgaggtcaccgcactgttacatggccatccagatttactcgaggagttcagtcattttttgcctgatacgcccatgcctcctccgcaggcaggcactactactaaagttaggcatgatgacaataatgctataatgcattctgtcacgagagctcagacagtccaggtgaatcaacaaattatagaatcacccgtgttcaattccaaatctcagacagtccagagggggagagattttccatcaactgctgattgggacaccagtgctgatcgccttgatcttgagcatgatattcaaaaaagttgtattgagaaggagaaaattcgtgatgcctgcccacgtcagcatagaagaggttataaaaggaatgagaagaatgacgagtatgaaaatgaagatttggatgtggagcaatgcggtcacaaatcacaaagaaagatggagggtactggtgatgatacaccaggggatgctacattgtcctcattcaattgttcacacgcacaagagtttcaattttgtgagaaactaaaggcacatctagagcctgaagcttaccaagagttcttgaaatgccttcacatatacaaccaagatattattacaagaaatgaactaaaaagattggtaaaggatatacttcaacattacccagatcttgtgaatggattcaatgacttcttgggtcactgtgaaaatatagatggttttttggaaggaaccttcaataaaaggcaaacatcgcggatggttagacctgtggaaaaagagagatacaaggagaacgagggggatagcgatcctgagaaagagagatacaaggaaagcaaaaattctgaaagagtattgaccttcaattctaaggaaggagcagctcatgaagctagtacattccctagcaaagagaagtataacttatgcaaaccaatatcagagcttgatctatcaaattgtcagcggtgcactccaagttaccgacttttgcctaaaaattatccagtaccttctgcaagcaacaggactgacactgaagcttccgtgctgaatgatcgctgggtatcggtgacctcaggaagtgaagattattcatttaagcatatgcgcaaaaatcagtatgaagaaagcttgtttagatgtgaagatgacatgtttgagctggacatgctgttggaatctgttactgttgcaattgagcgtgttgagaagttggtggaaaggatggaaggcaattcactgaaaccagacagctctatctccctcgatgaacatttgactagtttgaatatgaggtgcattgagcggctatatggtgaccatggacttgatgttattgatgttcttcgaaaaaatgttggtgtgacattaccagttattttaaccaggcttaaacaaaagcaggaggagtggtcaaggtgccagtcagattttaataaagtttgggctgaggtatattcaaaaaattatcacaagtctcttgaccatcgcagtttttatttcaaacaacaagacacaaagaatttgaacacaaaagctctattatctcagattaaagaaatcagtgagaagaataggaagggggatgatgtgttacttgctattgctgctgggaataggtggccactagttgccaacatgtcatttgtgtatttggatatggacattcatgaagatctttatcagatcatcaaatactcttgcggagaactatgcaattcttcagatcaagttaacaaagtgatgaggatctggacaacatttttagagcctctgttagggattcatcatagggctcatggcgctgaagatgcagatatggtaaaatcaaagaggcgaactagagaagttggtttggcatgtggcgggaaaacaaataatgctgcagcaaagggtggtaatggctctaaaagtgctggagctgagtctgtggctgaatttatgggtaggaatgaaacaattccgtctatgaagagcataaaacatgacaggataacatctttgtatggagtgggtgtacatccatttagtgcatattcggtgtcccacaacaatttaaggcctgaaacagaagagggtgaattatctcctaatggtgatttcaaagaggaacacttctgtgttttcgaagatgaagctgtagatggaacttctaaacaaaatgaaggttctaccagcagatctccccagggtagacctaagaattatctcaagttttcaggcaaggatcattcaggtgcagaaaatgaaggtaacaagagagcccagaggtctgcagaggatagtgaaaatgcatctgaggctgatgaagatatctctggcagtgaatctgctggtgatgaggagtcttctcatgaagatcaggaggaagaagaggatgatatggatcttgatacaaaggcaaaaaatgactgcagagcagaggtaaatagggaggcacagggtttggatggaggaacatcattgtcattttcagaatgtttgcaaagtacagttaaaccaatttccaagtatgtttccactgcattaccaaaccatgaaaagaaactttctcacatattttatggaaatgactcattttatgttctgttcaggctacatcagatcttttatgagagaatattgtcagctaagacaaactgttccacatcagacaataactggaaagcttcaaggcacataaattctccagatcaatattcaaggtattatcaacactctggtttcataaaagacttgttgtatatgacttacatattttagtgcaggtttatcagtgcactatacaacttgcttgatggttcttctgaccacaccaaatttgaagatgactgccgctccatcattgggactcagtcatatgttctctttactatagataaactgatatacaaaattgtgaagcagcttcaagcattagcatctgatgaaatggacaaccagcttctccagctttatttatatgaaaagtcgaggtctcctgggagcttctttgatctggtttatcacgaaaatgcacgagcccttctacatgatgacaacatataccgttttgaatgtcattctgatcctacagaattaactattcagctcatggagtatgggaatgaaaaacctgagttgactgctgtctcatttgatccaaccttttcaccgtatctttataatggttatctgtcaagtattgatgataccaaattggttgatgacgtcttccttaggaggaataagcggaagcaagggaggaatgatgactcccctacttccttgaagatcatggacaatgtcatgtttgctaatggtcttgaatgcaagatatcttgcgaatcttcaaaagtctcttatgtcctcgatactgaggatgtcttatttcgtacgagaaagaggagaagctctatctagtggaaccatgcctgcgctgcaaagacaaattttgtgaaaattaacaccgtaaaatcgatagtttcatttatctcttcagaccgtatagggtcttgtggtagagttatgttaattacaatggcatgcactggtgggatcctcgtgttgttgatctgtcacttcactggaatatattggtgattctttgtgttttactcgctaccaattatatatgagcgtgtagcatgggcgagtcacggaggcagtgttccgtatgtgtttttgcagttcaacgcgctgggttcactgtgttgcgttatgacaggtggaccctaaaacttaaggagtagctaatgcaagagtggggcgaacaaggaactatgagtgtgtttggtttgagtaatgaagtgatccatattcttctcactcctcacttttttatttggtttgtg

SEQ ID NO: 57623 - DNA, 4537 bp, Zea Mays
ctccatctccgtctgctgtggtgtgctggtttgagagactcgacggctggcgagacgagactgaagggcacaaatctctccgccatctgttagattccatcgtatcccccacgtcttggcgtcgcttcgtcggctgcgacctgcgagaagccggtgccgccgcgccggtggacgaagacgatcaaggattaggaacggcaaggtcccttgcgatccgatccaattcttcattcttcgattccttccttgggcgggcggctcccctcagcttccttccacatggctcgtcgcccgccgccgtcaccccctcccccggcgcaagggaacgggagtgggagcgggagcctcaccaccagagacgccctcgcctatctcaaggccgtcaaggacaagttccaggaaaagcgccacacgtacgagcagttcatccaggtcatgcgtgatttcaagagcgacaggctcgacagcaccggcgtgatcgcccgtgtcaagaccatcttccacggctacccggacctaatcctcggattcaacgccttcctgcccaaggagcatgccatcaggcctctggacctccgcgaggacaagaagcccgtcgattatcccagggccatcagccttgtcaacaggattaagagccgattccagcaggaggaacatgtctacaagtcattcctggggatcctcaataagtaccgcatgcataacaagcccatccaagatgtttacaacgaggtcaccgcactgttacatggccatccagatttactcgaggagttcagtcattttttgcctgatacgcccatgcctcctccgcaggcaggcactactactaaagttaggcatgatgacaataatgctataatgcattctgtcacgagagctcagacagtccaggtgaatcaacaaattatagaatcacccgtgttcaattccaaatctcagacagtccagagggggagagattttccatcaactgctgattgggacaccagtgctgatcgccttgatcttgagcatgatattcaaaaaagttgtattgagaaggagaaaattcgtgatgcctgcccacgtcagcatagaagaggttataaaaggaatgagaagaatgacgagtatgaaaatgaagatttggatgtggagcaatgcggtcacaaatcacaaagaaagatggagggtactggtgatgatacaccaggggatgctacattgtcctcattcaattgttcacacgcacaagagtttcaattttgtgagaaactaaaggcacatctagagcctgaagcttaccaagagttcttgaaatgccttcacatatacaaccaagatattattacaagaaatgaactaaaaagattggtaaaggatatacttcaacattacccagatcttgtgaatggattcaatgacttcttgggtcactgtgaaaatatagatggttttttggaaggaaccttcaataaaaacctgtggaaaaagagagatacaaggagaacgagggggatagcgatcctgagaaagagagatacaaggaaagcaaaaattctgaaagagtattgaccttcaattctaaggaaggagcagctcatgaagctagtacattccctagcaaagagaagtataacttatgcaaaccaatatcagagcttgatctatcaaattgtcagcggtgcactccaagttaccgacttttgcctaaaaattatccagtaccttctgcaagcaacaggactgacactgaagcttccgtgctgaatgatcgctgggtatcggtgacctcaggaagtgaagattattcatttaagcatatgcgcaaaaatcagtatgaagaaagcttgtttagatgtgaagatgacatgtttgagctggacatgctgttggaatctgttactgttgcaattgagcgtgttgagaagttggtggaaaggatggaaggcaattcactgaaaccagacagctctatctccctcgatgaacatttgactagtttgaatatgaggtgcattgagcggctatatggtgaccatggacttgatgttattgatgttcttcgaaaaaatgttggtgtgacattaccagttattttaaccaggcttaaacaaaagcaggaggagtggtcaaggtgccagtcagattttaataaagtttgggctgaggtatattcaaaaaattatcacaagtctcttgaccatcgcagtttttatttcaaacaacaagacacaaagaatttgaacacaaaagctctattatctcagattaaagaaatcagtgagaagaataggaagggggatgatgtgttacttgctattgctgctgggaataggtggccactagttgccaacatgtcatttgtgtatttggatatggacattcatgaagatctttatcagatcatcaaatactcttgcggagaactatgcaattcttcagatcaagttaacaaagtgatgaggatctggacaacatttttagagcctctgttagggattcatcatagggctcatggcgctgaagatgcagatatggtaaaatcaaagaggcgaactagagaagttggtttggcatgtggcgggaaaacaaataatgctgcagcaaagggtggtaatggctctaaaagtgctggagctgagtctgtggctgaatttatgggtaggaatgaaacaattccgtctatgaagagcataaaacatgacaggataacatctttgtatggagtgggtgtacatccatttagtgcatattcggtgtcccacaacaatttaaggcctgaaacagaagagggtgaattatctcctaatggtgatttcaaagaggaacacttctgtgttttcgaagatgaagctgtagatggaacttctaaacaaaatgaaggttctaccagcagatctccccagggtagacctaagaattatctcaagttttcaggcaaggatcattcaggtgcagaaaatgaaggtaacaagagagcccagaggtctgcagaggatagtgaaaatgcatctgaggctgatgaagatatctctggcagtgaatctgctggtgatgaggagtcttctcatgaagatcaggaggaagaagaggatgatatggatcttgatacaaaggcaaaaaatgactgcagagcagaggtaaatagggaggcacagggtttggatggaggaacatcattgtcattttcagaatgtttgcaaagtacagttaaaccaatttccaagtatgtttccactgcattaccaaaccatgaaaagaaactttctcacatattttatggaaatgactcattttatgttctgttcaggctacatcagatcttttatgagagaatattgtcagctaagacaaactgttccacatcagacaataactggaaagcttcaaggcacataaattctccagatcaatattcaaggtattatcaacactctggtttcataaaagacttgttgtatatgacttacatattttagtgcaggtttatcagtgcactatacaacttgcttgatggttcttctgaccacaccaaatttgaagatgactgccgctccatcattgggactcagtcatatgttctctttactatagataaactgatatacaaaattgtgaagcagcttcaagcattagcatctgatgaaatggacaaccagcttctccagctttatttatatgaaaagtcgaggtctcctgggagcttctttgatctggtttatcacgaaaatgcacgagcccttctacatgatgacaacatataccgttttgaatgtcattctgatcctacagaattaactattcagctcatggagtatgggaatgaaaaacctgagttgactgctgtctcatttgatccaaccttttcaccgtatctttataatggttatctgtcaagtattgatgataccaaattggttgatgacgtcttccttaggaggaataagcggaagcaagggaggaatgatgactcccctacttccttgaagatcatggacaatgtcatgtttgctaatggtcttgaatgcaagatatcttgcgaatcttcaaaagtctcttatgtcctcgatactgaggatgtcttatttcgtacgagaaagaggagaagctctatctagtggaaccatgcctgcgctgcaaagacaaattttgtgaaaattaacaccgtaaaatcgatagtttcatttatctcttcagaccgtatagggtcttgtggtagagttatgttaattacaatggcatgcactggtgggatcctcgtgttgttgatctgtcacttcactggaatatattggtgattctttgtgttttactcgctaccaattatatatgagcgtgtagcatgggcgagtcacggaggcagtgttccgtatgtgtttttgcagttcaacgcgctgggttcactgtgttgcgttatgacaggtggaccctaaaacttaaggagtagctaatgcaagagtggggcgaacaaggaactatgagtgtgtttggtttgagtaatgaagtgatccatattcttctcactcctcacttttttatttggtttgtg

SEQ ID NO: 57624 - DNA, 4439 bp, Zea Mays
ctgtggtgtgctggtttgagagactcgacggctggcgagacgagactgaagggcacaaatctctccgccatctgttagattccatcgtatcccccacgtcttggcgtcgcttcgtcggctgcgacctgcgagaagccggtgccgccgcgccggtggacgaagacgatcaaggattaggaacggcaaggtcccttgcgatccgatccaattcttcattcttcgattccttccttgggcgggcggctcccctcagcttccttccacatggctcgtcgcccgccgccgtcaccccctcccccggcgcaagggaacgggagtgggagcgggagcctcaccaccagagacgccctcgcctatctcaaggccgtcaaggacaagttccaggaaaagcgccacacgtacgagcagttcatccaggtcatgcgtgatttcaagagcgacaggctcgacagcaccggcgtgatcgcccgtgtcaagaccatcttccacggctacccggacctaatcctcggattcaacgccttcctgcccaaggagcatgccatcaggcctctggacctccgcgaggacaagaagcccgtcgattatcccagggccatcagccttgtcaacaggattaagagccgattccagcaggaggaacatgtctacaagtcattcctggggatcctcaataagtaccgcatgcataacaagcccatccaagatgtttacaacgaggtcaccgcactgttacatggccatccagatttactcgaggagttcagtcattttttgcctgatacgcccatgcctcctccgcaggcaggcactactactaaagttaggcatgatgacaataatgctataatgcattctgtcacgagagctcagacagtccagagggggagagattttccatcaactgctgattgggacaccagtgctgatcgccttgatcttgagcatgatattcaaaaaagttgtattgagaaggagaaaattcgtgatgcctgcccacgtcagcatagaagaggttataaaaggaatgagaagaatgacgagtatgaaaatgaagatttggatgtggagcaatgcggtcacaaatcacaaagaaagatggagggtactggtgatgatacaccaggggatgctacattgtcctcattcaattgttcacacgcacaagagtttcaattttgtgagaaactaaaggcacatctagagcctgaagcttaccaagagttcttgaaatgccttcacatatacaaccaagatattattacaagaaatgaactaaaaagattggtaaaggatatacttcaacattacccagatcttgtgaatggattcaatgacttcttgggtcactgtgaaaatatagatggttttttggaaggaaccttcaataaaatcttttggaatatagggcaaacatcgcggatggttagacctgtggaaaaagagagatacaaggagaacgagggggatagcgatcctgagaaagagagatacaaggaaagcaaaaattctgaaagagtattgaccttcaattctaaggaaggagcagctcatgaagctagtacattccctagcaaagagaagtataacttatgcaaaccaatatcagagcttgatctatcaaattgtcagcggtgcactccaagttaccgacttttgcctaaaaattatccagtaccttctgcaagcaacaggactgacactgaagcttccgtgctgaatgatcgctgggtatcggtgacctcaggaagtgaagattattcatttaagcatatgcgcaaaaatcagtatgaagaaagcttgtttagatgtgaagatgacatgtttgagctggacatgctgttggaatctgttactgttgcaattgagcgtgttgagaagttggtggaaaggatggaaggcaattcactgaaaccagacagctctatctccctcgatgaacatttgactagtttgaatatgaggtgcattgagcggctatatggtgaccatggacttgatgttattgatgttcttcgaaaaaatgttggtgtgacattaccagttattttaaccaggcttaaacaaaagcaggaggagtggtcaaggtgccagtcagattttaataaagtttgggctgaggtatattcaaaaaattatcacaagtctcttgaccatcgcagtttttatttcaaacaacaagacacaaagaatttgaacacaaaagctctattatctcagattaaagaaatcagtgagaagaataggaagggggatgatgtgttacttgctattgctgctgggaataggtggccactagttgccaacatgtcatttgtgtatttggatatggacattcatgaagatctttatcagatcatcaaatactcttgcggagaactatgcaattcttcagatcaagttaacaaagtgatgaggatctggacaacatttttagagcctctgttagggattcatcatagggctcatggcgctgaagatgcagatatggtaaaatcaaagaggcgaactagagaagttggtttggcatgtggcgggaaaacaaataatgctgcagcaaagggtggtaatggctctaaaagtgctggagctgagtctgtggctgaatttatgggtaggaatgaaacaattccgtctatgaagagcataaaacatgacaggataacatctttgtatggagtgggtgtacatccatttagtgcatattcggtgtcccacaacaatttaaggcctgaaacagaagagggtgaattatctcctaatggtgatttcaaagaggaacacttctgtgttttcgaagatgaagctgtagatggaacttctaaacaaaatgaaggttctaccagcagatctccccagggtagacctaagaattatctcaagttttcaggcaaggatcattcaggtgcagaaaatgaaggtaacaagagagcccagaggtctgcagaggatagtgaaaatgcatctgaggctgatgaagatatctctggcagtgaatctgctggtgatgaggagtcttctcatgaagatcaggaggaagaagaggatgatatggatcttgatacaaaggcaaaaaatgactgcagagcagaggtaaatagggaggcacagggtttggatggaggaacatcattgtcattttcagaatgtttgcaaagtacagttaaaccaatttccaagtatgtttccactgcattaccaaaccatgaaaagaaactttctcacatattttatggaaatgactcattttatgttctgttcaggctacatcagatcttttatgagagaatattgtcagctaagacaaactgttccacatcagacaataactggaaagcttcaaggcacataaattctccagatcaatattcaaggtttatcagtgcactatacaacttgcttgatggttcttctgaccacaccaaatttgaagatgactgccgctccatcattgggactcagtcatatgttctctttactatagataaactgatatacaaaattgtgaagcagcttcaagcattagcatctgatgaaatggacaaccagcttctccagctttatttatatgaaaagtcgaggtctcctgggagcttctttgatctggtttatcacgaaaatgcacgagcccttctacatgatgacaacatataccgttttgaatgtcattctgatcctacagaattaactattcagctcatggagtatgggaatgaaaaacctgagttgactgctgtctcatttgatccaaccttttcaccgtatctttataatggttatctgtcaagtattgatgataccaaattggttgatgacgtcttccttaggaggaataagcggaagcaagggaggaatgatgactcccctacttccttgaagatcatggacaatgtcatgtttgctaatggtcttgaatgcaagatatcttgcgaatcttcaaaagtctcttatgtcctcgatactgaggatgtcttatttcgtacgagaaagaggagaagctctatctagtggaaccatgcctgcgctgcaaagacaaattttgtgaaaattaacaccgtaaaatcgatagtttcatttatctcttcagaccgtatagggtcttgtggtagagttatgttaattacaatggcatgcactggtgggatcctcgtgttgttgatctgtcacttcactggaatatattggtgattctttgtgttttactcgctaccaattatatatgagcgtgtagcatgggcgagtcacggaggcagtgttccgtatgtgtttttgcagttcaacgcgctgggttcactgtgttgcgttatgacaggtggaccctaaaacttaaggagtagctaatgcaagagtggggcgaacaaggaactatgagtgtgtttggtttgagtaatgaagtgatccatattcttctcactcctcacttttttatttggtttgtg

SEQ ID NO: 57625 - DNA, 3585 bp, Zea Mays
attatagaatcacccgtgttcaattccaaatctcagacagtccagagggggagagattttccatcaactgctgattgggacaccagtgctgatcgccttgatcttgagcatgatattcaaaaaagttgtattgagaaggagaaaattcgtgatgcctgcccacgtcagcatagaagaggttataaaaggaatgagaagaatgacgagtatgaaaatgaagatttggatgtggagcaatgcggtcacaaatcacaaagaaagatggagggtactggtgatgatacaccaggggatgctacattgtcctcattcaattgttcacacgcacaagagtttcaattttgtgagaaactaaaggcacatctagagcctgaagcttaccaagagttcttgaaatgccttcacatatacaaccaagatattattacaagaaatgaactaaaaagattggtaaaggatatacttcaacattacccagatcttgtgaatggattcaatgacttcttgggtcactgtgaaaatatagatggttttttggaaggaaccttcaataaaatcttttggaatatagggcaaacatcgcggatggttagacctgtggaaaaagagagatacaaggagaacgagggggatagcgatcctgagaaagagagatacaaggaaagcaaaaattctgaaagagtattgaccttcaattctaaggaaggagcagctcatgaagctagtacattccctagcaaagagaagtataacttatgcaaaccaatatcagagcttgatctatcaaattgtcagcggtgcactccaagttaccgacttttgcctaaaaattatccagtaccttctgcaagcaacaggactgacactgaagcttccgtgctgaatgatcgctgggtatcggtgacctcaggaagtgaagattattcatttaagcatatgcgcaaaaatcagtatgaagaaagcttgtttagatgtgaagatgacatgtttgagctggacatgctgttggaatctgttactgttgcaattgagcgtgttgagaagttggtggaaaggatggaaggcaattcactgaaaccagacagctctatctccctcgatgaacatttgactagtttgaatatgaggtgcattgagcggctatatggtgaccatggacttgatgttattgatgttcttcgaaaaaatgttggtgtgacattaccagttattttaaccaggcttaaacaaaagcaggaggagtggtcaaggtgccagtcagattttaataaagtttgggctgaggtatattcaaaaaattatcacaagtctcttgaccatcgcagtttttatttcaaacaacaagacacaaagaatttgaacacaaaagctctattatctcagattaaagaaatcagtgagaagaataggaagggggatgatgtgttacttgctattgctgctgggaataggtggccactagttgccaacatgtcatttgtgtatttggatatggacattcatgaagatctttatcagatcatcaaatactcttgcggagaactatgcaattcttcagatcaagttaacaaagtgatgaggatctggacaacatttttagagcctctgttagggattcatcatagggctcatggcgctgaagatgcagatatggtaaaatcaaagaggcgaactagagaagttggtttggcatgtggcgggaaaacaaataatgctgcagcaaagggtggtaatggctctaaaagtgctggagctgagtctgtggctgaatttatgggtaggaatgaaacaattccgtctatgaaggataacatctttgtatggagtgggtgtacatccatttagtgcatattcggtgtcccacaacaatttaaggcctgaaacagaagagggtgaattatctcctaatggtgatttcaaagaggaacacttctgtgttttcgaagatgaagctgtagatggaacttctaaacaaaatgaaggttctaccagcagatctccccagggtagacctaagaattatctcaagttttcaggcaaggatcattcaggtgcagaaaatgaaggtaacaagagagcccagaggtctgcagaggatagtgaaaatgcatctgaggctgatgaagatatctctggcagtgaatctgctggtgatgaggagtcttctcatgaagatcaggaggaagaagaggatgatatggatcttgatacaaaggcaaaaaatgactgcagagcagaggtaaatagggaggcacagggtttggatggaggaacatcattgtcattttcagaatgtttgcaaagtacagttaaaccaatttccaagtatgtttccactgcattaccaaaccatgaaaagaaactttctcacatattttatggaaatgactcattttatgttctgttcaggctacatcagatcttttatgagagaatattgtcagctaagacaaactgttccacatcagacaataactggaaagcttcaaggcacataaattctccagatcaatattcaaggtttatcagtgcactatacaacttgcttgatggttcttctgaccacaccaaatttgaagatgactgccgctccatcattgggactcagtcatatgttctctttactatagataaactgatatacaaaattgtgaagcagcttcaagcattagcatctgatgaaatggacaaccagcttctccagctttatttatatgaaaagtcgaggtctcctgggagcttctttgatctggtttatcacgaaaatgcacgagcccttctacatgatgacaacatataccgttttgaatgtcattctgatcctacagaattaactattcagctcatggagtatgggaatgaaaaacctgagttgactgctgtctcatttgatccaaccttttcaccgtatctttataatggttatctgtcaagtattgatgataccaaattggttgatgacgtcttccttaggaggaataagcggaagcaagggaggaatgatgactcccctacttccttgaagatcatggacaatgtcatgtttgctaatggtcttgaatgcaagatatcttgcgaatcttcaaaagtctcttatgtcctcgatactgaggatgtcttatttcgtacgagaaagaggagaagctctatctagtggaaccatgcctgcgctgcaaagacaaattttgtgaaaattaacaccgtaaaatcgatagtttcatttatctcttcagaccgtatagggtcttgtggtagagttatgttaattacaatggcatgcactggtgggatcctcgtgttgttgatctgtcacttcactggaatatattggtgattctttgtgttttactcgctaccaattatatatgagcgtgtagcatgggcgagtcacggaggcagtgttccgtatgtgtttttgcagttcaacgcgctgggttcactgtgttgcgttatgacaggtggaccctaaaacttaaggagtagctaatgcaagagtggggcgaacaaggaactatgagtgtgtttggtttgagtaatgaagtgatccatattcttctcactcctcacttttttatttggtttgtg

SEQ ID NO: 57626 - DNA, 3303 bp, Zea Mays
tgggacccatcatgtgcttttgttcctctatgttcacacgcacaagagtttcaattttgtgagaaactaaaggcacatctagagcctgaagcttaccaagagttcttgaaatgccttcacatatacaaccaagatattattacaagaaatgaactaaaaagattggtaaaggatatacttcaacattacccagatcttgtgaatggattcaatgacttcttgggtcactgtgaaaatatagatggttttttggaaggaaccttcaataaaatcttttggaatatagggcaaacatcgcggatggttagacctgtggaaaaagagagatacaaggagaacgagggggatagcgatcctgagaaagagagatacaaggaaagcaaaaattctgaaagagtattgaccttcaattctaaggaaggagcagctcatgaagctagtacattccctagcaaagagaagtataacttatgcaaaccaatatcagagcttgatctatcaaattgtcagcggtgcactccaagttaccgacttttgcctaaaaattatccagtaccttctgcaagcaacaggactgacactgaagcttccgtgctgaatgatcgctgggtatcggtgacctcaggaagtgaagattattcatttaagcatatgcgcaaaaatcagtatgaagaaagcttgtttagatgtgaagatgacatgtttgagctggacatgctgttggaatctgttactgttgcaattgagcgtgttgagaagttggtggaaaggatggaaggcaattcactgaaaccagacagctctatctccctcgatgaacatttgactagtttgaatatgaggtgcattgagcggctatatggtgaccatggacttgatgttattgatgttcttcgaaaaaatgttggtgtgacattaccagttattttaaccaggcttaaacaaaagcaggaggagtggtcaaggtgccagtcagattttaataaagtttgggctgaggtatattcaaaaaattatcacaagtctcttgaccatcgcagtttttatttcaaacaacaagacacaaagaatttgaacacaaaagattaaagaaatcagtgagaagaataggaagggggatgatgtgttacttgctattgctgctgggaataggtggccactagttgccaacatgtcatttgtgtatttggatatggacattcatgaagatctttatcagatcatcaaatactcttgcggagaactatgcaattcttcagatcaagttaacaaagtgatgaggatctggacaacatttttagagcctctgttagggattcatcatagggctcatggcgctgaagatgcagatatggtaaaatcaaagaggcgaactagagaagttggtttggcatgtggcgggaaaacaaataatgctgcagcaaagggtggtaatggctctaaaagtgctggagctgagtctgtggctgaatttatgggtaggaatgaaacaattccgtctatgaagagcataaaacatgacaggataacatctttgtatggagtgggtgtacatccatttagtgcatattcggtgtcccacaacaatttaaggcctgaaacagaagagggtgaattatctcctaatggtgatttcaaagaggaacacttctgtgttttcgaagatgaagctgtagatggaacttctaaacaaaatgaaggttctaccagcagatctccccagggtagacctaagaattatctcaagttttcaggcaaggatcattcaggtgcagaaaatgaaggtaacaagagagcccagaggtctgcagaggatagtgaaaatgcatctgaggctgatgaagatatctctggcagtgaatctgctggtgatgaggagtcttctcatgaagatcaggaggaagaagaggatgatatggatcttgatacaaaggcaaaaaatgactgcagagcagaggtaaatagggaggcacagggtttggatggaggaacatcattgtcattttcagaatgtttgcaaagtacagttaaaccaatttccaagtatgtttccactgcattaccaaaccatgaaaagaaactttctcacatattttatggaaatgactcattttatgttctgttcaggctacatcagatcttttatgagagaatattgtcagctaagacaaactgttccacatcagacaataactggaaagcttcaaggcacataaattctccagatcaatattcaaggtttatcagtgcactatacaacttgcttgatggttcttctgaccacaccaaatttgaagatgactgccgctccatcattgggactcagtcatatgttctctttactatagataaactgatatacaaaattgtgaagcagcttcaagcattagcatctgatgaaatggacaaccagcttctccagctttatttatatgaaaagtcgaggtctcctgggagcttctttgatctggtttatcacgaaaatgcacgagcccttctacatgatgacaacatataccgttttgaatgtcattctgatcctacagaattaactattcagctcatggagtatgggaatgaaaaacctgagttgactgctgtctcatttgatccaaccttttcaccgtatctttataatggttatctgtcaagtattgatgataccaaattggttgatgacgtcttccttaggaggaataagcggaagcaagggaggaatgatgactcccctacttccttgaagatcatggacaatgtcatgtttgctaatggtcttgaatgcaagatatcttgcgaatcttcaaaagtctcttatgtcctcgatactgaggatgtcttatttcgtacgagaaagaggagaagctctatctagtggaaccatgcctgcgctgcaaagacaaattttgtgaaaattaacaccgtaaaatcgatagtttcatttatctcttcagaccgtatagggtcttgtggtagagttatgttaattacaatggcatgcactggtgggatcctcgtgttgttgatctgtcacttcactggaatatattggtgattctttgtgttttactcgctaccaattatatatgagcgtgtagcatgggcgagtcacggaggcagtgttccgtatgtgtttttgcagttcaacgcgctgggttcactgtgttgcgttatgacaggtggaccctaaaacttaaggagtagctaatgcaagagtggggcgaacaaggaactatgagtgtgtttggtttgagtaatgaagtgatccatattcttctcactcctcacttttttatttggtttgtg

SEQ ID NO: 57627 - DNA, 1350 bp, Zea Mays
ggacaagtctttggcagtgtcgcctaaatcccgcgctttttcgccttctgggtgtacaagacggacatagacacgcagcagcagaaggtggtggtcataggcaacgtctctgcagacgcgctcgtcaagaagctcctcaagtccgggaagcacgcggagccgtggccggagcctgctccagccccaccggccgccgacagcccgcccgggcccgacggatctcccggcagcgcaggcaagaagaagaaaaagaagaagggcaacaagagccccgaggcggcgaacaacaagcccgccgatccggcgccagcgcccgcgcccgcgccggcggagggcaacggcggacccaaccccccggagcagcacgacaaggctgacggcggcgcctcgtgcgatgaggcatcggatggtgagcaggataagcctgaggctggcggtggcggcggcaacggctcccctgacgccggagaagccaacgagggcggcaaggtggccccttccgccatgacgccgcacggcccgcagcccatcgcggctgccaccaacagcaatggtggtggtggtggtggcggcggcggcggcaagaagaaaggcaagaaaggtggccacggcaatgccaacagagacggcgccgggccaatcgtcgaggtccagcccccgccggacgcacccacgaagccggccgccggcaactccggccctctcactgtcatcgacgcgggaccgtacccaccaccggcagcggcggcgatgagctacccagggtactacgccgccggggtccacccgccggcgtacgtcatgagctacagcacggcgcacccgagctctgcgctccggagcagcgcgtactaccacccgatggccggtgcgccgtacacaccagggagcggcggcgggtacttctactcgacggcgccggcgccggcgccggcggcgcccggatcgtactacatgttcagcgaggagaacgccaacgcatgcagcgtcatgtgagaagattagacggttaataatcaactcaactcaattattaactgcaagaagatgttgcagagagtggatgtgctagtcattatgctcttgttgtgcccaagaactggttgtcattgcaacgttattttgctgtatctgcaaaatacatggattttgattttggatgtgttattagtttatacattatagtagtttactactatatatgaactgaagcatcatttgcttggttgtttgttattacatttcgcttcatatagctggctattctttgattcatgggcgtaaggccaaggaaacatggtgtcaagaaggtatcttaggaagacaaaggaacagagataatcaaaaaaa

SEQ ID NO: 57628 - DNA, 3100 bp, Zea Mays
ctggcacactgagaatacatatccactgctgttgaacaactcagggacacctgcccatgtccagatgcttaaaaggctacgttcagtgaggatttcttccttgcgctcagattctagtcaaagcttgctgcttgtgtgtgcagtccttgtgtactaccggtatagccctctccccagcccaggtttgccctgtcctaaaacccttctccccatggactggatgagctcagtgacacacccctttcccttgcctacatattctgtaatttggggctagttattttggagctcctcactgcccttaagttccagccaagactctttgcatatgcgaggtgttcatgatgttcttaagtctacacagctccctccctagccacaaaaaaaattggtctatccagaggccgggcacaccatcaaatgtgtctgtggtgaccactctagtcagtttgccgtcttgccgtggctggagcaattcaaaaaggtaccggtccagtttatgcgtgttctgtgatcaccatgtgacagtgaagctcaccaagttgatgctcctaatgctactaccgtatgctgaccggaacagggtcgtgccgtcatgatctagcactgcagacagccccaccgtcgacctgtttaattgaatcgtccctggccaatctcgcgcccgcaccgtgaccaagaaacgttagtgatactctctgcgcacttaatttaaacactaccgtgtgaatactttggaattaaggatcactagacctactgttccaccgccgtcgttggtaacattattctcgggtcgtcgtggatcttttaagcccatactattgatcaccgtggttcagggatcacatgggtaccatttccattgtctgtgttgcaccatggtggccggtccggtgctggatcgccggagttgggtgcgacggtgtcgtggtcgggaagtcgtgaaagtgatgaagtcgaggggcttaagtgcgggagtcagtgactcatgtgaacagaagatcgtgcatgtgttggtttaggcgaggcgtcaaggttctttttgcaaagatgctagcgcgggcgcgtgggccgttggccgcaggacggtttggtcgtgtactgggccgactgggctaggtttggggccatcgctgttacctgtttcgccttttcttttagcagagagattgtaaatggtgccaaaaatcgtagaaatttctaaaatcatgggacaaattttataggatgtctaaaatcaagagccctctagtaaagttggttttcaaatttttaggccagttaccaaatattaagggatttaaaagtgctcttggaaggactgtttggattttaaaaataaaagtacaagccaaaacttatggaaatttttgagtaaccttgttttggtcatttgcgcttgtggtaaaagtttggggctgtttgtaagcgattttctcagaaagctttgcaaggtccataatagataagataaatccctaatccaagaatggattgagcttggaaggtagagccaagtttttcaagtgagatcttgatctttggatgaaatctagtgtgttctagtcccctggtggtcatagcttgaaggtgtatttagaagtgcttaatattgtcgtctttacaagttgcactttcatagcgtgagtataagcattcatggacatacatttcatgtagagtgccaagaaggagattatgaagagaagtctactccagtgtatgttgatcaagtggaggaaccatctaactgggtatcaataaaggaatctagaacctcttctctgcaacaaaggcaagccccggtgcatttgccctttccttatatttttaaaatacttttacacactttaagtctagtgaaatgtgcattaagtttataggaattgcttggaaactacttggtgcattgactaccttgatatccattcctttatagatacttctgatgaagtataaaaatatgatttacaaaaatgcttagccctgcttagatcttgtggatagaggctgtcttttgcaataatgtctagctcaggggttatcctgaggaaggatggcttctacctgcaagaatattttcattgggagcatggtgggatcttactgcaaagttccctataatgctcttttcatcctaaggaacacaaacaatcctaaggatggaagtacttaaatcgggacttgggctatgaacaggtgatgttctacctaggttaattaaggattggatgcgtatgtaggcctgtatgatcaaggactatcttaactggccacatgccctggatatgggacagggtaagcttgaacccggctattccatacatgaaaagacaatcgcgcactgggagtggagagatggcgagagtggcacgtacccttctggcaaaggaccgcctaaaaagggtggtgtgctctcgggtggcgcggacctgttcatgcagtggaggatccatgggaatggttgacatatgcaagggttaagtgctacatatgtcgtgtggttagagatcctcagttgagtaaatcgattcggatcgtcgttatatccccggagagtggagacttgatcgctgccctgcaacctaagtcaggatgcaaacattatgaataaaattgatgttgtattgatgagatggtgaaattagactagatgcaaccagagtctattaatatttaatctggcgttaaaatattgaaagtaaggactcactttagtaagctatttctgcaaaagtatctaagttgattcttgctaagagcctctccttgattcctaaatccagcatatccttgagagtctttttccttagtcgggtaagacttgcgaaagtacatttcgtactcagggttttcgaacccatgttgttgtaggtgatgaggagtactctaagtgttcctgtggctggagggcgtttccagttctggtggaggattagttaggcttgtgtataagctttggagggttcctaccttcctgctattgtaataagttatgcactttgagtatatcaggacttgtaataaatgtaactcttcctatataataaacttcagttttagaaatgaaaagaatgttttataaagtcttccgctc

SEQ ID NO: 57629 - DNA, 1900 bp, Zea Mays
gcgctcagattctagtcaaagcttgctgcttgtgtgtgcagtccttgtgtactaccggtatagccctctccccagcccaggtttgccctgtcctaaaacccttctccccatggactggatgagctcagtgacacacccctttcccttgcctacatattctgtaatttggggctagttattttggagctcctcactgcccttaagttccagccaagactctttgcatatgcgaggtgttcatgatgttcttaagtctacacagctccctccctagccacaaaaaaaattggtctatccagaggccgggcacaccatcaaatgtgtctgtggtgaccactctagtcagtttgccgtcttgccgtggctggagcaattcaaaaagggtcgtgccgtcatgatctagcactgcagacagccccaccgtcgacctgtttaattgaatcgtccctggccaatctcgcgcccgcaccgtgaccaagaaacagtgccaagaaggagattatgaagagaagtctactccagtgtatgttgatcaagtggaggaaccatctaactgggtatcaataaaggaatctagaacctcttctctgcaacaaaggcaagccccggtgcatttgccctttccttatatttttaaaatacttttacacactttaagtctagtgaaatgtgcattaagtttataggaattgcttggaaactacttggtgcattgactaccttgatatccattcctttatagatacttctgatgaagtataaaaatatgatttacaaaaatgcttagccctgcttagatcttgtggatagaggctgtcttttgcaataatgtctagctcaggggttatcctgaggaaggatggcttctacctgcaagaatattttcattgggagcatggtgggatcttactgcaaagttccctataatgctcttttcatcctaaggaacacaaacaatcctaaggatggaagtacttaaatcgggacttgggctatgaacaggtgatgttctacctaggttaattaaggattggatgcgtatgtaggcctgtatgatcaaggactatcttaactggccacatgccctggatatgggacagggtaagcttgaacccggctattccatacatgaaaagacaatcgcgcactgggagtggagagatggcgagagtggcacgtacccttctggcaaaggaccgcctaaaaagggtggtgtgctctcgggtggcgcggacctgttcatgcagtggaggatccatgggaatggttgacatatgcaagggttaagtgctacatatgtcgtgtggttagagatcctcagttgagtaaatcgattcggatcgtcgttatatccccggagagtggagacttgatcgctgccctgcaacctaagtcaggatgcaaacattatgaataaaattgatgttgtattgatgagatggtgaaattagactagatgcaaccagagtctattaatatttaatctggcgttaaaatattgaaagtaaggactcactttagtaagctatttctgcaaaagtatctaagttgattcttgctaagagcctctccttgattcctaaatccagcatatccttgagagtctttttccttagtcgggtaagacttgcgaaagtacatttcgtactcagggttttcgaacccatgttgttgtaggtgatgaggagtactctaagtgttcctgtggctggagggcgtttccagttctggtggaggattagttaggcttgtgtataagctttggagggttcctaccttcctgctattgtaataagttatgcactttgagtatatcaggacttgtaataaatgtaactcttcctatataataaacttcagttttagaaatgaaaagaatgttttataaagtcttccgctc

SEQ ID NO: 57630 - DNA, 1799 bp, Zea Mays
gcgctcagattctagtcaaagcttgctgcttgtgtgtgcagtccttgtgtactaccggtatagccctctccccagcccaggtttgccctgtcctaaaacccttctccccatggactggatgagctcagtgacacacccctttcccttgcctacatattctgtaatttggggctagttattttggagctcctcactgcccttaagttccagccaagactctttgcatatgcgaggtgttcatgatgttcttaagtctacacagctccctccctagccacaaaaaaaattggtctatccagaggccgggcacaccatcaaatgtgtctgtggtgaccactctagtcagtttgccgtcttgccgtggctggagcaattcaaaaagagtgccaagaaggagattatgaagagaagtctactccagtgtatgttgatcaagtggaggaaccatctaactgggtatcaataaaggaatctagaacctcttctctgcaacaaaggcaagccccggtgcatttgccctttccttatatttttaaaatacttttacacactttaagtctagtgaaatgtgcattaagtttataggaattgcttggaaactacttggtgcattgactaccttgatatccattcctttatagatacttctgatgaagtataaaaatatgatttacaaaaatgcttagccctgcttagatcttgtggatagaggctgtcttttgcaataatgtctagctcaggggttatcctgaggaaggatggcttctacctgcaagaatattttcattgggagcatggtgggatcttactgcaaagttccctataatgctcttttcatcctaaggaacacaaacaatcctaaggatggaagtacttaaatcgggacttgggctatgaacaggtgatgttctacctaggttaattaaggattggatgcgtatgtaggcctgtatgatcaaggactatcttaactggccacatgccctggatatgggacagggtaagcttgaacccggctattccatacatgaaaagacaatcgcgcactgggagtggagagatggcgagagtggcacgtacccttctggcaaaggaccgcctaaaaagggtggtgtgctctcgggtggcgcggacctgttcatgcagtggaggatccatgggaatggttgacatatgcaagggttaagtgctacatatgtcgtgtggttagagatcctcagttgagtaaatcgattcggatcgtcgttatatccccggagagtggagacttgatcgctgccctgcaacctaagtcaggatgcaaacattatgaataaaattgatgttgtattgatgagatggtgaaattagactagatgcaaccagagtctattaatatttaatctggcgttaaaatattgaaagtaaggactcactttagtaagctatttctgcaaaagtatctaagttgattcttgctaagagcctctccttgattcctaaatccagcatatccttgagagtctttttccttagtcgggtaagacttgcgaaagtacatttcgtactcagggttttcgaacccatgttgttgtaggtgatgaggagtactctaagtgttcctgtggctggagggcgtttccagttctggtggaggattagttaggcttgtgtataagctttggagggttcctaccttcctgctattgtaataagttatgcactttgagtatatcaggacttgtaataaatgtaactcttcctatataataaacttcagttttagaaatgaaaagaatgttttataaagtcttccgctc

SEQ ID NO: 57631 - DNA, 8720 bp, Zea Mays
gtttcaacattttccctttttgaaaacctcaattgttttgaacatgattcttttagatataaacttattggatcttttattctcaagttaatttggtgcttcttgctcaaatttgcttacatgaaatgatggttcttgggttagcactgagaaaaaccctaagtgacactggggtgtcacaagacattcattctaaatatatttcagacaatgctaattcatgtgagaattgtggtaagtgaggacactctacacaggattgccgctttccgaagtcagtgaatgagcggtcatcgcttgtgaatctccctccaggtggtagagaatgggtattgtatacaatctcctggaggacgcttgcatactaaagagatggtatatcaagtacccataaagctagtcggtcacatgtttcctaccaacctgctagttcttccaaatcaagatatagatgtgatccttggcatgaattggcttcgtcaacatggggcggtaatcaatgctctacaacggacaatacaaatggattcgcctaacggtaactacaagttgctgatctgattatcaacacctaagagagcagtggagagagagtgtgctatcaccgttaaagaggtaaaggatatacctgttgtcaaggaatttccggatgtatttcatgaatatttgcctagtttgcctccagaaagggacgtggaatttgtgatcgaattgcagccgggtactgcacccatatctagaaggtcatacagaatggcacctaaggagttagcaaaactaaagactcaattgtaggacttgctcaacaaagggttcattcgcccaagttcatcaccttggggttgtcctgctatctttgtgaaaaagaaggatcaaacactctggttgtgtgttgattaccagcaacttaacgaggtgaccatcaaaaacaaatatcctctccctcgtattgatttgttgtttgatcaactttctggagataaagtgttttctaagattgaccttagatcgggttatcaccagataagaattcgtcctaaagatgttcccaagactgccttcactacccaatatggtctatatgaatatttggtgatgccttttggtttgactaatgctccacctcatttcatgtacttaatgaactcggtgttcatgcccaagcttgacaagtttgtggtggtcataattgatgacatcttgatatactccaagactaagtaagaccatgcagagcacttgcgtatcgttctgacaagattacgagaacaccaactttatgccaaattcagcaagtgtgaatttcggtaggataccattccattcttgggtcatatcttgtctgccaaaggtgtatcggtcgacccaagtaaagtcaaggacattatagaatggaagccacccaccacagtgcatcaggtctgaagtttccttggaatggcggggtattaccgtcgttttattccagatttctccaagatagctaagcctattactgagttgctcaagaatcatgtcaaatttgtgtggtcatccgagtgcaacaaagcttttgaagaacaaaagaagttgctcaagaatcatgctctaagctggatgtcccagtgtaattgtcttcggtgaagcctttaactatcaccttgtgtcaggaaatggaaaggatgaaattggggataattcagcatgaaaccttagccaatcttgttcttgaatcaactatccatagccaaatcattgaggctcaaaaggtgaataagggtatagctcatatcaaagaacgagttgaagcaggaaaggctacatgttttagaatcgacgaaaagggtgtcctttggttcaaacaccgtttggtagttccaaaggtacttgaattacgtcaacaaatactatacgaagctcatttgtctcggtattccattcactcatgaaacaataagatgtatcaagatccgaagcaaaggttttggtggaccaagatgaagacagagattgctcggtatgtggctaaatgtgacatttgtcaacgtgtgaaagccgttcatttgaaatccgccgggccgttacaacctttgcccattctagcctagaaatgggaagatattagcatggacttcattgttggtttacccaaaacatcaaaagggtatgactctatctgggtgattgtggatcgtctcaccaagttggctcatttcctgccagtaaacaaaagcaacttagtacttgcacatgctaagttgtatatcgcttgtattctgagtttgcatggtatacctaagaccattgtgttggatcggggtccgcaatttgttgccaagttttgggagagttgcacaaatctttgggtaccaagctaattcacagttcagcttatcatccgcaaaccagtggtcaaactgagaggatgaatcagatcctggaagatatgttaagagcttgtgttctcgcttactctactaagtgggatgaatgcatgccattggccaagttctcatataataatagttatcaagaaagtataaagatggcaccttttgaagcattatatggtcgaaggtgtaaactcctctgaattggtccgaaccaggtgaaaggtgtttctttgggccaaatttggtaaaagaagcagaaaaaaggtcaagctgattcagcatcacttgaagatagctcaacatcaccaaaagagttatgccgataaaagacgtcgatctttgattttccacgtcagtgatcatgtgtatttaaaaaagtgtcaccaatgaagggcgtgactcaatttggtgtcaaagggaaacttgcacctcgctatgttggttcatttccagtgcttgaacgttgtggacttgtggcttataaggtgcagttaccaaagaatctttcaaccgtgtacaacgtgtttcacgtatctcagttgaagaaatgccttcgcgtccccgaacaagtagttgaggtttcagatgttaaccttgaacctgatcttgctttgagtatcctattcgggttctagatcaaaaagattagttcacacgaagaaagattatcaagttctacaaaatacaatggaaccaacacttcgcagatgaagctacttgggaatcagaagactatctaatggagcattttcctcagtttttagattcctgtaaatattaagccttgtgtattttgtctttgatgtaaacccacaggggcacacccctaccttgtaagaacaacggtagaataagatcgtgaacaacttctatgtgtggagatgtccaagttttataggaaaacttggagtaaactgcaaaaattcagttttggtgcaatttgggatttgctgaaaataatgtcagttagctaactttgggctgttataacttttggcttctagacattttggtgctgctcactgtagcaaagttgtagggctaccttaggtgtacaaacttgtttaagttaattaaccctaaagccatatggaattaggagtaaaactggtcaaaggaggggctgacaggtttggatttcagacttagtgtaattgtccaagtctgaatttcagtgtgtgtggctcaactttggaactttgtggtgcctgatccatgtggttttggactgaggttgctgtagcaagtttgaagaccatatgttgttgtgcaagtttggttaaaggttatacccctaaagctaattggaacttggagaaaaggtgatccaaattggacctgtcagacttgtgatttctggacttagattcagaaattgaagtgcagtttcatcatttttagcaaacttcagatctctgttgtgataaacttctgatgttatggcctgcactctccatagcaaagtgttagagggtagtgtggtgagtaatttccattgaggttcatcgccttgagcttgtttagaaaggggagaaaatgctcctccaagtcgctcacattggtgtgctgaaccaaattcagctaggctaaattgatgagttcgctggtcctgccccaactttggtgctcgataactttatgtcacacccggtttttggaaggtaaaccgaatgcgaaccatgtacgtgccaggatcagaactcacgtatatagcgattacataattggacatcatcacacaatgcttgaattaaatagcgcaaaggtacttagttacatcaggatgtccgagacatccacagagtctattacataaacatagtgtttaaccataatatcaaagtgcggagtaacgaaacgtagaatgtaagcctagacaggcagctgactgggggtttgccactaaagtaaactagaactcgttgtagtcctggaactcctcaaagtcctccatgttgctagcttcaccttctgagcactgagaacagtggggacgacctggggtggggtggtgttggtcacttgttctcaaatactatgaatcaagaacaaggcaacacaaaatgttaaatgttaaagcacttcatccttcgaagcattatttcccttaggatataaagatcttcagacgaaggttatgaaggatgtaccttcatcatcgcaatatatgttaataaaagaagaagcatataaaatataaaagacaagataaataatcatataacactattaattcgttcttattatattatcatgaaaagacagaaacaatattgaattacaaatgtaccttcggcttgatagaaggtaaaagtacaagcgtgacgcacaagtgaatacaaaccagcgtgaacagtactagggtattgttcatctatttataggcacaggacgcatcctgtgtaaaattacattcatgcccttcatattcactattaacttaagaacaatctgtcaaggactagatagctttttcctccttaagtcggttcctctttcagctactgagccgaagcttccttgcgcgtagcttcggcgctgattcaaccttcgttccgatcctgcttttcatatcgtatatgcttttaatccgagcccgaaggtacctgttcatatgtcatacttggaagacattgttaattcatgtttttgaggaccttcgaaggacgaaggcccccaatagtagcccctcgcagtattaatttgttaagataacgaattcaaactgcgacatggacgaaggccttaagccgaaggtccaaaaaacaccttccctttgctaaaatagcaacagtcaatgacagacggggccctccaatttagagcgcactcggcgtataaataggaactcacaccgactgcacttgatacactacttgtgtcatttgccttattttctcaattttatagctcttgctcactagcgcttgatagtttttcaagctctccgagcttcggtttagaaaacgagttttcaccatttctaaagaaaagatgtctcaagacaagaagattactgctgagacgaaactgactgaagaggagaagctttttgaggagaagaaggttgtgagtccttatattgttggatttgttgagtcaatggcaaaaacaaatacagagaagattactaaggagatactggaaggcttgtctgaagatactgatgatagtgatagctatgacgttgaaactgggggtgaagattctgaggatcggccctagaggccaagtcattcaattttcggaaaatcgaccatcaaacaaagtcatcttgagaacatgagaggaaggtatttttgggatatctctatcgtgagagctggcggagacaacaacgtccctgcccctgaagaaaatgaagttgtgatttaccgaagcttcttcaaggccgaacttcggttccctttgagtaagtttgtagttgaagtgctgaaaacccaacaaatcttccttcatcagatcacccccgaagccataataaggatgggggtttttgtctgggcagtaaggagccaagggctagagccaagcacgaagtgcttctgcggcatgcacgaacttctatatgaaacgaaggccatgggtaaggaacagtaccacaataacttcggatgctatagatttatcacctgtcccaacgcaagccacccagtgccaacatttcggaagagatggcccggagcttggatggaagaatagttttatgtgaagaataatttgtcagggagggaagatattaaggaagtcatcatgcgccccatttggtcccgcttcagccgccgaaagccgaaggttaaaattgatgatgccgccgaagcgtgtcagaaagccttcagtactgtatgctccttcattggtacaagggatttaattcaagaacatatagcattcaaagtatggccacttgtggaaaactgggaaatgccgaaggaaaccatcactaactctaccgaaggtgatctggtccggctgaagtatacattcaggtttggggataagtttgatgaaccaaatgatgattggctaaagtgcatcaaagctacaagtgatgaactgcttggagcatattccaaagcggaaggtaatgcgctgtctgcagccttcggaggtcggggaaaaagagaatgaacagagtttttgacgccattggcttcgtctacctcgattatcgctacccgctgcggggacagggggagaagagaaaggctgctgcttcggccgccccagttgagcctgcgccgaagggcaagaagatgaaggttctaactcaccggccacgatacatcgaaccggccgcgatacctgagtttagcgaaggggcctcttcggccaccaaaacaaaagaaactattcctcctgcgcataggactgaagagccggccataatgctgaagttacctttagttgaactagttgaaacgaaggctgacaaagataaggctgaaggatcaaaaattgaagaaatagcaaaaatgccagagatcttgagcccttcaatagaggcaatagtgccgaagacacacaagaattttgccacaactcctaagaggagaaggatggcgattgttctagatgttgtattagaaatagcaaaatccttgagttctactccaagaaaaattaccaaagctttgaaagcacaacccaaagctgaaacaaagcaggcagaagtcgatgctataacaactcaagttgaaaccgaagctgggccctcagaacccgccggaacagagcctgtcgaaactgaagaaaaagtggcagagaaaattgcatctgaaaaagttgaagctgctgctaccgaagcttcaaaagagagcattgattacatcattcgtcatgcttcggggaagagactttctcaagaagaaaagctagaagcactccactatgcccagaaattaaaatacccgaagggggcattagtgtataatggtagcggggaagaagattttttgtactgtctcccggataataaagagatatccgtttgctgggagataggtagaagcatcggattcccgaagctagaagatgtcctttcaatattatcaaaggatgagcttgctgacagtttggcgtataatagcataaaggtataaaagttatattaaaataaaaattggggtattttatttgtcatacttattctttcctttacttgcagggcctaattcttggcaatgcccttagagcatagaaaaacattgaagatgaaggttatacaatggctctgaacaatctttgttcagaagtaatcgaattaaggaacgaaggtcttgaaaaagataaaatcttgatttcattggtgaacaaagtgaaagaagatgaagctagtttcaaggctcaagccaaaatccaaaagaatgaaatcgaagatcttcggaaatagttggtcgaagccaaagaaaaatgcggtctcgcagaagctaaccgagatatcagtgaatattggaaaaaccatttagagaagacagttgaggaacttcgcgcatccaaagaaagatgttttgaaaaatccttgggctgcgtggagaaaataaaggctagcttcaccaacgtgggcgcctattccaacaaagataacttcatacgaggcgaccctaaaggtgttatctaatggataagtggagaggctgaagcttttgaagaaattttaagtgatcgcggggatgtctgcgcgttctccggtgcaaggggaatttcagccatcctggagaaggcgggatgcgaccatgtcaagaccctagcccaggccgaagttgccttctccgtggatgatacaaaggatcccttagctgaagcaagtttaatgggcgggaaattttacaatgacatctgggtaaatggtggccgagaaatggctcacaaaattatgaagaaaagtgaaaaagatattcatgacgcccaattggaagcgaaacaagctgaggaagctgcagagcgtgaaagacgtataggtatttgtttcgtggcttttagcttcggcatttgtttttatggcttcgaactaattaacgttttctactgtagctgaattatctctgccaccggaaccgtttgatcccctggccgatccagaaacgaaggaagcattggagattattaatatagccgaatctgttgttgacaaagttgttaacaaattgctaaatgaagttgcggagaaggtcctgaaggaagactagtacttattgtaaaaacatttttagacgatcaatgtaactttgttgcaacaagactgtaatattcgatgtatataattttgaatttaatatgtaaattatttgtaattcacttctttgtgatgcatgaaacttttatatacataccgtttttgagccttcg

SEQ ID NO: 57632 - DNA, 2640 bp, Zea Mays
ctcgttgctccgtttgagctcaaatttttacagcagattcctgactccattctggggtgacccaaacttgattaggtaccttggagaggatcagcaaggacttgggaaaggccaatgtgttgaggaggagcagcaagggcatccataacaggaaggagatcaagtccgagtcggctgcgactctatctcaggttccaggaccagtctgcactaaaattgacgcccaagatacatccggactccgattgcgacggactggatatggttggaaagacaacgagattatctaaccaacccaactggttccactctaaaattcatctggagtccacgggaatcgtcgaaacaacttagcgttcagattctgttttggtgctgcgacaccgtctgttgggtcgttgggccgtgtatcgcgtcggagcccattaggggcgagttcagggctacgcacgccctaatactctatttattcagcagccgccgccacatttaggttttggttttgcttagatcaattctgtcatcgaacagtgtcgtcgtcatcggcttgtgagaccccctcccgtaatcaatacaattttggttgcgtttctttcttgtttttgcttgtgttcttgattgcgcttgtagggataagccttcgtggcgaggtcattcgtgtgtcacgggtgataaccaacggagccgtggtgtagttattgcgaggaaccgttcgctcggagccttggatcatcaacgtcgagatctccactcaatcaaattatcgtatctcacggaagatcgggccgcgtctactatcaattggtatcagatttccaggttgcccgtgaggtataattctacctttagattagttttgtttcatcccatagtccacaaaaagccaaaaaaaattacgatcagtttattccgacctaaaaccatcgccttagcctttgcacaattcagttttagagtccgtagttctgagttcgtgttctagttgagtttggttgctggattagatttgttttggttcagtttgattgtatccatccgcttccatcctacaaaactgaccctatctacaaaacagatcctatctctacaaccgaccctatccacaaaacagatcctatctctacaaccgatcctattcacaaaatagatcctatctctacaaccgacaatatccacaaaacatatcctatctctaaaaccgaccatatccacaaaacagatcctatatctaaaccgaccatatccaggaaacaaatcctatctctaaaactgaccctgtgctccatagccgtcgcttcggttcctgccgatttgtgcctttgaaaaccataacttgaggtaccttccataaaacaggcataacttttcgctgggtgctccgtttgagctcaaatttttacaacagattcctgactccattttggggtgacccaaacttgattaggtaccttggagaggaccaacaaggacttgggaaaggccaaggtgttgaggaggagcagcaagggcgtccacaacaggaaggagatcaagtccgagtcggctgcgactctatctcgggttccagaaccaatctgcactaaaatggatgcccaagatgcatccggactccgattgcgacaaactggatatggttggaaagataacgagattatctaaccaacccaactggttccaccctaaaattcatcaggagtccacgggaatcgtcgaaacaactcagcgttcagattctgttttggtgctgcgacaccgtctattgggccgttgggccgtgtatcgcgtcggagcccattaggggcgagtctagggctacgcacgccctaatactctatttattcagtagcctccgccatatttaggtttgggttttgcttagatcaattctgtcatcgaacagtgtcgccgtcatcggcttgtgagaccccctcacgtaatcaatacaattttggttgcgtttctttcctgttcttgcttgtgttcttgattgcgcttgcaaggataagccttcatggcgaggtcattcgtgtgtcacgggtgataaccaacggaggcgtggtgtagtgattgcgaggaaccgttcgctcggagccttggatcatcaacgtcgagatctccactcaatcaaattatcgtatctcacggaagatcgggccgcgtctactatcaattgttatcagatttccaggttgcccgtgagatataattctacctttagattagttttgtttcgtcccatagtccacaaaaagccaaaaaaaattacgatcagtttattccgacctaaaaccatcgtcttagcctttgcacaatttagttttagagtctgtagttctgagttcgtgttttagttgagtttggttgctggattagatttgttttggttcagtttgattgtatccatccgcttccatcctacaaaaccgaccctatctacaaaacagatcctatctctacaaccgaccctatccacaaaacagatcctatctctacaaccgatcctattcacaaaatagatcatatctctacaaccgacaatatccacaaaacatatcctatctctaaaaccaaccatatccaaaaaacagatcctatatctaaaccgaccatatccagaaaacaaatcctatctctaaaact

SEQ ID NO: 57633 - DNA, 629 bp, Zea Mays
ggaggagcagcaagggcgtccacaactggaaggagatcaagtccgagtcggctgcgactctatctcgggttccaggaccagtctgcagtaaaatgaacgcccaagatgcatccggactccgattgcgacagacttaatatggttggaaagataacgagattatctaacaaacccaactggttccaccctaaaattcatccggagtcaacgggaatcgtcgaaacaactcagcgttcagattctgttttggtgctgcgacaccatctgttgggccgttgggtcgtgtatcgcgtcggagcccattaggggcgagtccagggctacgcacgccctaatactctatttattcagcagccgccgccaaatttaggtttgagttttgcttagatcaattctgtcatcgaacagtgtcgccgtcatcggcttgtgagaccccctcccgtaatcaatacaattttggttgcgtttctttcctgttcttgcttgtgttcttgattgcgcttgcagggataagccttcgtggcgaggtcattcgtgtgtcacgggtgataaccaatggagccgtggtgtagtgattgcgaggaaccgttcgctcggagccttggatcatcaacgtcgagatctccact

SEQ ID NO: 57634 - DNA, 1992 bp, Zea Mays
atcaagtccgagtcggctgcgactctatctcgggttccaggaccagtctgcactaaaatggacgcccaagatgaatccggactccgattgagacggtctggatatggttggaaagataacgagattatctaaccaacccaactggttccaccctaaaattcatccagagtcaacaggaatcgtcgaaacaagtcagcgttcagattctgttttggtgctgcgacaccgtctgttgggccgttggcccgtgtatcgcgtcggagcccattaggggcgagtctagggctacacatgccctaatactctatttattcagcagtcgccgccacatttaggtttgggttttgcttagaacaattctatcatcgaacagtgtcaccgtcatcggcttgtgagaccccctctcgtaatcaatacaattttggttgcatttctttcctgttcttgcttgtgttcttgattgcgcttgcagggataagccttcgtggcgaggtcattcgtgtgtcacgggtgataaccaatggagccgtggtgtagtgattgcgaggaaccgttcgctcggagccatggatcatcaacgtcgagatctccactcaatcaaattatcgtatctcacggaagatcgggccgcgtctactatcaattggtatcagatttccaggttgcccgtgaggtataattctacctttagattagttttgtttcgtcccatagtccacaaaagccaaaaaaattacgatcagtttattccgacctaaaaccatcgctttagcctttgcacaattcagttttagagtcctcagttctgagttcgtgttctagttgagtttggttgctggattagatttgttttggttcagtttgattgtatccatccgcttccatcctacaaaaccgaccctatctacaaaacagatcctatctctacaatcgaccctaaccacaaaatagatcctatctctaaaaccgatcctattcacaaaatagatcctatctctacaaccgacaatatccacaaaacatatcctatctctaaaaccgaccatatccacaaaacagatcctatatctaaaccgaccatatccagaaaacaaaccctatctctaaaactgaccctgtgctccatagccgtcgcttcggttcctgccgatttgtgcctttgaaaaccataacttgaggtaccttccataaaacgggcataaattttcgctcggtgctccgtttgagctcaaatttttacagtagattccttactctattctggggtgacccaaacttgattaggtaccttggagaggaccagcaaggacttgggaaaggccaagatgttgaggaggagcaccaagggcgtccacaaccggaaggagatcaagtccgagtcggctgcgactctatctcgggttccaggacgagtctgcactacaatggacgaccaagatgcattcagactccgattgcgacggactggatatggttggaaagataacgagattatctaaccaacccaactagttccaccctaaaattcatccagagtcaataggaatcgtcgaaacacgtcagcgttcagattatgttttggtgctgcgacaccgtctattgggccgttgggccgtgtatcgcgtcggagcccattaggggcgagtccagggctacgcacgccctaatactctatttattcagcagccaccgccacatttatgtttgggttttgcttagatcaattctatcatcgaacagtgtcgccgtcatcggcttgtgagaccccctcccgtaatcaatacaattttggttgcgtttctttcctgttcttgcttgtgttcttgattgcgcttgcagagataagccttcctggcgaggtcattcgtgtgtcacgggtgataacaaatggagccgtggtgtagtgattgcgaggaaccgttcgctcggagccatggatcatcaacatcgagatctccactcaatcaaattatcgtatctcacagaagatcg

SEQ ID NO: 57635 - DNA, 767 bp, Zea Mays
ctatctctacaaccgaccctatccacaaaatagatcctatctctacaaccgatcctattcacaaaatagatcctatctctacaaccgacaatatccacaaaacatatcctatctctaaaaccgaccatatccacaaaacagatcctatatctaaaccgaccatatccagaaaacaaatcctatctctaaaactgaccctgtgctccatagccgtcgcttcggttcctgccgatttgtgcctttgaaaaccataacttgaggtaccttccataaaacgggcataactttttcgctcggcgctccgtttgagctcaaatttttacagcagattcctgactccattatgggtgacccaaacttgattaggtaccttggagaggaccatcaaggacttgggaaaggccaaggttttgaggaggagcagcaagggcgtccacaacaggaaggagatcatgtcccagtcggctgcgactctatctcgggttccaggaccagtatgcactaaaatggacgcccaagatgcatccggtctccgattgcgacggactggacatggttggaaagataacgagattaaccaccccaactggttccaccctaaaattcatccggagtcaacgggaatcgtcgaaacaagtcagcgttcagattctgttttggtgctgcgacaccgtctgttgggttgttgggtcgagtatcgcgtcggagcccattaggggcgagtccagggctacgcacgccctaatactctatttattcagcagccg

SEQ ID NO: 57636 - DNA, 4932 bp, Zea Mays
tacctcacgggcaacctggaaatctgataccaattgatagtagacgcggcccgatcttccgtgagatacgataatttgattgagtggagatctcgacgttgatgatccaaggctccgaccgaatggttcctcgcaaacactacaccacggctctattggttatcacccgtgacacacgaatgacctcgccacgaaggcttattcctgcaagcgcaatcaagaacacaagcaagaagaggaaagaaacacaaccaaaattgtattgattacgggagggggtctcacaagccgatgacggagacactgttcgatgacagaattgatctaagcaaaacccaaacctaaatgtggcggcggctgctgaataaatagagtattagggcgtacgtagctctggactcgcccctaatgggctcgaacgcgatacacagcccaacagcccaacagacggtgtcgcagcaccaaaacagaatctgaacgctgacttgtttcgacgattcccgttgactccggatgaattttagggtggaaccagttgggttggttagataatctcgttatctttccaaccaaatccagtccgtcataatcggagtccggatgcatcttgggcgtccattttcgtgcagactggtcctggaacccaagatagagtcacagccgactcggacttgatccccttcctgttgtgtacgcccttgctgctcctcatcaacaccttggcctttcccaagtccttgctggtcctctccaaggtacctaatcaagtttgggtcaccccagaatggagtcaggaatctgctgtaaaaatttgagctcaaacggagcaccgagcgaaaagttatgcccgttttatggaaagtacctcaagttatggttttcaaaggcataaattggcaggaaccgaagcgacggctatggagcatagggtcagctttagagataggatttgttttctggatatggtcggtttagatataggatctgtttcgtggatatggtcggtttttgagatatgatatgttttgtggatattgtcggttgtagagataggatatactttgtgaataggatcggttgtagagatatgatatgttttgtggatagggtcggttgtagagataggatctgttttgtagatagggtcggttttgtaggatggaagcggatggatacaatcaaactgaaccaaaacaaatctaatccagcaaccaaactcaactagaacacgaactcagaactgcggactctaaaaaactgaattgtgcaaaggctaaggcgatggttttaggtaggaataaactgatcgtaattttttttggctttttgtggactatgggacgaaacaaaactaatctaaaggtagaattatacctcacgggcaacctggaaatatgataccaattgatagtagacacggcccgatcttccgtgagatacgataatttgattgagtggagatctcgacgttgatgatccaaggctccaagcgaacggttccttgcaatcactacaccacggctccgttggttatcacccgtgacacacaaatgaccttgccacgaaggcttatccctacaagcgcaatcaagaacacagcaagaaatggaaagaaacgcaaccaaaattgtattgattacgggagggggtctcacaagccgatgacggcgacactgttcgatgacagaattgatctaagcaaaacccaaacctaaatgtggcggcggctgctgaataaatagagtattagggcgtgcgtagccctggactcgcccctaatgggctccgacgcgatacacggcccaacagcccaacagacggtgtcgcagcaccataacagaatctgaacgttgacttgtttcgacgattcccgttgactccggatgaattttagggtggaaccagttgggttggttagataatatcgttatctttccaaccatatccagtccgttgcaatcggaatcaggatgcatcttgggcgtccattttagtgcagactggtcctggaacccgagatagagtcgcagccaactcggacttgatctccttcctgttgtggacgcccttgctgctcctcctcaacaccttggcctttcctaagtccttgctggtcctctccaaggtacctaatcaagtttgggtcaccccagaatggagtcaggaatctgctgtaaaattttgagatcaaacggagtaccgagcgaaaagttatgcccgttttatggaaggtacctcaagttatggttttcaaaggcacaaatcggcaggaactgaagcgacggctatggagcacagggtcagtcttagagataggatttgttttctggatatggtcggtttagatataggatctgttttgtggatatgatcgattttagagataggatatgttttgtggatattgtcggttgtagagataggatctattttgtgaataggatcggttgtagagatatgatttgtttttgtggatagggttgattgtagagataggatctgttttgtagatagggtcggttttgtaggatggaagcggatggatacaatcaaactgaaccaaaacaaatctaatccagcaaccaaactcaactagaacacgaactcagaactgcggactctaaaactgaattgtgcaaaggctaaggcgatggttttaggtcggaataaactgatcataattttttttggatttttgtggactatgggacaaaacaaaactaatctaaaggtagaattatacctcacgggcaacctggaaatctgataccaattgatagtagacgaggcccgatcttccgtgagatacgataatttgattgagtggagatctcgacgttgatgatccaaggctccgagcaaatggttcctcgcaatcactacaccacggctcctttagttatcacccgtgacacacgaatgacctcgccacgaaggcttatccctgcaagcgcaatcaagaacacaagcaagaacaggaaagaaacgcaaccaaaattgtattgattacgggagggggtctcacaagccgatgacggcgacactgttcgatgacagaattgatctaagcaaaacccaaacctaaatgtggcggcggctgctgaataaatagagtagtagggcgtgcgtagccctggactcgcccctaatgggctccggcgcgatacacggcccaatggcccaacagacggtgtcgcagcaccataacaaaatctgaacgctaacttgtttcgacgattcctgttgactccggatgaattttagagtggaaccagttgggttggttagacaatctcgttatctttccaaccatatccagtccgtcgcaatcggagtccggatgcatcttgggcgtccattttcgtgcagactggtcctggaacccaagatagtcgcagccgactcggacttgatccccttcatgttgtggacgcccttgctgctcctcatcaacaccttggcctttctcaagtccttgctggtcctctccaaggtacctaatcaagtttgggtcaccccagaatggagtcaggaatctgctgtaaaaatttgagatcaaacggagtaccgagcgaaaagttatgcccgttttatggaaggtacctcaagttatggttttcaaaggcacaaatcggcaggaactgaagcgacggctatggagcacagggtcagtcttagagataggatttgttttctggatatggtcggtttagatataggatctgttttgtggatatgatcgattttagagataggatatgttttgtggatattgtcggttgtagagataggatctattttgtgaataggatcggttgtagagatatgatttgttttgtggatagggttggttgtagagataggatctgttttgtagatagggttggttttgtaggatggaagcggatggatacaatcaaactgaaccaaaacaaatctaatccagcaaccaaactcaactagaacacgaactcagaactgtggactctaaaactgaattgtgcaaaggctaaggcgatggttttaggtcggaataaactgatcgtaattttttttggatttttgtggactatgggacgaaacaaaactaatctaaaggtagaattatacctcacgggcaacctggaaatctgataccaattgatagtagacgcggcccgatcttccgtgagatacgataatttgattgagtggagatctcgacgttgatgatccaaggctccgagcgaatggttcctcgcaatcactacaccacggctcctttagttatcacccgtgacacacgaatgacctcgccacgaaggcttatccctgcaagcgcaatctagaacacaatcaagaacaggaaagaaacgcaaccaaaattgtattgattacgggagggggtctcacaagccgatgacggcgacactgttcgatgacagaattgatctaagcaaaacccaaacctaaatgtggcggcggatgctgaataaatagagtattagggcgtgcgtagccctggactcgcccctaatgggctccgacgcgatacacggcccaatggcccaacagacggtgtcgcagcaccataacagaatctgaacgctgacttgtttcgacgattcctgttgactccggatgaattttagagtggaaccagttgggttggttaggcaatctcgttatctttccaaccatatccagtccgtcgcaatcggagtccggatgcatcttgggcgtccattttcgtgcagactggtcctggaacccgagatagtcgcagccgactcggacttgatccccttcctgttgtggacgcccttgctgctcctcatcaataccttggcctttctcaagtccttgctggtcatctccaaggtacctaattaagtttgggtcaccccagaatggagtcaggaatctgctgtaaaaatttgagctcaaacggag

SEQ ID NO: 57637 - DNA, 892 bp, Zea Mays
ctgttaccaattgatagtagacgcgacccgatcttctgtgagatacgataatttgattgagtggagatctcgatgttgatgatccaaggctccgagcgaacggttcctcgcaatcactacaccacggctccgttggttatcacccgtgacacacgaatgacctcgccacgaagacttatcactgcaagcgcaatcaagaacacaagcaagaacaggaaagaaacgcaaccaaaattgtattgattacgggagggggtctcacaagccgatgacggcgacactgttcgatgacagaattgatctaagcaaaacccaaacctaaatgtggcggcggctgctgaacaaatagagtattagggcgtgcgtagccctggactcgccgctaatgggcttcgacgcgatacacggcccaacgcccaacagacagtgtcgcagcaccaaaacagaatctgaacgctaagttgtttcaacgattcccgttgactccggatgaattttagggtggaaccagttgggttggttagataatctcgttatctttccaaccatatctagtccgtcgcaatcgaagtttggatgcatcttgggtgtccattttagtgcagactggtcctggaaaccgagatagagtcgcacccgactcggacttgatctccttcctgttgtggatgcccttgctgctcctcttcaacaccttggcctttcccaagtccttgttggtcctctccaaggtacctaatcaagtttgggtcaccccagaatggagtcaggaatctgctgtaaaaatttgagctcaaacggagcaccgagcgaaaagttatgcccgttttatggaaggtacctcaagttatggttttcaaaggcacaaatcggcaggaaccgaagcgacggc

SEQ ID NO: 57638 - DNA, 402 bp, Zea Mays
aacacccttccctgcatgttgaacatgtgtagggacaccttgccccatattcagctatttatagggcttggttttggacagatttccctccctgccttaagctccagccatagtccactatgggggcgtggggatcctggtgttttgctggtgttaaccttccccacagcgacctagtttgcttcagccagtgcatcatgtgaccatggtgaccatgcaacccgagtgctcttctcaccgtggccagaaaacgaagaagagatcgaagtgactcaagagaagacatcaccacctttgaaatctcaggcagggacttggctctacttcgacatctgcgagtccgagcctgactcgcctataaacaaaggcaagccccggtgcatgcaaccccttccttgtgtt

SEQ ID NO: 57639 - DNA, 534 bp, Zea Mays
atttgctatgagaactttgtaagccccaaaatagagtggttaatccttaatcaagtgtgggttaatgctttggaaaggagataagtttatctagggaagagatgaagttgcttaagaagttttaagcttttggatgagatataagtggattaattccctggtttacctaagtgatttcaaattggtcactttaatcgagcgataagaaataagtgtattcttgtcatgtgctttagttgtagtgtttctgttctccacctctccttgtgagagtttgcattacatggcattcattcttatatacacctatatatggttatgtttagaaaacgaagaagagatcgaagtgactcaagagaagacatcaccacctttgaaatctcaggcagggacttggctctacttcgacatctgcgagtccgagcctgactcgcctataaacaaaggcaagccccggtgcatgcaaccccttccttgtgtttttaaatacttttcgcacacttaagtctagtgaaatgtgcattaggtttatag

SEQ ID NO: 57640 - DNA, 1798 bp, Zea Mays
gacgagcgtcttcctgtcgcagtactctggtatggagttccctacatgtgtaggttatcctcgagtcttcaagcttgtgcagtcctcttcccagccaccaactcggtcagttttctgcatagcgcgtcatctttctgccagtggctaccacagccaccaaattcccacctcactgtcgccagggcagctggagcagttgcacacccaaaacgcagccgtggacagctctaccgctggccatccaatccatgttgatcccgactgatcttgcaagagcactgaaggcgtgagctccgagcagaaggagtgtaaattcaagacgaagtggttatggaagaggagtttgctccagtgcctattcagcaagtggatggagctatctaactggttattgggtagaaaggtcttgagcctcttcactgcaacaaaggcaagccccggtgcatttgccacctccttgctgttttaaaatctttatcaccttatatgatgcattaggtgatagaagttgtgtgctaaacaattgatgcatttccttccttgaaaattgattacccttccttaatacccattttggaaagcattttatgatgcttagccttgtttagcaaacaaaaatgttttgttttaaacaaaagtgatgcttcagtgggtgggaatgttttcaaaaataaaacttgatgtttgatccaacatggccgtgatgggttcaacgtcggaaaagatgtacctctgccaggtaccaaactttgggtttaaattataaagctgagaccgggcgggtgacttgcacgagaaaggagtctcggtgtagtgtctctgtctgagtcgtttaaggaccgtaccgattgttggcctgctgatctaggaccttttatctggccacatacctcgtcatgggtaagcttgaacccggctattccatacatgaaaagacaatcgcgcactgggagtggagagatggcgagagtggcacgtaccctcatgacaaaggaccgcctaaaaggggtggtgtgctctcgggtggcgcggacctgttcatgtggtggaggatccgtgggaatggtagacatctgcaaaagagtttaagagaagcatatgtcgtgtggttggagatccccagctgggtattaatcgattcggatcgccgaacttctcggatatgaagactggatcttcgaccctcatcgtagataacaagcgaaacaaaggttggattttaaaagaaagctagtataggacaagtgaatgctctggattctagattaaggaaaagtaactaacttgtgatgtaaaattttggcttaaggacccacttctagtaagcttttctgcaaaatgagtccttgaactttgatgagctttaccttgattcacaaaagccagcatacccttgagagtcttttctttagtcgggtaagtcttgctgagtaattgcgtactcagggttttatcccttgttgtttttgtaggagaaggtttattcccttatctttgggttagttacttcatgtggatgacttgaagcttagaatgtttatgtatatatcttatggaaaggcttcacccttccaattattgtaataagttatgcacttcaagtactatcaggacttgtaataaatacatctcattctacaatgtaaaacttgagttctggaatgtaaaatgtactttgtaaaagtcttccgctctatctccaatgtgtgtgtatcaaatgtgattactgtaatatacctgttatgtgggagatccttgggatgatgagttccagttggcgaactcgatagccttgtta

SEQ ID NO: 57641 - DNA, 327 bp, Zea Mays
atggaagaggggctcggctgggcgccatggacgcggcagcaggaaggagcacgcggcttggggaaacaggggcagcatgggaggggcagggaagaagggcgcgatggccatggatggggaggggaggagcgctggctgggtagggagcacgcgcgcacggagctcagggagatgggcgcgagcagggaggaacgtggacgggcggaaatggctcggtccgagctggggctagccaggcacgcgcgctgggcgctggagactagagaggggcggccgagcgccaagaagatggagaggaagtcgctggaaaggagcaggcgcggctag

SEQ ID NO: 57642 - DNA, 1513 bp, Zea Mays
cgcaagtctttgcacagcgatgagagaaaccctcgggaccgatgatgaagaagtgaggcccgttcgacgtttgctaaatgttcggtagaaggttcgaaccaaaaatcatcgtcgatctcgtgatttcgagtttggtttagttatggttcgttacacgtgatgcggaggacaagagccgagttgatctcaaaatgatgctggtgaacgaaccagcggaatggatgatctgatcaagtgctaggacggaagatgctcaccaagtggtcgtcatctaaccacactaacctagtgttatcccaggcaagccccggtgcatttgccacctccttgttgttataaaacttttatcacttatatgctgcttaggtgataggagttgagtgatgaaataattgatgcattgccattccttggtattcgattactattccttgatacctgttttataaaaagaactgataacgcttatccctgcttagaaactgaaaaatcgtttgtttaaaaaaagaacaatgtggaacactgttatgggctttttgtttcaaaaatcaaagcaaacttatggtgatgattccccttcggccggagtgggttcatcattcggaaaagagtacccctgccgggtaccaaaaatgggagaatggttggaataaatctagaccagatgctgagcaggaaaggtcgcccgtttgtgtcgcttaaggactgttctgattgttggcctgttgatctaggaccctttaactggccacatgcctcatcatgggtaagttttgcctcggtcggaccaataccagaacagctcacacgcactgggagcggagagatggcgagagtagcttgtaccctccgtggcaagagactggaaggtggggtgctgtactctcggaaacatggcgggcaccatggcgagagtaacgtgtaccaactaggccaatggctggacggtggagtgctgtgctctcgggtcgcgtgaacccgttctggtcttgagaaacccggtggcgagttgacatatgcaagggtttagtgctacatatgtcgtgtggttggagatccccagctgggtattaatcgattcagatcgtcgaacttctcggatatgaagactggatcttcaaccctcatcgtagataacaagtgaaactaaagctgctaaaatgaatctagtgtaggacaagtgaatgatctagattaggaaaatctagattcaggaaaagtacttaactggtgaagtaaaagcttggcataaggatccactactagtaagcttttctgcaaaaatgagtctttgaaatttgataagctttaccttgattcccaataaaccagcatacccttgagagtcttttctttagtcgggtaagtcttgctgagtaattgcgtactcagggttttttccctattgtttttcaggttataagtttgttccgttgtggatggtgctaagtgccggtgggctcggccttcttatataagtatatcccatctttagcttctttattgaggattg

SEQ ID NO: 57643 - DNA, 1415 bp, Zea Mays
ccaaaaatcatcgtcgatctcgtgatttcgagtttggtttagttatggttcgttacacgtgatgcggaggacaagagccgagttgatctcaaaatgatgctggtgaacgaaccagcggaatggatgatctgatcaagtgctaggacggaagatgctcaccaagtggtcgtcatctaaccacactaacctagtgttatcccaggcaagccccggtgcatttgccacctccttgttgttataaaacttttatcacttatatgctgcttaggtgataggagttgagtgatgaaataattgatgcattgccattccttggtattcgattactattccttgatacctgttttataaaaagaactgataacgcttatccctgcttagaaactgaaaaatcgtttgtttaaaaaaagaacaatgtggaacactgttatgggctttttgtttcaaaaatcaaagcaaacttatggtgatgattccccttcggccggagtgggttcatcattcggaaaagagtacccctgccgggtaccaaaaatgggagaatggttggaataaatctagaccagatgctgagcaggaaaggtcgcccgtttgtgtcgcttaaggactgttctgattgttggcctgttgatctaggaccctttaactggccacatgcctcatcatgggtaagttttgcctcggtcggaccaataccagaacagctcacacgcactgggagcggagagatggcgagagtagcttgtaccctccgtggcaagagactggaaggtggggtgctgtactctcggaaacatggcgggcaccatggcgagagtaacgtgtaccaactaggccaatggctggacggtggagtgctgtgctctcgggtcgcgtgaacccgttctggtcttgagaaacccggtggcgagttgacatatgcaagggtttagtgctacatatgtcgtgtggttggagatccccagctgggtattaatcgattcagatcgtcgaacttctcggatatgaagactggatcttcaaccctcatcgtagataacaagtgaaactaaagctgctaaaatgaatctagtgtaggacaagtgaatgatctagattaggaaaatctagattcaggaaaagtacttaactggtgaagtaaaagcttggcataaggatccactactagtaagcttttctgcaaaaatgagtctttgaaatttgataagctttaccttgattcccaataaaccagcatacccttgagagtcttttctttagtcgggtaagtcttgctgagtaattgcgtactcagggttttttccctattgtttttcaggttataagtttgttccgttgtggatggtgctaagtgccggtgggctcggccttcttatataagtatatcccatctttagcttctttattgaggattg

SEQ ID NO: 57644 - DNA, 299 bp, Zea Mays
ccaaaaatcatcgtcgatctcgtgatttcgagtttggtttagttatggttcgttacacgtgatgcggaggacaagagccgagttgatctcaaaatgatgctggtgaacgaaccagcggaatggatgatctgatcaagtgctaggacggaagatgctcaccaagtggtcgtcatctaaccacactaacctagtgttatcccaggttataagtttgttccgttgtggatggtgctaagtgccggtgggctcggccttcttatataagtatatcccatctttagcttctttattgaggattg

SEQ ID NO: 57645 - DNA, 1571 bp, Zea Mays
cgcaccagatgtttgatgggaggtttgaactggagttcattattttccatacgtgacccgcaagtctttgcacagcgatgagagaaaccctcgggaccgatgatgaagaagtgaggcccgttcgacgtttgctaaatgttcggtagaaggttcgaaccaaaaatcatcgtcgatctcgtgatttcgagtttggtttagttatggttcgttacacgtgatgcggaggacaagagccgagttgatctcaaaatgatgctggtgaacgaaccagcggaatggatgatctgatcaagtgctaggacggaagatgctcaccaagtggtcgtcatctaaccacactaacctagtgttatcccaggcaagccccggtgcatttgccacctccttgttgttataaaacttttatcacttatatgctgcttaggtgataggagttgagtgatgaaataattgatgcattgccattccttggtattcgattactattccttgatacctgttttataaaaagaactgataacgcttatccctgcttagaaactgaaaaatcgtttgtttaaaaaaagaacaatgtggaacactgttatgggctttttgtttcaaaaatcaaagcaaacttatggtgatgattccccttcggccggagtgggttcatcattcggaaaagagtacccctgccgggtaccaaaaatgggagaatggttggaataaatctagaccagatgctgagcaggaaaggtcgcccgtttgtgtcgcttaaggactgttctgattgttggcctgttgatctaggaccctttaactggccacatgcctcatcatgggtaagttttgcctcggtcggaccaataccagaacagctcacacgcactgggagcggagagatggcgagagtagcttgtaccctccgtggcaagagactggaaggtggggtgctgtactctcggaaacatggcgggcaccatggcgagagtaacgtgtaccaactaggccaatggctggacggtggagtgctgtgctctcgggtcgcgtgaacccgttctggtcttgagaaacccggtggcgagttgacatatgcaagggtttagtgctacatatgtcgtgtggttggagatccccagctgggtattaatcgattcagatcgtcgaacttctcggatatgaagactggatcttcaaccctcatcgtagataacaagtgaaactaaagctgctaaaatgaatctagtgtaggacaagtgaatgatctagattaggaaaatctagattcaggaaaagtacttaactggtgaagtaaaagcttggcataaggatccactactagtaagcttttctgcaaaaatgagtctttgaaatttgataagctttaccttgattcccaataaaccagcatacccttgagagtcttttctttagtcgggtaagtcttgctgagtaattgcgtactcagggttttttccctattgtttttcaggttataagtttgttccgttgtggatggtgctaagtgccggtgggctcggccttcttatataagtatatcccatctttagcttctttattgaggattg

SEQ ID NO: 57646 - DNA, 424 bp, Zea Mays
ctggagttcattattttccatacgtgacccgcaagtctttgcacagcgatgagaaaccctcgggaccgatgatgaagaagtgaggcccgttcgacgtttgctaaatgttcggtagaaggttcgaaccaaaaatcatcgtcgatctcgtgatttcgagtttggtttagttatggttcgttacacgtgatgcggaggacaagagccgagttgatctcaaaatgatgctggtgaacgaaccagcggaatggatgatctgatcaagtgctaggacggaagatgctcaccaagtggtcgtcatctaaccacactaacctagtgttatcccaggttataagtttgttccgttgtggatggtgctaagtgccggtgggctcggccttcttatataagtatatcccatctttagcttctttattgaggattg

SEQ ID NO: 57647 - DNA, 2262 bp, Zea Mays
tgccgtcgctccggactcaccgctaggtttttcctcctgccgccgcctcccagaccgtctcctccgccccagccgggatgccgacggtgagcgtcggccgggatcgtctcttggctgccattggtcgaacctacacacaggaggagttcgaggcgctctgcttcgagttcggcatcgagctggacgatgtgacgacggagaaggctattatcaggaaggagaagcacctcgaggacgacagtgaggtggacgaagatgacgaggtcatctacaagatagaggttgccgccaacagatatgatttgctatgtcttgaaggactagcaagagctcttcgtgttttcactgggactgaagcaagccctgtattccaagtttcatcaatccctcggggttcaatgcttcagatgcatgttaaaccagagacttcaaaaattagaccgtacatagtttgtgctgtcctaagaggggtaacttttgatgaagcaagatacaacagcttcattgatcttcaagacaaactccaccaaaatatctgccggaagaggacactcgttgctattggcacccatgatctggacactctgcaaggacccttctcatatgaggctctaccaccgaatgaaatcaattttgtcccattaaagcaggagaaaagcttcagagccgataaactgatggaattctataaatcagacatgaaactgaagaaattcttgcatataattgagaattctccagtgtacccagttatctatgatagcaacaggactgtattatcattacctcctatcattaatggcgcacattcagctatcacccttgcaacaaggaatgtctttattgaatgtacagctactgaccttaccaaagcaaatatagttctgaatacaatggttaccatgttctctgaatattgtgagactaaatttgaagtggaacctgttgaagtgatacatcatgatggaaggaaaacagtttaccctgatctttcatgttacaaaatggatgttttgttatctgacattcttgggcctattggcatctcccaggacgagaaacaggttgtctgtcttttgaataaaatgcaactgcaagctgaaagtcactccttgaaaggggaggctcgcatttcagtgtctgttcctccaacaagaagtgatattctgcatgcccgtgatttgtcagaggacgttgctattgcttatggattcaacaatgtgccaaaatcaaagccgaagtgtatgacaataggaggaaggcaaccattaaacagattctcagataaaattcgtgctgaggttgcaagagctggttatatggaggtgctcacatttatcttgtcttcacacgaagagaactttgacatgttaaacaggacagatgacaaaagtaaagcagtcattattgcaaaccctcgcacttctgaattcgagatttttgaagttggtgatgttgtgatgctggactcgtcacgtgatgttggtgcctctaataatcgcaggcttgcagctttgtactgcaatagggtttctggatttgaggaaattatgggattggtggatagtattgtcaaagttgtcagagctccacatgttaactttggcgagaattactatgtacctacagatgaacctgagttcttcccgaaaagacaatgtaaaattgtgacaagtgatggcaagcaagttggctacttaggaattgtccatgctgaggtcctaaggaaatttggcattccggatccctgcactttcgttgagatggacctcgaagcactgttgtaatgcagtcaacctgaaacaaaggaatgcttgaagctgatacctcatacctgccacatattggttttgttcgtaagcatggtggggtaccagcaagaagtgcatattacccaagctgcagtatctcgatgtacttctcaattgcattggattttgctgtgggaaaaaagggtacaacgatacagcaaatacccagcctaatttttgtgttagggattatgtttgcattgtaagggcttattcctatccaactttctatgaaaagtgtaccgtacatccttttgtaaaccatcgcgcgtccaaaagttatttctcaactcttgtcacctccacatgaggtcaccatgatgtaaagcaggttcagaatattagacctctaatatctccttgtgtttgtgaatggcattaaaatttgacattaaggattgtttggtttataaagactaattttagtccttttattttatttcattttagt

SEQ ID NO: 57648 - DNA, 1639 bp, Zea Mays
gatttagttcaatcagatgatttttatgagaaaagcttcagagccgataaactgatggaattctataaatcagacatgaaactgaagaaattcttgcatataattgagaattctccagtgtacccagttatctatgatagcaacaggactgtattatcattacctcctatcattaatggcgcacattcagctatcacccttgcaacaaggaatgtctttattgaatgtacagctactgaccttaccaaagcaaatatagttctgaatacaatggttaccatgttctctgaatattgtgagactaaatttgaagtggaacctgttgaagtgatacatcatgatggaaggaaaacagtttaccctgatctttcatgttacaaaatggatgttttgttatctgacattcttgggcctattggcatctcccaggacgagaaacaggttgtctgtcttttgaataaaatgcaactgcaagctgaaagtcactccttgaaaggggaggctcgcatttcagtgtctgttcctccaacaagaagtgatattctgcatgcccgtgatttgtcagaggacgttgctattgcttatggattcaacaatgtgccaaaatcaaagccgaagtgtatgacaataggaggaaggcaaccattaaacagattctcagataaaattcgtgctgaggttgcaagagctggttatatggaggtgctcacatttatcttgtcttcacacgaagagaactttgacatgttaaacaggacagatgacaaaagtaaagcagtcattattgcaaaccctcgcacttctgaattcgagatttttgaagttggtgatgttgtgatgctggactcgtcacgtgatgttggtgcctctaataatcgcaggcttgcagctttgtactgcaatagggtttctggatttgaggaaattatgggattggtggatagtattgtcaaagttgtcagagctccacatgttaactttggcgagaattactatgtacctacagatgaacctgagttcttcccgaaaagacaatgtaaaattgtgacaagtgatggcaagcaagttggctacttaggaattgtccatgctgaggtcctaaggaaatttggcattccggatccctgcactttcgttgagatggacctcgaagcactgttgtaatgcagtcaacctgaaacaaaggaatgcttgaagctgatacctcatacctgccacatattggttttgttcgtaagcatggtggggtaccagcaagaagtgcatattacccaagctgcagtatctcgatgtacttctcaattgcattggattttgctgtgggaaaaaagggtacaacgatacagcaaatacccagcctaatttttgtgttagggattatgtttgcattgtaagggcttattcctatccaactttctatgaaaagtgtaccgtacatccttttgtaaaccatcgcgcgtccaaaagttatttctcaactcttgtcacctccacatgaggtcaccatgatgtaaagcaggttcagaatattagacctctaatatctccttgtgtttgtgaatggcattaaaatttgacattaaggattgtttggtttataaagactaattttagtccttttattttatttcattttagt

SEQ ID NO: 57649 - DNA, 569 bp, Zea Mays
cagaaataagaacttaggaacacaggtcctaaggaaatttggcattccggatccctgcactttcgttgagatggacctcgaagcactgttgtaatgcagtcaacctgaaacaaaggaatgcttgaagctgatacctcatacctgccacatattggttttgttcgtaagcatggtggggtaccagcaagaagtgcatattacccaagctgcagtatctcgatgtacttctcaattgcattggattttgctgtgggaaaaaagggtacaacgatacagcaaatacccagcctaatttttgtgttagggattatgtttgcattgtaagggcttattcctatccaactttctatgaaaagtgtaccgtacatccttttgtaaaccatcgcgcgtccaaaagttatttctcaactcttgtcacctccacatgaggtcaccatgatgtaaagcaggttcagaatattagacctctaatatctccttgtgtttgtgaatggcattaaaatttgacattaaggattgtttggtttataaagactaattttagtccttttattttatttcattttagt

SEQ ID NO: 57650 - DNA, 1694 bp, Zea Mays
ggtcagtcagttatttgtcctactccatcgtcctgatcagctccaactccagtagtccagtgcccggtcacctggcatggaagctccataatttaaagggctcctcctctgacatgcacgtgtcaccttcccgccacacgtgtccatacgcgaggaaacctcgcacgtatttagaacgcgcttgcgacgatccgacggcctcgctctcccgtccgagactgagactgagagatcgacttcgactccgcctccgcctcgatggccaccgcacaggaaggtctgacccagcgcgtcgttgccagtgccagcagggacgacggcgccggcgagagcgcggcggccgtctcgggtcccaacaagaagccgggcggcggccgcgcaaacagcagcaggcgtgggctccgttcgctcgccgccgcggtgtccttctccgtggcgctcacggcgctgtcgttcttcgccgcggggcagtcgccaccgtcgcccaagaccgccacggcgtcgactgtggcggtggtgcgggccgggtcggtggcgttggaggcggtgctggcgctggcggcgtggatggcgtgggcggagggcgggctgcacgcgcgcccggcagccacgctgctcccctatgccgcgcacctgggcgccgccctcgcatgggcgccactcgtgctgtgcagccacgccgcggcgcgcgcgggcctcgcctgctgcgccgtcatggccgcgggcgccgtggcgtgcgcgcgcgggttcggcgccgtcaaccccgtggctggcgacctcgcgaagcccgccgtcgcctgggccgtcatcctcgccgtcgtcaactacaagatgctctgaggtcaccagagtcgagaaccagcccgccgtcgctattcacgcatgttcatgttcgatccatcttgtgcaccctcctctgcttctttctcgcgtgtgcagtgtttcgtctgtattactgaatctgaatgacgctttctagctactttgctctaccgcaacacatgcatgtaccctttcttgtttttagcctatccacactcattctactctaaatttctactctaaatttctactttaaaagaaatattctatcctcatcatcaagattctctaccctatatcataatctactgcagtcatatttactccatacatcaactctataccaatcaccacatatattatatatcttttttttgtcccctactgccacaccggctgatggcgctcggcacgccacaccggctgatggcgctcggcaccgtacctgctccatggacgtgtggactgatagagtaaaaaaacatcgacgctgtaaatagcgttttgtttgccccccataagtttacagctacatatagaatattccactgtagtaaaattttactctatacctagccttatattggtggcgtcttctttacagtatatcactgcgggtagccttactactcttgtgtgcatttcgctgtgatgtgcgtgtatgtatactgtctcttgtgtgtgtgcattccgatctactaagccacgtggcatttgttgtggaatactgtattattagacggcattgggcaggagaggttctttggtttgcaattgctaggtgtgacaaaaatattaattcggacacgctttctgttcaaatcattttgatccagtaatcatatgaacactggccagatattaaatatccg

SEQ ID NO: 57651 - DNA, 822 bp, Zea Mays
gcaaatcaatacaaaggtatgattctagacttagtacattggtttttttgtgtactaacatatttgtctaagtgctagaatcagagaaaagacaaatggaaaagacttggctcgagcagccaagactttgctcagtctgggtgcaccggactgtccggtggtgcaccgaacagtgtccggtgcgccaggctggtgctgatcaactggccgctctcgggaattgaacggcggcgtacaactataaatcaccggactgtccggtgagccaacggtcggccgcgcaatccgcgcgtgacgcgtggccgagccaacggtcagaagggagcaccggactgtccggtgtgcaccagacagtgtccagtgcgccaacggctccaaatcgtcaacggtcggctgcgccagaacaggaaagaaatctgcaccggacagtgtccggtggtgcaccggactgtccggtgcaccaaacgacagaaggcaagatttgccttcctggattgctcttaacggctcctagctgcattggggctataaaagggacccctaggcgcatgaaggagaacaccaatcattctttgatcatctcttagcaccaagacatctctcttgcacatttgattcgttgtgatagcaatttgagcttctcttgagttgagaactccgtgtgtgatcttagtgctcaagttgtgacttgtgtgcgtgtttgtgcttgtgctttgaggcttgttgttgctcttcccactcttacatctgtgcttctttgtgataatctcattgtaagggcgagaggctctaagttgtggagattcctcgcaaacgggaaag

SEQ ID NO: 57652 - DNA, 4108 bp, Zea Mays
gcccgttctccagaccccactgccgattccgcgattcgtttcggtgcctccgcggtggaggtggagcggagccagcctcttgccgtgccgcgcgcggccgtggccgaccgagcgagagagtggcaaggcaagcggggatttgcgggaaggaaggaaaaccccgcgcgagactcacgtcgcgcctccggcctcccccctcccccctcccccagcgcgcctttcggattctgttgcgccctcgccaggggcctcggcgaacaagcggtgcgcgcgagcggcgggaaccctaggcggcggtgatggcgagcaggggagccgtggcgccggcggtggaccctagcagcccgagctcgagggcgtggggcggggaggacgagacgcctggggcggggaaggtgaagctgatgtgcagctacgggggccggattgcgccgaggcccggggacggggcgctgcggtacgtgggcggccagacgcggctcatctccgtaccgcgcgccgcctccttcggggagctcctgcggaaggtggaggcggtggacgaggcctccgcctcctctggcggggtgctactcaggtaccagctccctggggaggacctcgattcgctgatctccgtctcaggcccggaggactacgacaacatgatggaggagtacgagaagctggccgctgccgcgcccgacggctccgccaagctgcgggtcttcctcttcccggcctccgggagcgatgcggccggctctggctccgggtcccacctcgtcgccgcggtggacgagtctgggcagcggtacatcgacaccatcaactgcgtctccgcggaggctatggccgtggccatgcgtccgaaggacagtgtcgccagtgccggttcctccgcacacaactccgaggcatccgagtacagcggcctagtggaagagccatcaacgttaccgcctcatcaggttgctcctgcttatgcaacaccgcatcagccgcctcaagtaaccacttatgtgcagcagcagcctcaagtcacccattatgtacaacaccagcatcctcagtctgctgcttatgtgcagcaggtgccgcagtcgtacatagagccacagcagtacgttcaggcctgcttccgcaggtgcagaaccagttctggagaccacacagttcacaaggccagtgcaagctcaggttgatcatagttaccgggtggtgcaaactccgctatcacagcttcctcctttgtcttctgtgcatcagcaggcaaatgatgcgcagaggcagaggtttggtgttcaacaagcgatgataagtgcagtaagcatgccagtggtgaccagttcaggcacaattcctgtggtggttagctcggccactgttccatcattgagatatgatgattgcacaatgtgccaaaaagcattgccacatgctcattcagataatattatccgggagcagggaaattctcgtgcaacaggcaaccttgaggcagctccaatgttttatagcccccatcaagacagtggatccaacaaatctagtctaggtgcaagttcaggaactcctacaaactatgtggcggaaccaagagctgggaacacagcagtgatgacacaatttaattcgactcttcctgccagaaaacctgcagttcaggcaactgcatctccggatacaggtgtgccggttcaacccaccgtgattcctttaccagtgtccagtgcacctgctccagatggagtatttgtcggtcattctcctcaggctggggctgaagatcctgtcaggtaccagcagcaactattctcttatagcatgcagccagcacaagttctagtgaatggcccacaaggcattgatgccagtgcatacaaggattcaaatcatccagcagcggaaccgctgagagaatatgcacacaatcttcttcatgactatgccagagctatcgatgttcatacgcaagcagttcatttgggtcctattgcaccaccagaatctactgtgcatgggaagccttctacttatggtatcattgatcatgccaaagttggaaagctacctttaaatattgatggtagttctatctacaaatctcaagctggagggtatcatatagggattacaaatgcctttgctgctcctgcattcaaccaagaggaaaacatttccaggcacagtgagaagccacgttatgcttttgatattggtacacaaaatgtccatcctgacataatccagcaaccacccaatctggctgtccagagcaaccttatagctcccattgaaccacctggttctaatgaaaaggttactgtgctaccatctaactctggtgctcaggttccttctggatcacctgtacagcgtcctaaagaaatggccaatcacttggtttcaattccccccaatggcagtaacaaatttccattgcagtctactgttggtattgatcgtgttgaaggtacacaggaaccggcttatgcagattcacttttctcaaatcaggatccttggaaagcagtgggcaatgcatctttagtgcctccaagaccaaacaagctaactaaggagtctgttgtttctggaggtcaatatattgatggccatatgcctgatatgaacatgcatgctgccataccctcagaagaagactcatgttttaaggatatgcacacagttaaattgaacaaaggacctggagaagatagtatcaagcgacaattacaagctgttgctgaaggggtagccgcatcagttcttcagccaccctttcctgaaaaaacagtggtgttctctggggatcacatcgattcgcatggagcagaagttgatgtcaagttccaggatgaagggaacaatcagtcagacaaaataagtcaaggggttcaagttttagatgacaacgataaccttcagataataaagaacagtgaccttgaagaattgcgtgaacttggttctggaacctttggtactgtttaccatggaaagtggagaggttcagatgttgctataaagagaatcaacgatcgatgctttgctgggaaggcttctgagcaagagcgtatgatggacctggtggatctgttgcaacggtaacagaatacatggctaatggctcactccgacaagcattacaaagacatgaaaagatctttgatcggcgtaggcgtctactaattgcaatggatgttgcatttggaatggaatatctccatgggaagaatatagtgcattttgacttgaagagtgacaatctgcttgtcaacctaagggatcctcaacggcctatatgcaaggttggtgatttgggattatcaaaggtcaaatgccagacactaatctctggcggagtaagaggaacacttccttggatggcccctgagttgttgaatggcagcagcagccttgtctcggaaaaggttgacgtcttctcgtttggcattgtgatgtgggagctacttacaggtgaagagccttacgccgagctgcactatggggccattataggtggaatcgtgaataacacgctgcgacctccggtgcccgagtcctgtgatccccagtggaggtcactgatggagcggtgctggtcagccgaaccgtcagagaggccgagcttcaccgaggtcggcaagagcctgcgcgccatggcttctcctaccaaggcacaacaatcgaaatagatgctttagccttgcctctcgcgtccttctgttcagcagattgtttcagtcttcaaaccgaggaggtgccaccatggctggcctgccttttgtacatgaataagttgaagaaaaatacgagaatgtggcatgcttatagagtcggtggatgcttgatgcttcctgtcttgcttttgacatggatcgtggatatatatggtagtacagcgtagtgtaagagtggcccctcgttctcacgtccattaggagttcaggacgaggtgagagcatctttagcagcgctcaaattagggcctcacttttgatctgaagacttattttggcgggcctagcttttgacatgtgctctaacaaagttctccaatctatcgcaacagacaatgggcctgtttggttcagcttttttctgaccaacttttctaaaaatc

SEQ ID NO: 57653 - DNA, 4184 bp, Zea Mays
cagaccccactgccgattccgcgattcgtttcggtgcctccgcggtggaggtggagcggagccagcctcttgccgtgccgcgcgcggccgtggccgaccgagcgagagagtggcaaggcaagcggggatttgcgggaaggaaggaaaaccccgcgcgagactcacgtcgcgcctccggcctcccccctcccccctcccccagcgcgcctttcggattctgttgcgccctcgccaggggcctcggcgaacaagcggtgcgcgcgagcggcgggaaccctaggcggcggtgatggcgagcaggggagccgtggcgccggcggtggaccctagcagcccgagctcgagggcgtggggcggggaggacgagacgcctggggcggggaaggtgaagctgatgtgcagctacgggggccggattgcgccgaggcccggggacggggcgctgcggtacgtgggcggccagacgcggctcatctccgtaccgcgcgccgcctccttcggggagctcctgcggaaggtggaggcggtggacgaggcctccgcctcctctggcggggtgctactcaggtaccagctccctggggaggacctcgattcgctgatctccgtctcaggcccggaggactacgacaacatgatggaggagtacgagaagctggccgctgccgcgcccgacggctccgccaagctgcgggtcttcctcttcccggcctccgggagcgatgcggccggctctggctccgggtcccacctcgtcgccgcggtggacgagtctgggcagcggtacatcgacaccatcaactgcgtctccgcggaggctatggccgtggccatgcgtccgaaggacagtgtcgccagtgccggttcctccgcacacaactccgaggcatccgagtacagcggcctagtggaagagccatcaacgttaccgcctcatcaggttgctcctgcttatgcaacaccgcatcagccgcctcaagtaaccacttatgtgcagcagcagcctcaagtcacccattatgtacaacaccagcatcctcagtctgctgcttatgtgcagcaggtgccgcagtcgtacatagagccacagcaggcagtacgttcaggcctgcttccgcaggtgcagaaccagttctggagaccacacagttcacaaggccagtgcaagctcaggttgatcatagttaccgggtggtgcaaactccgctatcacagcttcctcctttgtcttctgtgcatcagcaggcaaatgatgcgcagaggcagaggtttggtgttcaacaagcgatgataagtgcagtaagcatgccagtggtgaccagttcaggcacaattcctgtggtggttagctcggccactgttccatcattgagatatgatgattgcacaatgtgccaaaaagcattgccacatgctcattcagataatattatccgggagcagggaaattctcgtgcaacaggcaaccttgaggcagctccaatgttttatagcccccatcaagacagtggatccaacaaatctagtctaggtgcaagttcaggaactcctacaaactatgtggcggaaccaagagctgggaacacagcagtgatgacacaatttaattcgactcttcctgccagaaaacctgcagttcaggcaactgcatctccggatacaggtgtgccggttcaacccaccgtgattcctttaccagtgtccagtgcacctgctccagatggagtatttgtcggtcattctcctcaggctggggctgaagatcctgtcaggtaccagcagcaactattctcttatagcatgcagccagcacaagttctagtgaatggcccacaaggcattgatgccagtgcatacaaggattcaaatcatccagcagcggaaccgctgagagaatatgcacacaatcttcttcatgactatgccagagctatcgatgttcatacgcaagcagttcatttgggtcctattgcaccaccagaatctactgtgcatgggaagccttctacttatggtatcattgatcatgccaaagttggaaagctacctttaaatattgatggtagttctatctacaaatctcaagctggagggtatcatatagggattacaaatgcctttgctgctcctgcattcaaccaagaggaaaacatttccaggcacagtgagaagccacgttatgcttttgatattggtacacaaaatgtccatcctgacataatccagcaaccacccaatctggctgtccagagcaaccttatagctcccattgaaccacctggttctaatgaaaaggttactgtgctaccatctaactctggtgctcaggttccttctggatcacctgtacagcgtcctaaagaaatggccaatcacttggtttcaattccccccaatggcagtaacaaatttccattgcagtctactgttggtattgatcgtgttgaaggtacacaggaaccggcttatgcagattcacttttctcaaatcaggatccttggaaagcagtgggcaatgcatctttagtgcctccaagaccaaacaagctaactaaggagtctgttgtttctggaggtcaatatattgatggccatatgcctgatatgaacatgcatgctgccataccctcagaagaagactcatgttttaaggatatgcacacagttaaattgaacaaaggacctggagaagatagtatcaagcgacaattacaagctgttgctgaaggggtagccgcatcagttcttcagccaccctttcctgaaaaaacagtggtgttctctggggatcacatcgattcgcatggagcagaagttgatgtcaagttccaggatgaagggaacaatcagtcagacaaaataagtcaaggggttcaagttttagatgacaacgataaccttcagataataaagaacagtgaccttgaagaattgcgtgaacttggttctggaacctttggtactgtttaccatggaaagtggagaggttcagatgttgctataaagagaatcaacgatcgatgctttgctgggaaggcttctgagcaagagcgtatgaggactgatttctggaacgaggcagacaagcttgcatctttgcaccatccaaacgtagtagccttctatggtgttgttgtagatggacctggtggatctgttgcaacggtaacagaatacatggctaatggctcactccgacaagcattacaaagacatgaaaagatctttgatcggcgtaggcgtctactaattgcaatggatgttgcatttggaatggaatatctccatgggaagaatatagtgcattttgacttgaagagtgacaatctgcttgtcaacctaagggatcctcaacggcctatatgcaaggttggtgatttgggattatcaaaggtcaaatgccagacactaatctctggcggagtaagaggaacacttccttggatggcccctgagttgttgaatggcagcagcagccttgtctcggaaaaggttgacgtcttctcgtttggcattgtgatgtgggagctacttacaggtgaagagccttacgccgagctgcactatggggccattataggtggaatcgtgaataacacgctgcgacctccggtgcccgagtcctgtgatccccagtggaggtcactgatggagcggtgctggtcagccgaaccgtcagagaggccgagcttcaccgaggtcggcaagagcctgcgcgccatggcttctcctaccaaggcacaacaatcgaaatagatgctttagccttgcctctcgcgtccttctgttcagcagattgtttcagtcttcaaaccgaggaggtgccaccatggctggcctgccttttgtacatgaataagttgaagaaaaatacgagaatgtggcatgcttatagagtcggtggatgcttgatgcttcctgtcttgcttttgacatggatcgtggatatatatggtagtacagcgtagtgtaagagtggcccctcgttctcacgtccattaggagttcaggacgaggtgagagcatctttagcagcgctcaaattagggcctcacttttgatctgaagacttattttggcgggcctagcttttgacatgtgctctaacaaagttctccaatctatcgcaacagacaatgggcctgtttggttcagcttttttctgaccaacttttctaaaaatc

SEQ ID NO: 57654 - DNA, 4172 bp, Zea Mays
actgccgattccgcgattcgtttcggtgcctccgcggtggaggtggagcggagccagcctcttgccgtgccgcgcgcggccgtggccgaccgagcgagagagtggcaaggcaagcggggatttgcgggaaggaaggaaaaccccgcgcgagactcacgtcgcgcctccggcctcccccctcccccctcccccagcgcgcctttcggattctgttgcgccctcgccaggggcctcggcgaacaagcggtgcgcgcgagcggcgggaaccctaggcggcggtgatggcgagcaggggagccgtggcgccggcggtggaccctagcagcccgagctcgagggcgtggggcggggaggacgagacgcctggggcggggaaggtgaagctgatgtgcagctacgggggccggattgcgccgaggcccggggacggggcgctgcggtacgtgggcggccagacgcggctcatctccgtaccgcgcgccgcctccttcggggagctcctgcggaaggtggaggcggtggacgaggcctccgcctcctctggcggggtgctactcaggtaccagctccctggggaggacctcgattcgctgatctccgtctcaggcccggaggactacgacaacatgatggaggagtacgagaagctggccgctgccgcgcccgacggctccgccaagctgcgggtcttcctcttcccggcctccgggagcgatgcggccggctctggctccgggtcccacctcgtcgccgcggtggacgagtctgggcagcggtacatcgacaccatcaactgcgtctccgcggaggctatggccgtggccatgcgtccgaaggacagtgtcgccagtgccggttcctccgcacacaactccgaggcatccgagtacagcggcctagtggaagagccatcaacgttaccgcctcatcaggttgctcctgcttatgcaacaccgcatcagccgcctcaagtaaccacttatgtgcagcagcagcctcaagtcacccattatgtacaacaccagcatcctcagtctgctgcttatgtgcagcaggtgccgcagtcgtacatagagccacagcagtacgttcaggcctgcttccgcaggtgcagaaccagttctggagaccacacagttcacaaggccagtgcaagctcaggttgatcatagttaccgggtggtgcaaactccgctatcacagcttcctcctttgtcttctgtgcatcagcaggcaaatgatgcgcagaggcagaggtttggtgttcaacaagcgatgataagtgcagtaagcatgccagtggtgaccagttcaggcacaattcctgtggtggttagctcggccactgttccatcattgagatatgatgattgcacaatgtgccaaaaagcattgccacatgctcattcagataatattatccgggagcagggaaattctcgtgcaacaggcaaccttgaggcagctccaatgttttatagcccccatcaagacagtggatccaacaaatctagtctaggtgcaagttcaggaactcctacaaactatgtggcggaaccaagagctgggaacacagcagtgatgacacaatttaattcgactcttcctgccagaaaacctgcagttcaggcaactgcatctccggatacaggtgtgccggttcaacccaccgtgattcctttaccagtgtccagtgcacctgctccagatggagtatttgtcggtcattctcctcaggctggggctgaagatcctgtcaggtaccagcagcaactattctcttatagcatgcagccagcacaagttctagtgaatggcccacaaggcattgatgccagtgcatacaaggattcaaatcatccagcagcggaaccgctgagagaatatgcacacaatcttcttcatgactatgccagagctatcgatgttcatacgcaagcagttcatttgggtcctattgcaccaccagaatctactgtgcatgggaagccttctacttatggtatcattgatcatgccaaagttggaaagctacctttaaatattgatggtagttctatctacaaatctcaagctggagggtatcatatagggattacaaatgcctttgctgctcctgcattcaaccaagaggaaaacatttccaggcacagtgagaagccacgttatgcttttgatattggtacacaaaatgtccatcctgacataatccagcaaccacccaatctggctgtccagagcaaccttatagctcccattgaaccacctggttctaatgaaaaggttactgtgctaccatctaactctggtgctcaggttccttctggatcacctgtacagcgtcctaaagaaatggccaatcacttggtttcaattccccccaatggcagtaacaaatttccattgcagtctactgttggtattgatcgtgttgaaggtacacaggaaccggcttatgcagattcacttttctcaaatcaggatccttggaaagcagtgggcaatgcatctttagtgcctccaagaccaaacaagctaactaaggagtctgttgtttctggaggtcaatatattgatggccatatgcctgatatgaacatgcatgctgccataccctcagaagaagactcatgttttaaggatatgcacacagttaaattgaacaaaggacctggagaagatagtatcaagcgacaattacaagctgttgctgaaggggtagccgcatcagttcttcagccaccctttcctgaaaaaacagtggtgttctctggggatcacatcgattcgcatggagcagaagttgatgtcaagttccaggatgaagggaacaatcagtcagacaaaataagtcaaggggttcaagttttagatgacaacgataaccttcagataataaagaacagtgaccttgaagaattgcgtgaacttggttctggaacctttggtactgtttaccatggaaagtggagaggttcagatgttgctataaagagaatcaacgatcgatgctttgctgggaaggcttctgagcaagagcgtatgaggactgatttctggaacgaggcagacaagcttgcatctttgcaccatccaaacgtagtagccttctatggtgttgttgtagatggacctggtggatctgttgcaacggtaacagaatacatggctaatggctcactccgacaagcattacaaagacatgaaaagatctttgatcggcgtaggcgtctactaattgcaatggatgttgcatttggaatggaatatctccatgggaagaatatagtgcattttgacttgaagagtgacaatctgcttgtcaacctaagggatcctcaacggcctatatgcaaggttggtgatttgggattatcaaaggtcaaatgccagacactaatctctggcggagtaagaggaacacttccttggatggcccctgagttgttgaatggcagcagcagccttgtctcggaaaaggttgacgtcttctcgtttggcattgtgatgtgggagctacttacaggtgaagagccttacgccgagctgcactatggggccattataggtggaatcgtgaataacacgctgcgacctccggtgcccgagtcctgtgatccccagtggaggtcactgatggagcggtgctggtcagccgaaccgtcagagaggccgagcttcaccgaggtcggcaagagcctgcgcgccatggcttctcctaccaaggcacaacaatcgaaatagatgctttagccttgcctctcgcgtccttctgttcagcagattgtttcagtcttcaaaccgaggaggtgccaccatggctggcctgccttttgtacatgaataagttgaagaaaaatacgagaatgtggcatgcttatagagtcggtggatgcttgatgcttcctgtcttgcttttgacatggatcgtggatatatatggtagtacagcgtagtgtaagagtggcccctcgttctcacgtccattaggagttcaggacgaggtgagagcatctttagcagcgctcaaattagggcctcacttttgatctgaagacttattttggcgggcctagcttttgacatgtgctctaacaaagttctccaatctatcgcaacagacaatgggcctgtttggttcagcttttttctgaccaacttttctaaaaatc

SEQ ID NO: 57655 - DNA, 4302 bp, Zea Mays
ccgcgattcgtttcggtgcctccgcggtggaggtggagcggagccagcctcttgccgtgccgcgcgcggccgtggccgaccgagcgagagagtggcaaggcaagcggggatttgcgggaaggaaggaaaaccccgcgcgagactcacgtcgcgcctccggcctcccccctcccccctcccccagcgcgcctttcggattctgttgcgccctcgccaggggcctcggcgaacaagcggtgcgcgcgagcggcgggaaccctaggcggcggtgatggcgagcaggggagccgtggcgccggcggtggaccctagcagcccgagctcgagggcgtggggcggggaggacgagacgcctggggcggggaaggtgaagctgatgtgcagctacgggggccggattgcgccgaggcccggggacggggcgctgcggtacgtgggcggccagacgcggctcatctccgtaccgcgcgccgcctccttcggggagctcctgcggaaggtggaggcggtggacgaggcctccgcctcctctggcggggtgctactcaggtaccagctccctggggaggacctcgattcgctgatctccgtctcaggcccggaggactacgacaacatgatggaggagtacgagaagctggccgctgccgcgcccgacggctccgccaagctgcgggtcttcctcttcccggcctccgggagcgatgcggccggctctggctccgggtcccacctcgtcgccgcggtggacgagtctgggcagcggtacatcgacaccatcaactgcgtctccgcggaggctatggccgtggccatgcgtccgaaggacagtgtcgccagtgccggttcctccgcacacaactccgaggcatccgagtacagcggcctagtggaagagccatcaacgttaccgcctcatcaggttgctcctgcttatgcaacaccgcatcagccgcctcaagtaaccacttatgtgcagcagcagcctcaagtcacccattatgtacaacaccagcatcctcagtctgctgcttatgtgcagcaggtgccgcagtcgtacatagagccacagcaggtacaatacatcaacacccaacaatttggtgggcatggggtgccgcaatctgtcaattacgtgcctgtgcatatgaaccaattcatgcccagcattcctgtgacgggttctttggccaccactgctgctcaaggcagtacgttcaggcctgcttccgcaggtgcagaaccagttctggagaccacacagttcacaaggccagtgcaagctcaggttgatcatagttaccgggtggtgcaaactccgctatcacagcttcctcctttgtcttctgtgcatcagcaggcaaatgatgcgcagaggcagaggtttggtgttcaacaagcgatgataagtgcagtaagcatgccagtggtgaccagttcaggcacaattcctgtggtggttagctcggccactgttccatcattgagatatgatgattgcacaatgtgccaaaaagcattgccacatgctcattcagataatattatccgggagcagggaaattctcgtgcaacaggcaaccttgaggcagctccaatgttttatagcccccatcaagacagtggatccaacaaatctagtctaggtgcaagttcaggaactcctacaaactatgtggcggaaccaagagctgggaacacagcagtgatgacacaatttaattcgactcttcctgccagaaaacctgcagttcaggcaactgcatctccggatacaggtgtgccggttcaacccaccgtgattcctttaccagtgtccagtgcacctgctccagatggagtatttgtcggtcattctcctcaggctggggctgaagatcctgtcaggtaccagcagcaactattctcttatagcatgcagccagcacaagttctagtgaatggcccacaaggcattgatgccagtgcatacaaggattcaaatcatccagcagcggaaccgctgagagaatatgcacacaatcttcttcatgactatgccagagctatcgatgttcatacgcaagcagttcatttgggtcctattgcaccaccagaatctactgtgcatgggaagccttctacttatggtatcattgatcatgccaaagttggaaagctacctttaaatattgatggtagttctatctacaaatctcaagctggagggtatcatatagggattacaaatgcctttgctgctcctgcattcaaccaagaggaaaacatttccaggcacagtgagaagccacgttatgcttttgatattggtacacaaaatgtccatcctgacataatccagcaaccacccaatctggctgtccagagcaaccttatagctcccattgaaccacctggttctaatgaaaaggttactgtgctaccatctaactctggtgctcaggttccttctggatcacctgtacagcgtcctaaagaaatggccaatcacttggtttcaattccccccaatggcagtaacaaatttccattgcagtctactgttggtattgatcgtgttgaaggtacacaggaaccggcttatgcagattcacttttctcaaatcaggatccttggaaagcagtgggcaatgcatctttagtgcctccaagaccaaacaagctaactaaggagtctgttgtttctggaggtcaatatattgatggccatatgcctgatatgaacatgcatgctgccataccctcagaagaagactcatgttttaaggatatgcacacagttaaattgaacaaaggacctggagaagatagtatcaagcgacaattacaagctgttgctgaaggggtagccgcatcagttcttcagccaccctttcctgaaaaaacagtggtgttctctggggatcacatcgattcgcatggagcagaagttgatgtcaagttccaggatgaagggaacaatcagtcagacaaaataagtcaaggggttcaagttttagatgacaacgataaccttcagataataaagaacagtgaccttgaagaattgcgtgaacttggttctggaacctttggtactgtttaccatggaaagtggagaggttcagatgttgctataaagagaatcaacgatcgatgctttgctgggaaggcttctgagcaagagcgtatgtagaggactgatttctggaacgaggcagacaagcttgcatctttgcaccatccaaacgtagtagccttctatggtgttgttgtagatggacctggtggatctgttgcaacggtaacagaatacatggctaatggctcactccgacaagcattacaaagacatgaaaagatctttgatcggcgtaggcgtctactaattgcaatggatgttgcatttggaatggaatatctccatgggaagaatatagtgcattttgacttgaagagtgacaatctgcttgtcaacctaagggatcctcaacggcctatatgcaaggttggtgatttgggattatcaaaggtcaaatgccagacactaatctctggcggagtaagaggaacacttccttggatggcccctgagttgttgaatggcagcagcagccttgtctcggaaaaggttgacgtcttctcgtttggcattgtgatgtgggagctacttacaggtgaagagccttacgccgagctgcactatggggccattataggtggaatcgtgaataacacgctgcgacctccggtgcccgagtcctgtgatccccagtggaggtcactgatggagcggtgctggtcagccgaaccgtcagagaggccgagcttcaccgaggtcggcaagagcctgcgcgccatggcttctcctaccaaggcacaacaatcgaaatagatgctttagccttgcctctcgcgtccttctgttcagcagattgtttcagtcttcaaaccgaggaggtgccaccatggctggcctgccttttgtacatgaataagttgaagaaaaatacgagaatgtggcatgcttatagagtcggtggatgcttgatgcttcctgtcttgcttttgacatggatcgtggatatatatggtagtacagcgtagtgtaagagtggcccctcgttctcacgtccattaggagttcaggacgaggtgagagcatctttagcagcgctcaaattagggcctcacttttgatctgaagacttattttggcgggcctagcttttgacatgtgctctaacaaagttctccaatctatcgcaacagacaatgggcctgtttggttcagcttttttctgaccaacttttctaaaaatc

SEQ ID NO: 57656 - DNA, 2205 bp, Zea Mays
gcgggaaggaaggaaaaccccgcgcgagactcacgtcgcgcctccggcctcccccctcccccctcccccagcgcgcctttcggattctgttgcgccctcgccaggggcctcggcgaacaagcggtgcgcgcgagcggcgggaaccctaggcggcggtgatggcgagcaggggagccgtggcgccggcggtggaccctagcagcccgagctcgagggcgtggggcggggaggacgagacgcctggggcggggaaggtgaagctgatgtgcagctacgggggccggattgcgccgaggcccggggacggggcgctgcggtacgtgggcggccagacgcggctcatctccgtaccgcgcgccgcctccttcggggagctcctgcggaaggtggaggcggtggacgaggcctccgcctcctctggcggggtgctactcaggtaccagctccctggggaggacctcgattcgctgatctccgtctcaggcccggaggactacgacaacatgatggaggagtacgagaagctggccgctgccgcgcccgacggctccgccaagctgcgggtcttcctcttcccggcctccgggagcgatgcggccggctctggctccgggtcccacctcgtcgccgcggtggacgagtctgggcagcggtacatcgacaccatcaactgcgtctccgcggaggctatggccgtggccatgcgtccgaaggacagtgtcgccagtgccggttcctccgcacacaactccgaggcatccgagtacagcggcctagtggaaggacctggagaagatagtatcaagcgacaattacaagctgttgctgaaggggtagccgcatcagttcttcagccaccctttcctgaaaaaacagtggtgttctctggggatcacatcgattcgcatggagcagaagttgatgtcaagttccaggatgaagggaacaatcagtcagacaaaataagtcaaggggttcaagttttagatgacaacgataaccttcagataataaagaacagtgaccttgaagaattgcgtgaacttggttctggaacctttggtactgtttaccatggaaagtggagaggttcagatgttgctataaagagaatcaacgatcgatgctttgctgggaaggcttctgagcaagagcgtatgatggacctggtggatctgttgcaacggtaacagaatacatggctaatggctcactccgacaagcattacaaagacatgaaaagatctttgatcggcgtaggcgtctactaattgcaatggatgttgcatttggaatggaatatctccatgggaagaatatagtgcattttgacttgaagagtgacaatctgcttgtcaacctaagggatcctcaacggcctatatgcaaggttggtgatttgggattatcaaaggtcaaatgccagacactaatctctggcggagtaagaggaacacttccttggatggcccctgagttgttgaatggcagcagcagccttgtctcggaaaaggttgacgtcttctcgtttggcattgtgatgtgggagctacttacaggtgaagagccttacgccgagctgcactatggggccattataggtggaatcgtgaataacacgctgcgacctccggtgcccgagtcctgtgatccccagtggaggtcactgatggagcggtgctggtcagccgaaccgtcagagaggccgagcttcaccgaggtcggcaagagcctgcgcgccatggcttctcctaccaaggcacaacaatcgaaatagatgctttagccttgcctctcgcgtccttctgttcagcagattgtttcagtcttcaaaccgaggaggtgccaccatggctggcctgccttttgtacatgaataagttgaagaaaaatacgagaatgtggcatgcttatagagtcggtggatgcttgatgcttcctgtcttgcttttgacatggatcgtggatatatatggtagtacagcgtagtgtaagagtggcccctcgttctcacgtccattaggagttcaggacgaggtgagagcatctttagcagcgctcaaattagggcctcacttttgatctgaagacttattttggcgggcctagcttttgacatgtgctctaacaaagttctccaatctatcgcaacagacaatgggcctgtttggttcagcttttttctgaccaacttttctaaaaatc

SEQ ID NO: 57657 - DNA, 4205 bp, Zea Mays
accccgcgcgagactcacgtcgcgcctccggcctcccccctcccccctcccccagcgcgcctttcggattctgttgcgccctcgccaggggcctcggcgaacaagcggtgcgcgcgagcggcgggaaccctaggcggcggtgatggcgagcaggggagccgtggcgccggcggtggaccctagcagcccgagctcgagggcgtggggcggggaggacgagacgcctggggcggggaaggtgaagctgatgtgcagctacgggggccggattgcgccgaggcccggggacggggcgctgcggtacgtgggcggccagacgcggctcatctccgtaccgcgcgccgcctccttcggggagctcctgcggaaggtggaggcggtggacgaggcctccgcctcctctggcggggtgctactcaggtaccagctccctggggaggacctcgattcgctgatctccgtctcaggcccggaggactacgacaacatgatggaggagtacgagaagctggccgctgccgcgcccgacggctccgccaagctgcgggtcttcctcttcccggcctccgggagcgatgcggccggctctggctccgggtcccacctcgtcgccgcggtggacgagtctgggcagcggtacatcgacaccatcaactgcgtctccgcggaggctatggccgtggccatgcgtccgaaggacagtgtcgccagtgccggttcctccgcacacaactccgaggcatccgagtacagcggcctagtggaaggtatgtcaccgcgggcggtgccgccgcctgcgtccgctgcaactgagtattcatattcagagccatcaacgttaccgcctcatcaggttgctcctgcttatgcaacaccgcatcagccgcctcaagtaaccacttatgtgcagcagcagcctcaagtcacccattatgtacaacaccagcatcctcagtctgctgcttatgtgcagcaggtgccgcagtcgtacatagagccacagcaggtacaatacatcaacacccaacaatttggtgggcatggggtgccgcaatctgtcaattacgtgcctgtgcatatgaaccaattcatgcccagcattcctgtgacgggttctttggccaccactgctgctcaaggcagtacgttcaggcctgcttccgcaggtgcagaaccagttctggagaccacacagttcacaaggccagtgcaagctcaggttgatcatagttaccgggtggtgcaaactccgctatcacagcttcctcctttgtcttctgtgcatcagcaggcaaatgatgcgcagaggcagaggtttggtgttcaacaagcgatgataagtgcagtaagcatgccagtggtgaccagttcaggcacaattcctgtggtggttagctcggccactgttccatcattgagatatgatgattgcacaatgtgccaaaaagcattgccacatgctcattcagataatattatccgggagcagggaaattctcgtgcaacaggcaaccttgaggcagctccaatgttttatagcccccatcaagacagtggatccaacaaatctagtctaggtgcaagttcaggaactcctacaaactatgtggcggaaccaagagctgggaacacagcagtgatgacacaatttaattcgactcttcctgccagaaaacctgcagttcaggcaactgcatctccggatacaggtgtgccggttcaacccaccgtgattcctttaccagtgtccagtgcacctgctccagatggagtatttgtcggtcattctcctcaggctggggctgaagatcctgtcaggtaccagcagcaactattctcttatagcatgcagccagcacaagttctagtgaatggcccacaaggcattgatgccagtgcatacaaggattcaaatcatccagcagcggaaccgctgagagaatatgcacacaatcttcttcatgactatgccagagctatcgatgttcatacgcaagcagttcatttgggtcctattgcaccaccagaatctactgtgcatgggaagccttctacttatggtatcattgatcatgccaaagttggaaagctacctttaaatattgatggtagttctatctacaaatctcaagctggagggtatcatatagggattacaaatgcctttgctgctcctgcattcaaccaagaggaaaacatttccaggcacagtgagaagccacgttatgcttttgatattggtacacaaaatgtccatcctgacataatccagcaaccacccaatctggctgtccagagcaaccttatagctcccattgaaccacctggttctaatgaaaaggttactgtgctaccatctaactctggtgctcaggttccttctggatcacctgtacagcgtcctaaagaaatggccaatcacttggtttcaattccccccaatggcagtaacaaatttccattgcagtctactgttggtattgatcgtgttgaaggtacacaggaaccggcttatgcagattcacttttctcaaatcaggatccttggaaagcagtgggcaatgcatctttagtgcctccaagaccaaacaagctaactaaggagtctgttgtttctggaggtcaatatattgatggccatatgcctgatatgaacatgcatgctgccataccctcagaagaagactcatgttttaaggatatgcacacagttaaattgaacaaaggacctggagaagatagtatcaagcgacaattacaagctgttgctgaaggggtagccgcatcagttcttcagccaccctttcctgaaaaaacagtggtgttctctggggatcacatcgattcgcatggagcagaagttgatgtcaagttccaggatgaagggaacaatcagtcagacaaaataagtcaaggggttcaagttttagatgacaacgataaccttcagataataaagaacagtgaccttgaagaattgcgtgaacttggttctggaacctttggtactgtttaccatggaaagtggagaggttcagatgttgctataaagagaatcaacgatcgatgctttgctgggaaggcttctgagcaagagcgtatgacaagcttgcatctttgcaccatccaaacgtagtagccttctatggtgttgttgtagatggacctggtggatctgttgcaacggtaacagaatacatggctaatggctcactccgacaagcattacaaagacatgaaaagatctttgatcggcgtaggcgtctactaattgcaatggatgttgcatttggaatggaatatctccatgggaagaatatagtgcattttgacttgaagagtgacaatctgcttgtcaacctaagggatcctcaacggcctatatgcaaggttggtgatttgggattatcaaaggtcaaatgccagacactaatctctggcggagtaagaggaacacttccttggatggcccctgagttgttgaatggcagcagcagccttgtctcggaaaaggttgacgtcttctcgtttggcattgtgatgtgggagctacttacaggtgaagagccttacgccgagctgcactatggggccattataggtggaatcgtgaataacacgctgcgacctccggtgcccgagtcctgtgatccccagtggaggtcactgatggagcggtgctggtcagccgaaccgtcagagaggccgagcttcaccgaggtcggcaagagcctgcgcgccatggcttctcctaccaaggcacaacaatcgaaatagatgctttagccttgcctctcgcgtccttctgttcagcagattgtttcagtcttcaaaccgaggaggtgccaccatggctggcctgccttttgtacatgaataagttgaagaaaaatacgagaatgtggcatgcttatagagtcggtggatgcttgatgcttcctgtcttgcttttgacatggatcgtggatatatatggtagtacagcgtagtgtaagagtggcccctcgttctcacgtccattaggagttcaggacgaggtgagagcatctttagcagcgctcaaattagggcctcacttttgatctgaagacttattttggcgggcctagcttttgacatgtgctctaacaaagttctccaatctatcgcaacagacaatgggcctgtttggttcagcttttttctgaccaacttttctaaaaatc

SEQ ID NO: 57658 - DNA, 1604 bp, Zea Mays
gtcgtgtttactcgtctccctcgttgccagatctcaacctccgccttccctcccatgccctcaaacctacctcctaactagcatccgccgctccgatggaagccgcggcgcccgcgcccgcgcgtggcctcgggcggcaggagtacgcggtgctggcgctcaccttcgcgtcctacgcgtcgttccacgcctcccgcaagccgcccagcatcgtcaaagccgtgctctccgcggactgggtccccttctcgggcccccggggcccgcaccgcctcggcgaactcgacgtcgccttcctctcattctacgcgcttgccatgttcgccgccggccacctcgccgaccgcgccgacctccgctgcctcctcggcacggccatgctcgcgtccggcgccgcgtgcgccgcgctcggtgcggcctacttcctcgacatccacgcgctagccttcttcgcggccgcgcaggtgtccagcggtgtcgtgcagtccgccggatggccctgcgtcgtcgccgttgtggggaactggttcggccacgcctcgaagcgcggcaccatcatgggggtgtggaactcgcacacctccgtcgggaacatcgccggctcggtcctcgccgcagccgcgctcgagttcggatggggttggtcctttttgcttcctgcggtcgtcatcgccgcgctcggagttgtcgtgctggtgtttttggtcgcacacccgagcgaggctggtttggatgtggaagtaatggaggataagaaagaggttcaagggaatgaggataacgagttcgagctggaaatgggatcacaattgccgagggcaatcgggttcgtggaggcatggaaacttcctggcgtggcaccatatgcattctgcttatttttctccaaactcgtcgcctacaccttcctctactggttgccattctatatcaggaataatgccgtggcaggtcagttcttgtcacacaaggcttcaggaattttatcaattgtattcgacattggaggcgtcttaggagggatttcggctggttttctctcagatgccataggtgcccgtgcaataacatcactgttgcaactgatcttggcacccaagacgctatcaagggaaattcacgggcgctggcgacggtttctgcgataattgacggcactggttctgttggtgcagctctgggtcccttgcttacgggttacatctcaactagaggatggaatagtgtatttttcatgttgattgtttccatatcacttgccatcctgtttttgatacgactcgcaaagggcgagatagtagccaagcttagcacatggaattaaagtagtaatgtatgttcaattgaggatgcttcagatgtgagattgtaggtacttagggtgtttggtttctagtaactaatttttagtccctcaatttagtctctgatttatcaaacatagggaataaaatagagataatccctattttagcctatgtgtttggcaatttagggattaaaatgaaggaaataaagtctcttaccaccacgctggtctgtttgtataccgccggtcgtcgttgccctcggtcatacctcatcttccaggtggtggtaatacg

SEQ ID NO: 57659 - DNA, 1774 bp, Zea Mays
gtcgtgtttactcgtctccctcgttgccagatctcaacctccgccttccctcccatgccctcaaacctacctcctaactagcatccgccgctccgatggaagccgcggcgcccgcgcccgcgcgtggcctcgggcggcaggagtacgcggtgctggcgctcaccttcgcgtcctacgcgtcgttccacgcctcccgcaagccgcccagcatcgtcaaagccgtgctctccgcggactgggtccccttctcgggcccccggggcccgcaccgcctcggcgaactcgacgtcgccttcctctcattctacgcgcttgccatgttcgccgccggccacctcgccgaccgcgccgacctccgctgcctcctcggcacggccatgctcgcgtccggcgccgcgtgcgccgcgctcggtgcggcctacttcctcgacatccacgcgctagccttcttcgcggccgcgcaggtgtccagcggtgtcgtgcagtccgccggatggccctgcgtcgtcgccgttgtggggaactggttcggccacgcctcgaagcgcggcaccatcatgggggtgtggaactcgcacacctccgtcgggaacatcgccggctcggtcctcgccgcagccgcgctcgagttcggatggggttggtcctttttgcttcctgcggtcgtcatcgccgcgctcggagttgtcgtgctggtgtttttggtcgcacacccgagcgaggctggtttggatgtggaagtaatggaggttgagatgaatggggatggtggggaggaggtagggctacttggggaggataagaaagaggttcaagggaatgaggataacgagttcgagctggaaatgggatcacaattgccgagggcaatcgggttcgtggaggcatggaaacttcctggcgtggcaccatatgcattctgcttatttttctccaaactcgtcgcctacaccttcctctactggttgccattctatatcaggaataatgttcttgtcacacaaggcttcaggaattttatcaattgtattcgacattggaggcgtcttaggagggatttcggctggttttctctcagatgccataggtgcccgtgcaataacatcagttctgttcctcttgctgtcaatcccatcactcgttgtgtaccggacatatggaagcatatccatgcaccacaacattgctctcatgtttctctctggttactttgtgaatggtccatactctctgatcaccacagctgttgcaactgatcttggcacccaagacgctatcaagggaaattcacgggcgctggcgacggtttctgcgataattgacggcactggttctgttggtgcagctctgggtcccttgcttacgggttacatctcaactagaggatggaatagtgtatttttcatgttgattgtttccatatcacttgccatcctgtttttgatacgactcgcaaagggcgagatagtagccaagcttagcacatggaattaaagtagtaatgtatgttcaattgaggatgcttcagatgtgagattgtaggtacttagggtgtttggtttctagtaactaatttttagtccctcaatttagtctctgatttatcaaacatagggaataaaatagagataatccctattttagcctatgtgtttggcaatttagggattaaaatgaaggaaataaagtctcttaccaccacgctggtctgtttgtataccgccggtcgtcgttgccctcggtcatacctcatcttccaggtggtggtaatacg

SEQ ID NO: 57660 - DNA, 1169 bp, Zea Mays
attgactcctgtctacagtctcctttgattttcttctcgtcacccccttcactttactcttccctcacttctggccgcagctttgagctcagtagcaaacaagaagcagcaagatagtgatcctccatgggaaacaccctcggctttggcgtaggtgtcggcctcggcctcggcctcgccgtcggcgccgctgctctgatccagcaccgaggacattgacgagttgtctgccgaggagctgcgcgatgcgatgagctatgtgatgcacaatccgatgctgatccaggtgccggtgttaggaacaacgaagacattctggcgattatctgaggaagccactaggatcagcagaaaactttcattgatactgcgcaaccaccactcagcctgcaagtacctcgaagctcctctgcaggtgtccaatgtctggattgggagcactgggagtgtcaagctaaggggggtcagtttcactggcagcggtttctttagaattgagcgtgtgagagatgactacaagcacctttccagggtcctggaactgttgattatgatctcaggtggggatatcaacaaattgcctccagactacaaagaattcctctcgctcttgaggaggaagaaccttacaagggatgatgaattcttaattgtaaacaatgctgccctactacccatgaaaaaccgcactgaggtattcctgatgctacacgatagaattgtcaattttcttggtcagaaaaatcgagcaaagaagaagaaaatactctccaatctcccttacaagaacaactggttggatactgccacggcaaatgcaaagatcaaccagtgggttgtaaatgttcaaaatgagtacaaaaggactacaattgatctactgcggctcaacagaaatgtaagaagccacttgcatcagtacaaccacgaagatgatattgaggaaattctgtattgtgaatggcccatgctgctcattgtcatggagaagatgttgcacttggaaggtgagctccaagacactggcatccataacaagttcggctagggttctactgcaaaacagatgaaagatgtattctgcatttccatgggttggtacctgacagcctcggacagaatgttaaagcaaccatagcgtggaaaaacatgcttcagttaagggagag

SEQ ID NO: 57661 - DNA, 1486 bp, Zea Mays
atactcttcttgctccccgaactctgacgcccatccgatcccctgtcggttctatgcatttgagaaggcacaccggctggatcagaactccatcggccgtggcgttaggcagttcaagacagctctgctccaacgtcttgaaaaggataatagccctagtcttgctaagcgcgtgaagaaaagcgatgctcgcgaaatcgagagtttttaccaacagtactacgagaactatgttcgtgcacttgacaaaggggaacaagctgacagggctcaacttgggaaggcctaccagactgccggagtcctctttgaggtactctgcgccgtcaataaaaatgagaaagtcgaggagctcaatcctgagattattcgcttgcacaaggatgtgcaagagaagaaagacatctacacaccattcaatatcctgccccttgatgctgccagtgcatcccagtccatcatgcagctggaggagatcaaagcagcagttgcagccctccgaaacattcgaggcttgaattggccttcaacatttgagccgcagaggcagaagggtggtgaccttgatttgttggattggttgagagctatgtttggctttcagcgagatagtgtgcggaatcaaagagagcatttgattctcctccttgctaatgtccacataaggcttgagccaaagcccgatccactgagcaagcttgatgaccgagctgtcgatgtggtgatgactaagctattcagcaattacaggaagtggtgcaaatttttgtcacggaagcatagtttaagatttccacaaggcgcacaaccacaagaaattcagcaacggaagattctatacctaggtctttatcttcttatatggggtgaagcagcaaacatcagatttatgccggagtgtctttgctacatcttccataatatggcatatgagctgcatggtttgctagctggaaatgttagtattgtgactggggagaatatcaggccatcttatggtggggatgaggaggcattcttgaagaaagtggttacacctttctatagagtcatcagaaaggaggcaggcaaatcacaacatgggaagacaccacattctgcgtggtctaactatgatgacctaaatgagtacttctggacatctgattgtttctcgcttgggtggcctatgcgggatgatggtgactttttcaaatccgtgcatgattcaaggcctgtaacaacggctggaagctcaccacaaaaggattccacgaaaagtacagggaagacaaatttcgttgagactagaacattttggcacatcttccgaagttttgaccgaatgtggactttctatattttggctctacaggcaatgctgatttttgcttggaatgattattcagtgaccgaaatccttcggaaagaccttttgtattatctatctagtgtattcgtcactgcagcatttctacagttcctccaaaatgaacttctcagttaa

SEQ ID NO: 57662 - DNA, 1526 bp, Zea Mays
aaacgaatttacgttggccgtggaatgcatgaaagccaagtttcactttttaagtatacatttttttggattttgctgctatgctccaaattttcgtttagctactttgtccaaattcagcctctaataaaaccaacaaaggatgtaatgggtgttcataatattcattacgagtggcatgaattttttccaaatgcatcctataatattggtgccatcatgtctctatgggctcctgttctactggtctatttaatggatacacaaatttggtatgccatcttctctacgatatttggtggcatgactggagcacttgggcgacttggggagatacgaacattgggaatgctgagatcacgattccattctttgcctggagccttcaacacatatttggtgccttcagataaaagcaaaaataggcgcttttcactctcaaagcgctttgctgaggtttctcccaacaagagaactgaggccgccaagtttgctcaattgtggaatgaagtaatatgcagtttccgggaagaagatcttataagtgatggggagatggacttgttagtggttccttattcgtcagaccccagcctcaaattgatgcagtggcctctgttcttgcttgctagcaagatacctatagctttagacatggcggcacaatttagacctagagattcagatctttggaaacgtatatgtgctgatgagtacatgaaatgtgctgtactggaatgttatgaatcattcaaactcgttcttaatttattggtggttggagaaaatgaaaaaaggattattggtattataatcaaagaaatagaaggtaatattggaaagaatacattccttgccaattttagaatgagcgcactcccagttctttgcaagaaatttgtagagcttgtgtctaccttgaaagaaagagatgcctcaaagtttgataacgtggtgctgttgcttcaagacatgttagaagtgataacaagagatatgatggttaatgagattagagagctggctgagtttggtcatggtaataaggattcagttccaagaagacaactttttgctggttctggtacaaagcctgcaattgttttccctcctccggtttcagcacagtgggaagaacagattaagcgattgtaccttcttttgactgtgaaagaatctgcaatggacgtcccaacaaatttagaagctcgtcgaagaatagcatttttcactaattcactattcatggacatgcctcgtgcacctagagtacgcaaaatgctctcattcagtgttatgactccttactacagtgaagaaactgtatattcaaaaagtgatcttgatctggagaatgaagatggtgtatcaattatattctacctacaaaagatctttccagatgaatggaacaatttcatggaaagaaataattgcaaaagggaaagtgaagtatggggaaacgatgaaaatgtactgcaacttcgtcattgggcttctcttagagggcagacactctgtagaac

SEQ ID NO: 57663 - DNA, 1391 bp, Zea Mays
cagcctctaataaaaccaacaaaggatgtaatgggtgttcataatattcattacgagtggcatgaattttttccaaatgcatcctataatattggtgccatcatgtctctatgggctcctgttctactggtctatttaatggatacacaaatttggtatgccatcttctctacgatatttggtggcatgactggagcacttgggcgacttggggaggggttcgagggttttctcgacctgtgtgagaaggtcttcttcttaatacaatgcccgggggctatcttacccctgcaggtttctcccaacaagagaactgaggccgccaagtttgctcaattgtggaatgaagtaatatgcagtttccgggaagaagatcttataagtgatggtgcagctgagaactttttgttgcatagggagatggacttgttagtggttccttattcgtcagaccccagcctcaaattgatgcagtggcctctgttcttgcttgctagcaagatacctatagctttagacatggcggcacaatttagacctagagattcagatctttggaaacgtatatgtgctgatgagtacatgaaatgtgctgtactggaatgttatgaatcattcaaactcgttcttaatttattggtggttggagaaaatgaaaaaaggattattggtattataatcaaagaaatagaaggtaatattggaaagaatacattccttgccaattttagaatgagcgcactcccagttctttgcaagaaatttgtagagcttgtgtctaccttgaaagaaagagatgcctcaaagtttgataacgtggtgctgttgcttcaagacatgttagaagtgataacaagagatatgatggttaatgagattagagagctggctgagtttggtcatggtaataaggattcagttccaagaagacaactttttgctggttctggtacaaagcctgcaattgttttccctcctccggtttcagcacagtgggaagaacagattaagcgattgtaccttcttttgactgtgaaagaatctgcaatggacgtcccaacaaatttagaagctcgtcgaagaatagcatttttcactaattcactattcatggacatgcctcgtgcacctagagtacgcaaaatgctctcattcagtgttatgactccttactacagtgaagaaactgtatattcaaaaagtgatcttgatctggagaatgaagatggtgtatcaattatattctacctacaaaagatctttccagatgaatggaacaatttcatggaaagaaataattgcaaaagggaaagtgaagtatggggaaacgatgaaaatgtactgcaacttcgtcattgggcttctcttagagggcagacactctgtagaac

SEQ ID NO: 57664 - DNA, 1262 bp, Zea Mays
tacgagtggcatgaattttttccaaatggtctatttaatggatacacaaatttggtatgccatcttctctacgatatttggtggcatgactggagcacttgggcgacttggggagatacgaacattgggaatgctgagatcacgattccattctttgcctggagccttcaacacatatttggtgccttcagataaaagcaaaaataggcgcttttcactctcaaagcgctttgctgaggtttctcccaacaagagaactgaggccgccaagtttgctcaattgtggaatgaagtaatatgcagtttccgggaagaagatcttataagtgatggggagatggacttgttagtggttccttattcgtcagaccccagcctcaaattgatgcagtggcctctgttcttgcttgctagcaagatacctatagctttagacatggcggcacaatttagacctagagattcagatctttggaaacgtatatgtgctgatgagtacatgaaatgtgctgtactggaatgttatgaatcattcaaactcgttcttaatttattggtggttggagaaaatgaaaaaaggattattggtattataatcaaagaaatagaaggtaatattggaaagaatacattccttgccaattttagaatgagcgcactcccagttctttgcaagaaatttgtagagcttgtgtctaccttgaaagaaagagatgcctcaaagtttgataacgtggtgctgttgcttcaagacatgttagaagtgataacaagagatatgatggttaatgagattagagagctggctgagtttggtcatggtaataaggattcagttccaagaagacaactttttgctggttctggtacaaagcctgcaattgttttccctcctccggtttcagcacagtgggaagaacagattaagcgattgtaccttcttttgactgtgaaagaatctgcaatggacgtcccaacaaatttagaagctcgtcgaagaatagcatttttcactaattcactattcatggacatgcctcgtgcacctagatatttaatgttatcgcagtatcataattcatatgtttctcttgatcctattcaagaatttcttaaaaaataagagaaaaaacttattatgcctttgaactattttatttaattaataaggacaattaagctttaactagctggtattctatccctgtaaccttgatatttttcatgtcttccaaatattttgattgaatcctagtctgttc

SEQ ID NO: 57665 - DNA, 1478 bp, Zea Mays
atggcttggctcatgaggggggcacgcgcgggtacggtggctcgacttgtgagagggcgcgtgctgggtaaggcggctcggttcgtgggcgaggcgcgggcgctgactcgtgtacgggcgcggggtggcagctcggctcgtggctggggcgcagggtgggacgtgggcaggggcgcgcggtcgggtgcctttggtcgggtctatttaatggatacacaaatttggtatgccatcttctctacgatatttggtggcatgactggagcacttgggcgacttggggagatacgaacattgggaatgctgagatcacgattccattctttgcctggagccttcaacacatatttggtgccttcagataaaagcaaaaataggcgcttttcactctcaaagcgctttgctgaggtttctcccaacaagagaactgaggccgccaagtttgctcaattgtggaatgaagtaatatgcagtttccgggaagaagatcttataagtgatggggagatggacttgttagtggttccttattcgtcagaccccagcctcaaattgatgcagtggcctctgttcttgcttgctagcaagatacctatagctttagacatggcggcacaatttagacctagagattcagatctttggaaacgtatatgtgctgatgagtacatgaaatgtgctgtactggaatgttatgaatcattcaaactcgttcttaatttattggtggttggagaaaatgaaaaaaggattattggtattataatcaaagaaatagaaggtaatattggaaagaatacattccttgccaattttagaatgagcgcactcccagttctttgcaagaaatttgtagagcttgtgtctaccttgaaagaaagagatgcctcaaagtttgataacgtggtgctgttgcttcaagacatgttagaagtgataacaagagatatgatggttaatgagattagagagctggctgagtttggtcatggtaataaggattcagttccaagaagacaactttttgctggttctggtacaaagcctgcaattgttttccctcctccggtttcagcacagtgggaagaacagattaagcgattgtaccttcttttgactgtgaaagaatctgcaatggacgtcccaacaaatttagaagctcgtcgaagaatagcatttttcactaattcactattcatggacatgcctcgtgcacctagagtacgcaaaatgctctcattcagtgttatgactccttactacagtgaagaaactgtatattcaaaaagtgatcttgatctggagaatgaagatggtgtatcaattatattctacctacaaaagatctttccagatgaatggaacaatttcatggaaagaaataattgcaaaagggaaagtgaagtatggggaaacgatgaaaatgtactgcaacttcgtcattgggcttctcttagagggcagacactctgtagaac

SEQ ID NO: 57666 - DNA, 1867 bp, Zea Mays
cagccccaggcctccaaaattgaacgcctgagattcatgcctaggccaggatttttcacattacaagaggaggcatcagcaaggcttcctgtggtataaatttaagtgaagacatttttgctggtttcaactcgactctaagaagaggaaacgtcacccatcatgagtacatccaagtgggaaaagggcgcgatgtaggtctcaatcaaatttctctctttgaggcgaaagtggcttgtggaaatggggagcaaatactcagcagagatatatacaggctcggtcatcgatttgatttcttccggatgctttcatgctattttacaactgttggcttttatattagttcaatgatggttgtgataatagtttatgttttcttgtatgggagactgtacttagcattaagtggactggagtttgcaattatgaaacaagcacggatgagagggaaccgtgcacttcaagcagctatgggatctcagtctattgtgcagctaggtcttttgatggcattgccaatgtttatggagattgggctagaaagaggtttcagaagtgccctgggggatttcataatcatgcaacttcagctttgttcagtgttcttcactttctcccttgggaccaaatcacattattttggccgcacaattctccacggcggtgcaaaatatagggcaactggcagaggttttgttgttcgccatgtaaggtttgctgagaattacagaatgtactccagaagccattttgtgaaaggacttgagctgatgctactgctagtagtctatcagttatatggcgatgttgctacagattcgactgcatatatacttctgacatcatcaatgtggttcttggtcatcacttggctgttcgctccattcctcttcaatccatcaggatttgagtggcagaaaatagtagatgactgggatgactgggctaagtggattagcagtcgaggtggcattggggttccggctaacaaggcatgggaatcctggtgggaagaggaacaggaacatttgctgtccacaggtctactgggccgtttctgggaaatcatactctctctcagattcttcatattccaatacggtatcatataccacctgaatatatctgctggcaacaaaagcatctctgtttatggtctttcttggctggttattgttgctgtggtgatggtcctaaaggtggtatccatgggtaggaagaaatttagtgcggatttccagcttatgttccgacttctcaaattgttcctgttcatcggatctgttggaacactggcagttcttttcactgttcttcatcttacagttggtgacatattcgcaagcttccttgcatttgcacccacaggatgggccattctgcagatatctcaagcaagtaaaccggtcatcaaggcgtttgggctctggggatccgtgaaggccctctctagggggtatgagtacctgatggggattgtcatcttcgtcccggtggctgtgctggcatggttcccatttgtctcggagttccagacgagattgctttttaatcaggcatttagccgaggccttcaaatctctcggatcttggctggcggcaagaagcaaagataatgttaattcaggaaacattcgtacacacgggttaggcaagggattagctccaggatgattgttgtacatgggtcatgggtgtttgttggaggaattgtaaggctgctgatgctttcagagtcttggctgtatacacaaggctggtttttctttgtcatttccgttgtgtgtcatacgacattgttgcctcttggctcttggtacatacctaggctatatattttcattgttctagcttttcaattaat

SEQ ID NO: 57667 - DNA, 429 bp, Zea Mays
caaagaaaacaacacatataatacagagtgtatagagataaatgtcacaatataatcagagtacttattacatagcggaagtcttacaaaataaaatataaatataaatcgaactaaaatccatccttggcgccagaaagtcaacagggagatgccacctagatcaaatcgaactccacaatgtgtggctccacttgaaccacctgttcttctcctgtgggggtgtgagacaacaagggtgagctcacacatgttcatcgctcaataagttgtggggaataatgtggcatgaactcatcaaaggtgggagttcatgtgatgtataaagctggtcaacaataggggttaaagctgagcattgcttttaataagttggtcaaattttattagcagttactaaatgtaagtgaataccaaatcataataaaa

SEQ ID NO: 57668 - DNA, 733 bp, Zea Mays
ccggtatgttctgtccaccgtaggatccgtgatccacgaacgacaacatcccacgcccaggaatccatctcagccgcccgatctagttttaatggccaagatcaaaagactgaaatgatgattgagatctaatgccaaccgtttatcctatgatcaacggctagcactattcttcttcctcgggtatagctagccagcggcgcagattcaccctgcggtggctccattacagtgtccccgaaaatcaatcgcccctacacctaaactcaaaaccaacttatgccacgcaaagaggttggcaggatctcgtggagggtttcttaccatagttctgagcaaagatgatccggtcaacgcgttgcagcggctacgtgatccatggcagcccgacgacgacaccgacccactggtgcaaaatccccatggcacaaatcagacacggcgtgaaaatcctcacgagctacggtcgagtcccatccggctttcggtgattgaggctccttcgaccgagggtgatgttccacgcgccacctgcggctgccgcagatggttttgccgtgccccaaagactccaatcagcgatggaccgaactaacacgatgtaggtgcggtgacggcgtcgtccacaagcactcgatctctctcttccggtctcgctataccctggcgttgatttctacagcgccgcatcaaaggagtcaaacgcggtaggggagaacggcgtcctcggctt

SEQ ID NO: 57669 - DNA, 923 bp, Zea Mays
ttgtggacgacgccgtcatcgcacatacatcgtgttagttcggtccgtcgctgattggagtctttggggcacggcaaaaccatctgcggcagccgcaggtggcgcgtggaacatcaccctcggtcggaggagcctcaatcaccggaagccgtatgggattcgaccgtaccttgcgaggattttcacgccgtgtctgatttgtgccgtggggattctgcaccagtgggtcggtgtcgtcgtcgggctgccatggatcgcgcagccgctgcgacgcgttgaccgaatcatcttcgctcagacctatggtaagaaaccctccacgagatcctccatgccgacctctttgcgtggcataagtcggttttgagtttaggcgtaggggcgattgattttcggggacactataatggagccaccgcagggtgaacctgcgccgccggctagctatacccgaggaagaagaatagtgctagccattgatcataggataaacggttggcattagatctcaatcgtcatttcagtattttgatcttggccattaaaactggatcgggcggctgagatggattcctaggcgtgggatgttgctgttcgtggatctcggtacctacggcggcagaacgttccggttcgatgtggcccagatctaatctgtgccgaccattccggatcgggcggccctagatggagaatacctcttcggccttggcatgttgctaaagagaccctagacttgtaggaaatgaacccgccgtcctgcagaatagttctgtgtcttgggaaaacttgcacaaaagcccccgagttcctttgttttcatgcgtgtagtccagataataataaaaaccatataaataatatcagaaattgattttaacaaaaaaataattctaggaacttgtaaaatccatataaaattt

SEQ ID NO: 57670 - DNA, 1150 bp, Zea Mays
ttgtggacgacgccgtcatcgcacatacatcgtgttagttcggtccgtcgctgattggagtctttggggcacggcaaaaccatctgcggcagccgcaggtggcgcgtggaacatcaccctcggtcggaggagcctcaatcaccggaagccgtatgggattcgaccgtaccttgcgaggattttcacgccgtgtctgatttgtgccgtggggattctgcaccagtgggtcggtgtcgtcgtcgggctgccatggatcgcgcagccgctgcgacgcgttgaccgaatcatcttcgctcagacctatgtgaggtcacgaggatctgaagaatcatcctggtacctggaatctcaagtgccagacaagttatgcccttgaccaatttttacccaataatgttctttaatgtcattattcatgcataggtttaatttgacgggacccaataggtcaccctagtttgtttatccattttaccttgtttacccctgaatcatttgggtagttttgctattgctttacatggttttgggttaatatttcattatatccatgttccaattattttgttattttatttatgttcatgtcaagatcattattatctttaattggaacatggagcttaacttgagaaacatgtgccaccacaagggtggaatgggacgcccctggctgactagttaggaaagctagtggaagactaccttacccgaaaggggcaagggcagtaggggagttgcatgaacggaggttcttaggttgattttgctgcgatggcggtcatacgagggattcttgcaagtgctcttcccataactgtagtgggttttcggaagctagtggaactttgtaaaggcctcgtagtggatccctagccattcacctcggtagtgtctaagggtctagctaaccctggcgacatgggatacatgacttgtgggtacagggtacaacctctgcagagtgtaaaactggtgtactagccgagctcacggtcatgagcagctcagaactctcgcatgattaaattatgaaacttaaactcaatttatcatatgcattgcatgagatttattattcattttttctattattttattatgatttgctttcacttacatttagtatctgctaataaaatttgaccaa

SEQ ID NO: 57671 - DNA, 1077 bp, Zea Mays
agaataacctctcatatgatttatagtaaccaatttataatatagtttaatattttaatcacacagatcttctataaaatcataactccttaatcatgactccgatattagtagttctcgatcccacgagctcgtagcttcacgtagattattattattcagtttgtacttatgtttggtgtgattttaattttatttataacatacttgtttgtattgctacgactagcagtgaggtcacgaggatctgaagaatcatcctggtacctggaatctcaagtgccagacaagttatgcccttgaccaatttttacccaataatgttctttaatgtcattattcatgcataggtttaatttgacgggacccaataggtcaccctagtttgtttatccattttaccttgtttacccctgaatcatttgggtagttttgctattgctttacatggttttgggttaatatttcattatatccatgttccaattattttgttattttatttatgttcatgtcaagatcattattatctttaattggaacatggagcttaacttgagaaacatgtgccaccacaagggtggaatgggacgcccctggctgactagttaggaaagctagtggaagactaccttacccgaaaggggcaagggcagtaggggagttgcatgaacggaggttcttaggttgattttgctgcgatggcggtcatacgagggattcttgcaagtgctcttcccataactgtagtgggttttcggaagctagtggaactttgtaaaggcctcgtagtggatccctagccattcacctcggtagtgtctaagggtctagctaaccctggcgacatgggatacatgacttgtgggtacagggtacaacctctgcagagtgtaaaactggtgtactagccgagctcacggtcatgagcagctcagaactctcgcatgattaaattatgaaacttaaactcaatttatcatatgcattgcatgagatttattattcattttttctattattttattatgatttgctttcacttacatttagtatctgctaataaaatttgaccaa

SEQ ID NO: 57672 - DNA, 2851 bp, Zea Mays
ccttggtttcgtggcccgttaccccaccctgcttcctctccgtgggcacctgacgccgcgaccccggccccgagctggctttgccggccaatcggctcgcccgcgccgaccaccgcgcctcttcccctcgccgagatcgcctgaaaaggcaagcgaggccagcccgatccccctccccgcccccctcaagaaccaaaaaagggtgtcatttcgtcctaggatcgcagctcgagctcggtcgctctcgctcacctcgctccctactcgcctgctttccacttcctccgcgctcccgatttcctctccgattccttcgccgactcgtttcttcttggcaattcgttgcgcgggccatcgccccgacggcacctgggtacatcagctacaggacgggacaggtccctcttctaggagaggcttcgccagccgcctcccgcccccgtcactacgggcgccgtggagcggagatccatccggacttggatcggtctcgtcgcgtgtttgagcaatatgggttggctgaccaagttttttagaggctcaacccacaatatctcggaagagcagtatcacagcaggcctgcagaagacacagcatggaatgaaccctctagctctcctgttgtgactgacatcctttcagagtttaacaatgaggatattgaccgtgctatagcgctctctctatcggaagaggagcaaagaaaggaaaaggcaatagataaggatatgcatttggaggaggatgagcaacttgcaagagctatccaggaaagtttgaatgttgagtcaccccctcgcagaaatggcagtgccaatggtggtactatgtatcatccgcctcgcgaaactggcaatgcatatcagccacctcgtgaaaatggcagtgccaatggtggaaatgcatatcacccattaccatttatgttctcatctggattcaggatgtcacagagagattggtcacgggcgttttctcagttgcatgggagctgtttggcatccggaatgttttcgttgccatgcatgtagtcaacctatatatgactatgagttctccatgtccgggaatcatccataccataaaacttgctacaaggagcagtttcacccgaaatgtgatgtctgcaagcagttcattcctacaaatatgaatggccttattgaatatagggcacatcctttctgggtacaaaaatactgtccttcacatgaaatggatggtactccgaggtgctgtagttgtgaaagaatggagccaagggaatcaaaatatgtattactggatgatggtcgtaagctctgcctggagtgccttgattccgcagtgatggatacaaacgactgccagcctttgtatcttgaaattcaggaattttacgaaggactgaatatgaaagtggaacagcaggttcctctgcttctggtcgagcgacaagctttgaatgaagccatggaaggagagaaggctggtcaccaccatcttcctgaaacaagaggactatgcttatcagaagaacagactgttagcacgatactgagaccaagaatggctggaaacaaaattatgggaatgataacagagccatataggctgacacggcgatgtgaagtgactgcaattcttattctgtatggtctcccaagattgttgacaggttcaattttagctcatgagatgatgcatgcatggttgcggcttaaaggataccggacactgagcccagacgtagaagagggcatttgccaagttcttgctcacatgtggatcgagtcagagatcatggccggatcaggcagtagtgccgcatcgtcatcctcaggatcttcgtcatccacatcatcgaaaaagggcgggcggtcccagtttgagcacaggcttggggactttttcaagcatcagatcgagacggatacttccatggcctacggagatggtttcagaactgggaatcgagccgttcttcattacggcttgaagcgcacccttgagcatatccggctaactgggacctttccattttgaagtagcatggattcatattttgggaaagcttatattatatacatgattttcttccagagttccattacaaccaaagagataaattgtaaaaaaacattctttccagaatccagagatataatatctatgaaggccaaaatgaagtattaaatgattgagatcgatggtcagtctgcccaatcattttgtattctgatcaaactctggaatgaaacaatggcaatctttttatatggtgtcagtttcaataaataccagtaccattttacagtatatatacagttgctttcatgtgtgagcttatctcaaactacttcgtccgttccaaattataaggtgttttaggttgtgtttgttttccttttagattatataagttggattatagtcaaagtgtaggaggataaatatatcaatttgagatcacaaattgtaacacacaaaatcctaattttgggatttaaaaattaaaaaaatattatcctgaaatctaaataagagtattttcttataaaagattaaagtaaaagtatctcataaaagatattatatattagaaagtatttcctcgtaaaacaaaataagtagtaaatattgaagtttttgaatgaacttttaatttgactacatattcaaaatactttcgcagaatgaatatgatgtgtgttgcatattgaacattacctaaataaataaggtaataaataaatgaataaacttaagacatatattttgcatttatgttggagatttttttgtgcaaattagaattctatttgaatttaaacctaattggaattggaaaatatgaaataaaaaggaaaa

SEQ ID NO: 57673 - DNA, 4912 bp, Zea Mays
ccttggtttcgtggcccgttaccccaccctgcttcctctccgtgggcacctgacgccgcgaccccggccccgagctggctttgccggccaatcggctcgcccgcgccgaccaccgcgcctcttcccctcgccgagatcgcctgaaaaggcaagcgaggccagcccgatccccctccccgcccccctcaagaaccaaaaaagggtgtcatttcgtcctaggatcgcagctcgagctcggtcgctctcgctcacctcgctccctactcgcctgctttccacttcctccgcgctcccgatttcctctccgattccttcgccgactcgtttcttcttggcaattcgttgcgcgggccatcgccccgacggcacctgggtacatcagctacaggacgggacaggtccctcttctaggagaggcttcgccagccgcctcccgcccccgtcactacgggcgccgtggagcggagatccatccggacttggatcggtctcgtcgcgtggtaagcatgtccagcgtgcttggatggattctagagtctatacagtagtgattggagttatcaatcaaatcctttttctcgcttcggttcagttcagttgcggatttgtccgcgtggttccgtactaatctaatccaaatgcactgttagagtaggttatctatttgtacgataaataatctgttgacacttacacgattgaacttggcacccaagtgctggtgcagtttgtttcctggggttcaattgtatccattctgatctcacccttcattttgcgtttcccaacattttggcattaatttcagattacagctcttgttttattgccagtttgagcaatatgggttggctgaccaagttttttagaggctcaacccacaatatctcggaagagcagtatcacagcaggcctgcagaagacacagcatggaatgaaccctctagctctcctgttgtgactgacatcctttcagagtttaacaatgaggatattgaccgtgctatagcgctctctctatcggaagaggagcaaagaaaggaaaaggcaatagataaggatatgcatttggaggaggatgagcaacttgcaagagctatccaggaaagtttgaatgttgagtcaccccctcgcagaaatggcagtgccaatggtggtactatgtatcatccgcctcgcgaaactggcaatgcatatcagccacctcgtgaaaatggcagtgccaatggtggaaatgcatatcacccattaccatttatgttctcatctggattcaggttcatttcaatttggttactaagtttactattatagttttgtgcaatttgagttgatggttatgaaatagtaaataagcatataactgaactaatatttttgtttccagaaaggaagtacaccactcatggaccatacatgctgcacatgttactgctaaaaaaacagcaaatcttatttttgtactattcccaccaaaagcgcctgaatattgatttatgtaattcattccctgaataccactatttgtttattggcttcacgcgaaagggcctctagatgagttggttaagtggcctgagcaccactcctcaggtcctgagttcaaatcctagtgggagcgaatttcagactgaggttaaaaaatgtcactcgctggttcccctggttgcgtgcacacgagatgaattgacctaagagctttcctgatctttctcggtcggggctccgattgagcatcttcttaatataatatcgtgggggcggtcttttccgtactggccgagtttaatggcttcacaaacactgctagtcacaacgatataatgagcctgtttggttcaacttttttctgacgagcttttctaagacctagttgtggggagtctgagtatcgtgaggattacatacagaggaagataaaagggtccatagggtttaggatctagaaagagtcgaattcctcctatcacgactacttggccaattctgtgttcacgttgatttagacaattttcaccaaagtgattctcatagaagcatgctgaaaagctggcgttatgcagtctgcatcaggcatcagcttctgttggctagaatctggttttaagctgaaacaaacggagcaattatgtcttgagtgagaactcgtcccagcagacttttgaatgggtgcggttatttcgtgttaacaaaactacctaggactttataattattttgttacgaaaatatctgtagaaattagagccgaagaggaatcaaactgtacactccacctcccaccaactgagctatgcatttcttcgttgcaaggaacagagaaaaaacgaatataggtgtctccacttttcaacaactcatgtaaagttctggccttgttttctcccactaaccaattacgttataaccacagaacaaacttggttgtcctatcaggaaaattccagctgagtttgcttatgtagtaaagaagctaaacgcatgatggcataattatttagaaaaaaaatcccacgctgctttaggtatacaactgaatttttttatctgatttgtgtagtgtgcccgttattatgccaagttcagtttccttatcttttccccagtcttcaggaaaactgttacaaactgtggtgaaatttatagctcagatgtagaatgaaagcaaatattttaaagtggacggggcttgtggttatgcgataccttatatgtaaaaggatgaagcatgtcctcaaggatgttgtttccttaaatagaagtgccttggacatgtgaaatttccaatgctatcaaaagattaagaaattgtacatatgtgaattttcaaatgctgtcaaataaacaagaaattgtgtatgatttttcacatcgattgtagtaataaagacgctgtaatgctcaagaacacaccaggatgattggcatggaagatatcattttgaccttttttctcttactatttttttatataaactaacttcttttctgcagagcatgcgcaggatgtcacagagagattggtcacgggcgttttctcagttgcatgggagctgtttggcatccggaatgttttcgttgccatgcatgtagtcaacctatatatgactatgagttctccatgtccgggaatcatccataccataaaacttgctacaaggagcagtttcacccgaaatgtgatgtctgcaagcagttcattcctacaaatatgaatggccttattgaatatagggcacatcctttctgggtacaaaaatactgtccttcacatgaaatggatggtactccgaggtgctgtagttgtgaaagaatggagccaagggaatcaaaatatgtattactggatgatggtcgtaagctctgcctggagtgccttgattccgcagtgatggatacaaacgactgccagcctttgtatcttgaaattcaggaattttacgaaggactgaatatgaaagtggaacagcaggttcctctgcttctggtcgagcgacaagctttgaatgaagccatggaaggagagaaggctggtcaccaccatcttcctgaaacaagaggactatgcttatcagaagaacagactgttagcacgatactgagaccaagaatggctggaaacaaaattatgggaatgataacagagccatataggctgacacggcgatgtgaagtgactgcaattcttattctgtatggtctcccaagattgttgacaggttcaattttagctcatgagatgatgcatgcatggttgcggcttaaaggataccggacactgagcccagacgtagaagagggcatttgccaagttcttgctcacatgtggatcgagtcagagatcatggccggatcaggcagtagtgccgcatcgtcatcctcaggatcttcgtcatccacatcatcgaaaaagggcgggcggtcccagtttgagcacaggcttggggactttttcaagcatcagatcgagacggatacttccatggcctacggagatggtttcagaactgggaatcgagccgttcttcattacggcttgaagcgcacccttgagcatatccggctaactgggacctttccattttgaagtagcatggattcatattttgggaaagcttatattatatacatgattttcttccagagttccattacaaccaaagagataaattgtaaaaaaacattctttccagaatccagagatataatatctatgaaggccaaaatgaagtattaaatgattgagatcgatggtcagtctgcccaatcattttgtattctgatcaaactctggaatgaaacaatggcaatctttttatatggtgtcagtttcaataaataccagtaccattttacagtatatatacagttgctttcatgtgtgagcttatctcaaactacttcgtccgttccaaattataaggtgttttaggttgtgtttgttttccttttagattatataagttggattatagtcaaagtgtaggaggataaatatatcaatttgagatcacaaattgtaacacacaaaatcctaattttgggatttaaaaattaaaaaaatattatcctgaaatctaaataagagtattttcttataaaagattaaagtaaaagtatctcataaaagatattatatattagaaagtatttcctcgtaaaacaaaataagtagtaaatattgaagtttttgaatgaacttttaatttgactacatattcaaaatactttcgcagaatgaatatgatgtgtgttgcatattgaacattacctaaataaataaggtaataaataaatgaataaacttaagacatatattttgcatttatgttggagatttttttgtgcaaattagaattctatttgaatttaaacctaattggaattggaaaatatgaaataaaaaggaaaa

SEQ ID NO: 57674 - DNA, 2474 bp, Zea Mays
ccttggtttcgtggcccgttaccccaccctgcttcctctccgtgggcacctgacgccgcgaccccggccccgagctggctttgccggccaatcggctcgcccgcgccgaccaccgcgcctcttcccctcgccgagatcgcctgaaaagaggctcaacccacaatatctcggaagagcagtatcacagcaggcctgcagaagacacagcatggaatgaaccctctagctctcctgttgtgactgacatcctttcagagtttaacaatgaggatattgaccgtgctatagcgctctctctatcggaagaggagcaaagaaaggaaaaggcaatagataaggatatgcatttggaggaggatgagcaacttgcaagagctatccaggaaagtttgaatgttgagtcaccccctcgcagaaatggcagtgccaatggtggtactatgtatcatccgcctcgcgaaactggcaatgcatatcagccacctcgtgaaaatggcagtgccaatggtggaaatgcatatcacccattaccatttatgttctcatctggattcagagcatgcgcaggatgtcacagagagattggtcacgggcgttttctcagttgcatgggagctgtttggcatccggaatgttttcgttgccatgcatgtagtcaacctatatatgactatgagttctccatgtccgggaatcatccataccataaaacttgctacaaggagcagtttcacccgaaatgtgatgtctgcaagcagttcattcctacaaatatgaatggccttattgaatatagggcacatcctttctgggtacaaaaatactgtccttcacatgaaatggatggtactccgaggtgctgtagttgtgaaagaatggagccaagggaatcaaaatatgtattactggatgatggtcgtaagctctgcctggagtgccttgattccgcagtgatggatacaaacgactgccagcctttgtatcttgaaattcaggaattttacgaaggactgaatatgaaagtggaacagcaggttcctctgcttctggtcgagcgacaagctttgaatgaagccatggaaggagagaaggctggtcaccaccatcttcctgaaacaagaggactatgcttatcagaagaacagactgttagcacgatactgagaccaagaatggctggaaacaaaattatgggaatgataacagagccatataggctgacacggcgatgtgaagtgactgcaattcttattctgtatggtctcccaagattgttgacaggttcaattttagctcatgagatgatgcatgcatggttgcggcttaaaggataccggacactgagcccagacgtagaagagggcatttgccaagttcttgctcacatgtggatcgagtcagagatcatggccggatcaggcagtagtgccgcatcgtcatcctcaggatcttcgtcatccacatcatcgaaaaagggcgggcggtcccagtttgagcacaggcttggggactttttcaagcatcagatcgagacggatacttccatggcctacggagatggtttcagaactgggaatcgagccgttcttcattacggcttgaagcgcacccttgagcatatccggctaactgggacctttccattttgaagtagcatggattcatattttgggaaagcttatattatatacatgattttcttccagagttccattacaaccaaagagataaattgtaaaaaaacattctttccagaatccagagatataatatctatgaaggccaaaatgaagtattaaatgattgagatcgatggtcagtctgcccaatcattttgtattctgatcaaactctggaatgaaacaatggcaatctttttatatggtgtcagtttcaataaataccagtaccattttacagtatatatacagttgctttcatgtgtgagcttatctcaaactacttcgtccgttccaaattataaggtgttttaggttgtgtttgttttccttttagattatataagttggattatagtcaaagtgtaggaggataaatatatcaatttgagatcacaaattgtaacacacaaaatcctaattttgggatttaaaaattaaaaaaatattatcctgaaatctaaataagagtattttcttataaaagattaaagtaaaagtatctcataaaagatattatatattagaaagtatttcctcgtaaaacaaaataagtagtaaatattgaagtttttgaatgaacttttaatttgactacatattcaaaatactttcgcagaatgaatatgatgtgtgttgcatattgaacattacctaaataaataaggtaataaataaatgaataaacttaagacatatattttgcatttatgttggagatttttttgtgcaaattagaattctatttgaatttaaacctaattggaattggaaaatatgaaataaaaaggaaaa

SEQ ID NO: 57675 - DNA, 2880 bp, Zea Mays
ccttggtttcgtggcccgttaccccaccctgcttcctctccgtgggcacctgacgccgcgaccccggccccgagctggctttgccggccaatcggctcgcccgcgccgaccaccgcgcctcttcccctcgccgagatcgcctgaaaaggcaagcgaggccagcccgatccccctccccgcccccctcaagaaccaaaaaagggtgtcatttcgtcctaggatcgcagctcgagctcggtcgctctcgctcacctcgctccctactcgcctgctttccacttcctccgcgctcccgatttcctctccgattccttcgccgactcgtttcttcttggcaattcgttgcgcgggccatcgccccgacggcacctgggtacatcagctacaggacgggacaggtccctcttctaggagaggcttcgccagccgcctcccgcccccgtcactacgggcgccgtggagcggagatccatccggacttggatcggtctcgtcgcgtgctcttgttttattgccagtttgagcaatatgggttggctgaccaagttttttagaggctcaacccacaatatctcggaagagcagtatcacagcaggcctgcagaagacacagcatggaatgaaccctctagctctcctgttgtgactgacatcctttcagagtttaacaatgaggatattgaccgtgctatagcgctctctctatcggaagaggagcaaagaaaggaaaaggcaatagataaggatatgcatttggaggaggatgagcaacttgcaagagctatccaggaaagtttgaatgttgagtcaccccctcgcagaaatggcagtgccaatggtggtactatgtatcatccgcctcgcgaaactggcaatgcatatcagccacctcgtgaaaatggcagtgccaatggtggaaatgcatatcacccattaccatttatgttctcatctggattcagagcatgcgcaggatgtcacagagagattggtcacgggcgttttctcagttgcatgggagctgtttggcatccggaatgttttcgttgccatgcatgtagtcaacctatatatgactatgagttctccatgtccgggaatcatccataccataaaacttgctacaaggagcagtttcacccgaaatgtgatgtctgcaagcagttcattcctacaaatatgaatggccttattgaatatagggcacatcctttctgggtacaaaaatactgtccttcacatgaaatggatggtactccgaggtgctgtagttgtgaaagaatggagccaagggaatcaaaatatgtattactggatgatggtcgtaagctctgcctggagtgccttgattccgcagtgatggatacaaacgactgccagcctttgtatcttgaaattcaggaattttacgaaggactgaatatgaaagtggaacagcaggttcctctgcttctggtcgagcgacaagctttgaatgaagccatggaaggagagaaggctggtcaccaccatcttcctgaaacaagaggactatgcttatcagaagaacagactgttagcacgatactgagaccaagaatggctggaaacaaaattatgggaatgataacagagccatataggctgacacggcgatgtgaagtgactgcaattcttattctgtatggtctcccaagattgttgacaggttcaattttagctcatgagatgatgcatgcatggttgcggcttaaaggataccggacactgagcccagacgtagaagagggcatttgccaagttcttgctcacatgtggatcgagtcagagatcatggccggatcaggcagtagtgccgcatcgtcatcctcaggatcttcgtcatccacatcatcgaaaaagggcgggcggtcccagtttgagcacaggcttggggactttttcaagcatcagatcgagacggatacttccatggcctacggagatggtttcagaactgggaatcgagccgttcttcattacggcttgaagcgcacccttgagcatatccggctaactgggacctttccattttgaagtagcatggattcatattttgggaaagcttatattatatacatgattttcttccagagttccattacaaccaaagagataaattgtaaaaaaacattctttccagaatccagagatataatatctatgaaggccaaaatgaagtattaaatgattgagatcgatggtcagtctgcccaatcattttgtattctgatcaaactctggaatgaaacaatggcaatctttttatatggtgtcagtttcaataaataccagtaccattttacagtatatatacagttgctttcatgtgtgagcttatctcaaactacttcgtccgttccaaattataaggtgttttaggttgtgtttgttttccttttagattatataagttggattatagtcaaagtgtaggaggataaatatatcaatttgagatcacaaattgtaacacacaaaatcctaattttgggatttaaaaattaaaaaaatattatcctgaaatctaaataagagtattttcttataaaagattaaagtaaaagtatctcataaaagatattatatattagaaagtatttcctcgtaaaacaaaataagtagtaaatattgaagtttttgaatgaacttttaatttgactacatattcaaaatactttcgcagaatgaatatgatgtgtgttgcatattgaacattacctaaataaataaggtaataaataaatgaataaacttaagacatatattttgcatttatgttggagatttttttgtgcaaattagaattctatttgaatttaaacctaattggaattggaaaatatgaaataaaaaggaaaa

SEQ ID NO: 57676 - DNA, 4245 bp, Zea Mays
ccttggtttcgtggcccgttaccccaccctgcttcctctccgtgggcacctgacgccgcgaccccggccccgagctggctttgccggccaatcggctcgcccgcgccgaccaccgcgcctcttcccctcgccgagatcgcctgaaaagctcttgttttattgccagtttgagcaatatgggttggctgaccaagttttttagaggctcaacccacaatatctcggaagagcagtatcacagcaggcctgcagaagacacagcatggaatgaaccctctagctctcctgttgtgactgacatcctttcagagtttaacaatgaggatattgaccgtgctatagcgctctctctatcggaagaggagcaaagaaaggaaaaggcaatagataaggatatgcatttggaggaggatgagcaacttgcaagagctatccaggaaagtttgaatgttgagtcaccccctcgcagaaatggcagtgccaatggtggtactatgtatcatccgcctcgcgaaactggcaatgcatatcagccacctcgtgaaaatggcagtgccaatggtggaaatgcatatcacccattaccatttatgttctcatctggattcaggttcatttcaatttggttactaagtttactattatagttttgtgcaatttgagttgatggttatgaaatagtaaataagcatataactgaactaatatttttgtttccagaaaggaagtacaccactcatggaccatacatgctgcacatgttactgctaaaaaaacagcaaatcttatttttgtactattcccaccaaaagcgcctgaatattgatttatgtaattcattccctgaataccactatttgtttattggcttcacgcgaaagggcctctagatgagttggttaagtggcctgagcaccactcctcaggtcctgagttcaaatcctagtgggagcgaatttcagactgaggttaaaaaatgtcactcgctggttcccctggttgcgtgcacacgagatgaattgacctaagagctttcctgatctttctcggtcggggctccgattgagcatcttcttaatataatatcgtgggggcggtcttttccgtactggccgagtttaatggcttcacaaacactgctagtcacaacgatataatgagcctgtttggttcaacttttttctgacgagcttttctaagacctagttgtggggagtctgagtatcgtgaggattacatacagaggaagataaaagggtccatagggtttaggatctagaaagagtcgaattcctcctatcacgactacttggccaattctgtgttcacgttgatttagacaattttcaccaaagtgattctcatagaagcatgctgaaaagctggcgttatgcagtctgcatcaggcatcagcttctgttggctagaatctggttttaagctgaaacaaacggagcaattatgtcttgagtgagaactcgtcccagcagacttttgaatgggtgcggttatttcgtgttaacaaaactacctaggactttataattattttgttacgaaaatatctgtagaaattagagccgaagaggaatcaaactgtacactccacctcccaccaactgagctatgcatttcttcgttgcaaggaacagagaaaaaacgaatataggtgtctccacttttcaacaactcatgtaaagttctggccttgttttctcccactaaccaattacgttataaccacagaacaaacttggttgtcctatcaggaaaattccagctgagtttgcttatgtagtaaagaagctaaacgcatgatggcataattatttagaaaaaaaatcccacgctgctttaggtatacaactgaatttttttatctgatttgtgtagtgtgcccgttattatgccaagttcagtttccttatcttttccccagtcttcaggaaaactgttacaaactgtggtgaaatttatagctcagatgtagaatgaaagcaaatattttaaagtggacggggcttgtggttatgcgataccttatatgtaaaaggatgaagcatgtcctcaaggatgttgtttccttaaatagaagtgccttggacatgtgaaatttccaatgctatcaaaagattaagaaattgtacatatgtgaattttcaaatgctgtcaaataaacaagaaattgtgtatgatttttcacatcgattgtagtaataaagacgctgtaatgctcaagaacacaccaggatgattggcatggaagatatcattttgaccttttttctcttactatttttttatataaactaacttcttttctgcagagcatgcgcaggatgtcacagagagattggtcacgggcgttttctcagttgcatgggagctgtttggcatccggaatgttttcgttgccatgcatgtagtcaacctatatatgactatgagttctccatgtccgggaatcatccataccataaaacttgctacaaggagcagtttcacccgaaatgtgatgtctgcaagcagttcattcctacaaatatgaatggccttattgaatatagggcacatcctttctgggtacaaaaatactgtccttcacatgaaatggatggtactccgaggtgctgtagttgtgaaagaatggagccaagggaatcaaaatatgtattactggatgatggtcgtaagctctgcctggagtgccttgattccgcagtgatggatacaaacgactgccagcctttgtatcttgaaattcaggaattttacgaaggactgaatatgaaagtggaacagcaggttcctctgcttctggtcgagcgacaagctttgaatgaagccatggaaggagagaaggctggtcaccaccatcttcctgaaacaagaggactatgcttatcagaagaacagactgttagcacgatactgagaccaagaatggctggaaacaaaattatgggaatgataacagagccatataggctgacacggcgatgtgaagtgactgcaattcttattctgtatggtctcccaagattgttgacaggttcaattttagctcatgagatgatgcatgcatggttgcggcttaaaggataccggacactgagcccagacgtagaagagggcatttgccaagttcttgctcacatgtggatcgagtcagagatcatggccggatcaggcagtagtgccgcatcgtcatcctcaggatcttcgtcatccacatcatcgaaaaagggcgggcggtcccagtttgagcacaggcttggggactttttcaagcatcagatcgagacggatacttccatggcctacggagatggtttcagaactgggaatcgagccgttcttcattacggcttgaagcgcacccttgagcatatccggctaactgggacctttccattttgaagtagcatggattcatattttgggaaagcttatattatatacatgattttcttccagagttccattacaaccaaagagataaattgtaaaaaaacattctttccagaatccagagatataatatctatgaaggccaaaatgaagtattaaatgattgagatcgatggtcagtctgcccaatcattttgtattctgatcaaactctggaatgaaacaatggcaatctttttatatggtgtcagtttcaataaataccagtaccattttacagtatatatacagttgctttcatgtgtgagcttatctcaaactacttcgtccgttccaaattataaggtgttttaggttgtgtttgttttccttttagattatataagttggattatagtcaaagtgtaggaggataaatatatcaatttgagatcacaaattgtaacacacaaaatcctaattttgggatttaaaaattaaaaaaatattatcctgaaatctaaataagagtattttcttataaaagattaaagtaaaagtatctcataaaagatattatatattagaaagtatttcctcgtaaaacaaaataagtagtaaatattgaagtttttgaatgaacttttaatttgactacatattcaaaatactttcgcagaatgaatatgatgtgtgttgcatattgaacattacctaaataaataaggtaataaataaatgaataaacttaagacatatattttgcatttatgttggagatttttttgtgcaaattagaattctatttgaatttaaacctaattggaattggaaaatatgaaataaaaaggaaaa

SEQ ID NO: 57677 - DNA, 1288 bp, Zea Mays
gttgaagttcaccgccacgtttgaatcggctcgccgctgcggccgcgtgccgaggacaagtctgggaggggcggagggcgccgctggtggctccctgcctccggacgcgcaggcgacagggagagacaatgtgggcgagctcgcggtggcgtcctcgccccagccgttttcggcgtcgcggcggacgaaacttcaccgagaacacgccaacgggaggaagaagaaggaagcaatcgtcagacggattgttgtcggtgaacggggagacgcatcgagcagcctaggaacatatggcaggatgttgtgagaaggatgttcagtaagcgcgagcgtagcaatcttgacatctacaaagatttcaaccaacttaccaagcgcggattcatggcatggccataatcagattaatgttggggcctctgaccaaagtgggaggatcagcaagaagaggaaggaaagtatagcaacggtggggagaatgattttcaagaagatgacgaaccctaggcaactaagaagccaagagttgtttggtcagtcgaactggtcggaaatttgttgcggttgtcaatcagcttggaattgataaagctgtaccaaaaagaatccttgagctgatgaatgtggagaaactcaccaggaaaatgtcacgggccatcttcagaaatacaggctctatctcaaacgattaagtgttgtggcgtcacagcaagctagcattgttgccgcttttggaggtagagaccccttatttcttcacatgggagcctttgaaggtctccagggttatcaaccttttgcaccctgtgctgctctatcatccttcagcccacatggcttgctaggtagaactagcgcggcaacattcagggtcccggaacttgctcctgccatgacagtgcaaagtgctaccaacagtggcataataagtcgttgtgctggtgatgcaaacaactttcagcttcccggtttacaagaagaccaacaagcacatttggggcaaggttcggccacatctcttgggctgccccaactccaacagaagtggatccaacaagaaaataatgacatgtctgttgtgttttctgggagtgcactggctaacactctatctggtgaactccagagacttatgagcagttcattgccatgccaccacaggaactggtggaacaaagtttttgcattggtaaacatgcctgtttgtccatccggtagcttaacagcatcatccagcaataacaaggatggtggtgctagttattgcagtagtgttgctcgctcctga

SEQ ID NO: 57678 - DNA, 3015 bp, Zea Mays
tgtacctgatagtatcaccaatgaagggtgtaagtcgattcagggttagaggaaaattggcacccagatatattggttcgttccccattcttgagcgatgtcagcaagtggcgtacagacttcaattgccagaatcattgtctgcggtgcacaatgtattccatgtatctcagttaaagaaatgtcttcggattcctgatcgaactatggatgtggtggatgttcatttggaaccagatttgacctattcagaacatcccattcgagttttggatgagaaagactgaattactcgaaagaggactctcaagttttataaggtacaatggaaccaacacaccgaagaagaagctacctgggagactcgagacttcttagagaagcattttcctaagttcttagcctcctgtaatctttagagtttatgtaatctattgtaaagttagaacaaaccacacaccacaccctgctctgtaagataaatcaggaaataaagttgtgacgcgtttccttttccattacttaccctaggaccttaaatctcgggatgagattcttttatgggggaaggatgtaacacccctggtgttacaagaactaaaacttgggcatggcatcatatgcattggcatttcattatgtatgttacacctagagtgcatccactaggataaaacttaaaaacaagttgtgatgtgatggcttgaagggatctttaaccctaggatagggtacttaaccaagggatagaggtatgagggtgtgtgtgataacaaattgagtattatctcaaaggttagtggagatgttcataagagactaaatttggagagtttgagtgtgtggaaccgtttgaattattccagcttaagtgcccaattcgtacctttaaaggcagcaacacacttaaatcggaataacccgtcagtccctcggatctagtccgataaagccacttaccaaggatcgaatatcactagctcactcgaaggagaggcacaaagaaatacaataaagcataatatcacaaatttaagaagtatcagtagcgattacattatcgaagtttcaaaagcagtaacaatagtttttagtgcagcggaaataactaatggagaaaactgagtaacattgcgaagcctggccacactacacctcttggccaagtcacaccatcaatcaaaacaaggaggtacctacaaaaattatgccacaagcaaggctgagtacactaatactcggctagacttatccagtgtgaggagtctactcctctacctctagaccatgaagttgtttggctgaggggtttggtttgccaaacgcactagctgagtctaaaatcaaattttagcttttcaggttctagaataataatttagactagatgagtacctagctatcccttcatggtagcaagcaatttagtcaaccaacatctttttgaaagtaacctcatttgcacttattactcaatgcagtacaatggatcaagcagtctcattagctacgagaagcagacgattcgaatcgagttttaaccttgcaaggtaaacctaaacacacgacatgtaggggcactgcgtccccacacatgtcaaccgtccccatcgattccctggcaacagaacagggctcacggccttggcgtacaatgctccaattgtccccggctgctgctgtgcaacgaccgcacttgtacccaccataatccgacatgggagactccgtctcaggtccaatgaggagtaaagtctgcgggcagattcaatcaggtactaggcttatcagttaccatatttcccaacatgtgtttagtacgttcaaacacttgacataggtatctgcacgttaatccttattccaatttcgtctcatagacaacgcatccccatggatccgtgtccacagaccatcatcattctgttataaaaaatggatacaaccaattcctaacctcgtgcgagtgctagaaaaatcactcgacttctaccgagatcctgatttagcatagcagctactcgacctagcatactagtatccatctcaaaaggaatcctaagttcatgcaaatagggtttcaaacaactcctacacttaagtgcacggtacaagcctacaaactttaagtgtagtaaaatagcatatataaacggttatgcataaaattggggcttgcttggaattcaacactagatagtgtttgctagatgacactcgcttggcgagcatcccctggttaagtccatccttctttaggttgtccaccaactgcatcttgttgttggcaccacatcacttgcacgatcatcatctctcggtcctaaatgagatgcaagttgcatatgtatgaatataaggaaaaatatcacaagatatacaagacacactgtagcaagctagatataaggcgcaagacacggaaccgccaacgatcatacgtaggtgctaattagccatacgttatcgacctacgaatttaacactactaagaaaccgacaaacactatcatatacatagccaccacaaacacgacatcacgagtacaagcatttatttaattggatacaacttttcattagttcttctgttgatcgtacaaaagcatcccagacaacacagttcaatagaggacataggcatcagcgtctatggaactcctatatcacaatcaactagagaaagtgtggcagaacctcccaagttattgggcccacatgcacctgtccttgtctcaaagacctcagacggctatgcatgtgcaccagataacttaacaggatctgtccgagtgtcccagggaccccggataaaccactcacaaccagaaccgcgggattaagtaatacaaatcacacacaccaatattttgcagcggaaatcttattaccaaattttacaagttacaaaaattttacttcgtacatgatcagagtgattactacattgattcaaagaaagaaactttgaacggttataaatttgtcggcgtttcgagacaggggggtccctaa

SEQ ID NO: 57679 - DNA, 851 bp, Zea Mays
atagatacttctgtgaagtatcaaaatatgatttacaaaaatgcttagccttgcttagatcttgtggatagaggttgtcctcaatttaaccatggagaggatggcttctacctgcaagaatattttcatttggagcaatagtgggatcttactgcagagttccctttgatgctcttttcatcctaaggaacacaaacaatcctaaggatggaagtacttaaatcgggacttgggctaggaacaggtgatgctccgcccaagttagttaaggattggatgcgtatgtaggcctgtatgatcaaggactatcttaactagccacatgccctggatatgggacagggtaagcttgaactcggctattccatgcatgaaaagacaatcgcgcactgggagtggagagatggcgagagtggcacgtaccctcctggcaaaggatcgcctaaaaggggtggtgtgctctcgggtggcgtggacctgttcatgtagtggaggatccgtgggaacggttgacatatgcaagggttaagtgctacatatgtcgtgtggttagagatcctcagctgagtaaatcgattcggatcgccgttatatccccggacagtggagacttgagctccgacctacaacctaagtcaggaagtgaacattatgaataaaaatgatgttgtattgatgagatggtgaaattagactagatgcaaacagagtctactaatatttaatctgacgttaaaacattgaaagtaaggactcacattagtaagctttttctgcaaaagtatctaagttgattcttgctaaaagcctctccttgattcctaaatccagcatacccttgagagtctttt

SEQ ID NO: 57680 - DNA, 2463 bp, Zea Mays
ccgcgatctctgagtttggcaaaattcgtcgtgtccatgcatccatcacccaaattgactgcgcagcgtgctttgccattccattgcgcccgtttagcctcataattgtcgattgtctttccccgagtcctctgtgagacgtcttgccccgccgatcgtcgtcgcaccatccaacctccgcctcaccgcggccaaggttgtccagaacgtgcccccgacgctgtcggtcatcgccgtgagccacctcatcgtcgactggtctgttgcttttgtgtgttgttgtgtatggacgtgttcgctgagcgttggggagcacgagggtgctctcacccttgtcgaaggtctccggcaaggcgggaccttgtcaccttggtctcgccggcgtttggctcggccgacatcgtggacctaggtttgcgaaggaaaagaatgtggaggcttaattatgatgtctgtgagagttttgaatagtgcatcgggcgccggtgcggtttgttcaaacgtggaggtccctagtgaaaaagtggaacggcgggcgcaggccttgcgcgcgggcacaggggccgctggcgttgggctgtttcgggctggtttcggcccagggactattcaccgtttctcttcattatttagctggtagtttgtaaaaactaccaaaaatcataggaaaatccaaaaatcgtaagagaaattttgtggggttcataaaaataaaaaatttctggtaaaattggtttaaggatttttataacagttaaatttttttaagtgatttaacggtgctcttaaaaggcttatttgaatcttagtggtaaaagttgagcaccaaaaaattcgaatttttttgggtaatttagttttgatcagtttgacactcggtaaaagtttgaggttgttcggaagtctaaaccttctatggttcattataagaaatgattaatccttaatcatgtatttgattaagtgtttggatgaagaaacaagattacctagtagaatctgaattttggtgtagtctagagggttgttttgttatattccttgcaagtttcattttcatgacatagcacaagcattcgtatcatgttatttcatgtacagatccaagaataagtgattttcgaagagaagtttcctccagtacttgaatacccattggttgggtttatgctaacaggttatctagtagaaggatcttgaatctcttctctgcaacaaaggcaagccctagtgcattcatccttttccttgtatttacaaaattttatcaccttatatgatgcattaggtgacaggtgttgattgattaaacacttgctacattaccatccttgaaagattgattaccgtacattgatccccgttttataaaagctagtaatgcttagccctacttgtagctcaggactgaaaaatggattttgttctctgaatcatgattttataaagaaaatgggcttgggttgatgaaggcatcaaaacgttgatgaattcattatccaaacatagcctttgtcaggtaccaaagttttggaaaaatgtttaatggagactagacattgagcaggacagttcgcccatttgtgtcgatttaggaccgtaccgattgtaggcctgctgagctaggaacttttagctgtccccatacctcatcaagggtaagcctaaacccgactattccatatgtgaaaagacaatcgcgcactgggagtggagagatagcgagagtagtaggtaccctcatggcatattagctagatggtagggtaatgtgttctgaggtggcgcggaccagttcatgtagtggaggatccgtgggaattgttaacatatgcaagggttaagtgctacatatgtcatatggttggaatttcctagttaggtattaatcgatttggatcaccattacttctcagttatgaagactggatcactgctttgcattgtagtaacaagtataacaaagatttgattaaaagcaacctagtgtaggccaagttaatgatctagattaaggaaattacttaacttgtgaaataaaacctagcctaaggatttacttagtaagcttgcttttctgcaaaaagagtccttgaaaattgatgagcttcaccttgattcccaaaagctagtatgccttgagagtcttttccttagtcaggtaaatctttctgagtaattgcctactgagggttttattccctatgttgttggaggaaagagtcttgatatctttggcttttgttagtttcttcatgtggaggccttaaaggttagaatgcttatgtgttatctctttggaaaggctttaacttcccaagtgttgtaataagttatgcactttgagtactatcaggacttgtaataaatacaactcttcctatgctttaaaacttgagctttggaaatgaaaagtatattttgtaaaacttgagcttttggaaatgaaaagtacatgtttat

SEQ ID NO: 57681 - DNA, 3646 bp, Zea Mays
tctaaataaagtctaagattttatttgactaatcttgtattcactcgatccaaaacagggtaggccaaataaaatagtaaataaaacagtagctaataataataataataataatttaataacggaagtaaatgctgagggcgggcgaaccgggcgattggtttccttctcggactcttcgtcgtcttctccgatctccccttcctccctcgctctctcccgcccccgtggtccaaaccctaacaaacagcaatcaagcggaacccctgcaatcgtaatcggttcgctgcctaatcccctccctttctcatctcatgaccatgccggcctcgtccccctccgttggcagcgcctgtgacccaccgccgccgccgcctccgccgccgccgcgggctatgaagcgcgagctcgccttcgcgctccagtccctgtccgagatctctgcctcccacggccgcacgcgctccggccgccccatctcttcccttccagacccatcggcatcagcatctctcaagaggcgcaagagatctgacccgcccgcccctgcccccgcccccgcccctgcccccgcagccgatctcgtctccccgcccacgccgcctatcgacgccgagccgcctaaccagcccctccgtgacatcatccaaccgctacatggatctaatcctcccaccgcctctgaccaccgattcgattccaatgccgatcaagaggtcttggcaatggaagtgattgcaaagccgaatctgcccgcagaagaggatattgcagcagatgactcggcaatggaagtgactgcaaagtcgaatgtggctgcagcggatggtgtatcaaagccgaatgtttccgcagaggatactgcatcaaagtcaaatgtggccgctactgtagcagtagcaccaactctgttggaaactgccattgcagctggaaatgaccagtgtgatacctcaaactcaaatggagaaaatctacagcagcaagccgtggaaaatgtattagtctccaccactatgttagctgaggacactgtcacacctgcagctgctgccgggctcaagcctgcaaggcgcttcactcgatcgttgctcaagaataataaaccagataaagaagagtctgcatcttgtgaaagtcaggcaacaccagatggtagcaaggatgcctcagttggttttactttgctcctggagaagcctcagagaaggttcacaaggtcgttgctcaagacaaaggttgagagcagtttggttggatctgatgatgtgctggacagtgcatctgattcccctccatcagtgaagaagatggagatgaagatgtcaaagaaagttgcatgtctcacgaagcaccctggaaacattagagagctgctcaacacaggcatgcttgaggggatgccagttatgtacatcattcctcatagcaagaaggctgtcctaaaaggagtgattactggttgcaatatacgttgcttttgcctgtcctgtaatggcgccaaggccatttcagcttattactttgaacaacatgctggaagcaccaaaaaacaccctgctgattacatttacttagggaatggcaatagtttgcgtgacgtgctacgtgcatctgacagatctcccttggaggctctggaagaaacgattcgttcctccattgatccagtagttaaaaggagccgcattaattgtctgaattgcaatgagcttgttcttccgtcatcacatgaaaatgtactgtgtcaagtttgcctcgagtcaaagcaacctcaagatcctcttactgcatcgtatacatgtaatggcagttcgagtctgagtcgaagttccaaggaggctttgctaaggaacatatcatcaggcaagaagggtgggagtgccggcaaagtaacaaacaaggataacagactacacaaattggtctttaatgttctgcttgatggcacagaagtagcttactatgttgatgggcagagaaaggttgatgggtatatcaaggatcatagaatctactgtaatcactgcaacagagtggttagcccatcagcatttgaagctcatgcaggtatgataacatattcacatcaaacggagtatcattgcatgagctggcgatgaaaatatcaaaggatatggaactgtcagaacgcgagacagatgatctgtgcagagaatgtggtcaggggggagacattttcccgtgcaaaatctgtccaaggtcatttcatccagcttgcgttggactgtctaaagtccccgcagaatggtattgtgatagttgtcgcaatcttgtgcaaaaagaaaaggctttagcaaagaacaaaaatgctaaagctgctgggaggcaagctggagttgattccattgaacagataatgaagagagctatacgaattgtccccatctctgatgatcttggaggctgtgctctgtgcaaacagaaagatttcaacaatgctgtgtttgatgagcgcactgtgatactctgtgaccaatgtgagaaagagtatcatgtaggatgcttgcagagtcaatggcaagtagaactaaaggaattgcccgaggaggagtggttctgttgcagtagttgctctgagacacgatcatcattggacaagataatctccgatggagctcaactgttggcggacccagatcttgaaatcataaagaagaaacatgagacacgaggtttatgcatggacaccagtaaagatctcaaatggcaattactttctggtaaaagggctactgaagacggaagcatattgctctctgctgcagtgccaatttttcatcaatcttttgatccaatccgtgaagctctcactggtagagatctgattcctgagatggttaacgggaggggacctaaggagggaatgcccgggcaagattacagtggaatgtactgcgcactgttaactgtgggctctaccgtggtgtcagcagcacttttgcgtgtgatgggaggtgatgtggccgagctgccactagttgctacaagccaggatgttcaagggctgggctacttccaagccttgttctcgtgcatagagagggtgctagtctcactgaagatcaagcactttgtgcttccagctgcacatgaagctgaagggatctggatgaacaaatttggcttctctagaatctctcccgaagagctggaagcttatcttaatggggcgcacttgactatattccatggaacgtcatacatgtacaaggctgttccagtgtcataattgatgggatagaagagatatgggtgatttcgtctgtcttttggggggtgggggtccgctcgctattgtgatgtacagagagagttgataaggaagcaaagcatggcaaagacaatgtacaggagctggaagccaaggcgaagcatcggatgaatctaaatgaatgaattccccttggtttgtttactcttgaatcgaaggaagcctgtctttttttggtgtgatatactagactagatgcaatgcaattgaaggagtcgcaccgagtcctggtactagagccagattttttgcaatttaaattttgactctgaaactgctaccagagctgctgtgcattcttctctttctgcatacaatttaaaagttgcaaatgacaccgtcatgtgtgac

SEQ ID NO: 57682 - DNA, 3401 bp, Zea Mays
gggcgattggtttccttctcggactcttcgtcgtcttctccgatctccccttcctccctcgctctctcccgcccccgtggtccaaaccctaacaaacagcaatcaagcggaacccctgcaatcgtaatcggttcgctgcctaatcccctccctttctcatctcatgaccatgccggcctcgtccccctccgttggcagcgcctgtgacccaccgccgccgccgcctccgccgccgccgcgggctatgaagcgcgagctcgccttcgcgctccagtccctgtccgagatctctgcctcccacggccgcacgcgctccggccgccccatctcttcccttccagacccatcggcatcagcatctctcaagaggcgcaagagatctgacccgcccgcccctgcccccgcccccgcccctgcccccgcagccgatctcgtctccccgcccacgccgcctatcgacgccgagccgcctaaccagcccctccgtgacatcatccaaccgctacatggatctaatcctcccaccgcctctgaccaccgattcgattccaatgccgatcaagaggtcttggcaatggaagtgattgcaaagccgaatctgcccgcagaagaggatattgcagcagatgactcggcaatggaagtgactgcaaagtcgaatgtggctgcagcggatggtgtatcaaagccgaatgtttccgcagaggatactgcatcaaagtcaaatgtggccgctactgtagcagtagcaccaactctgttggaaactgccattgcagctggaaatgaccagtgtgatacctcaaactcaaatggagaaaatctacagcagcaagccgtggaaaatgtattagtctccaccactatgttagctgaggacactgtcacacctgcagctgctgccgggctcaagcctgcaaggcgcttcactcgatcgttgctcaagaataataaaccagataaagaagagtctgcatcttgtgaaagtcaggcaacaccagatggtagcaaggatgcctcagttggttttactttgctcctggagaagcctcagagaaggttcacaaggtcgttgctcaagacaaaggttgagagcagtttggttggatctgatgatgtgctggacagtgcatctgattcccctccatcagtgaagaagatggagatgaagatgtcaaagaaagttgcatgtctcacgaagcaccctggaaacattagagagctgctcaacacaggcatgcttgaggggatgccagttatgtacatcattcctcatagcaagaaggctgtcctaaaaggagtgattactggttgcaatatacgttgcttttgcctgtcctgtaatggcgccaagatctcccttggaggctctggaagaaacgattcgttcctccattgatccagtagttaaaaggagccgcattaattgtctgaattgcaatgagcttgttcttccgtcatcacatgaaaatgtactgtgtcaagtttgcctcgagtcaaagcaacctcaagatcctcttactgcatcgtatacatgtaatggcagttcgagtctgagtcgaagttccaaggaggctttgctaaggaacatatcatcaggcaagaagggtgggagtgccggcaaagtaacaaacaaggataacagactacacaaattggtctttaatgttctgcttgatggcacagaagtagcttactatgttgatgggcagagaaaggttgatgggtatatcaaggatcatagaatctactgtaatcactgcaacagagtggttagcccatcagcatttgaagctcatgcaggtgagggatcaaggcgcaaaccgtatgataacatattcacatcaaacggagtatcattgcatgagctggcgatgaaaatatcaaaggatatggaactgtcagaacgcgagacagatgatctgtgcagagaatgtggtcaggggggagacattttcccgtgcaaaatctgtccaaggtcatttcatccagcttgcgttggactgtctaaagtccccgcagaatggtattgtgatagttgtcgcaatcttgtgcaaaaagaaaaggctttagcaaagaacaaaaatgctaaagctgctgggaggcaagctggagttgattccattgaacagataatgaagagagctatacgaattgtccccatctctgatgatcttggaggctgtgctctgtgcaaacagaaagatttcaacaatgctgtgtttgatgagcgcactgtgatactctgtgaccaatgtgagaaagagtatcatgtaggatgcttgcagagtcaatggcaagtagaactaaaggaattgcccgaggaggagtggttctgttgcagtagttgctctgagacacgatcatcattggacaagataatctccgatggagctcaactgttggcggacccagatcttgaaatcataaagaagaaacatgagacacgaggtttatgcatggacaccagtaaagatctcaaatggcaattactttctggtaaaagggctactgaagacggaagcatattgctctctgctgcagtgccaatttttcatcaatcttttgatccaatccgtgaagctctcactggtagagatctgattcctgagatggttaacgggaggggacctaaggagggaatgcccgggcaagattacagtggaatgtactgcgcactgttaactgtgggctctaccgtggtgtcagcagcacttttgcgtgtgatgggaggtgatgtggccgagctgccactagttgctacaagccaggatgttcaagggctgggctacttccaagccttgttctcgtgcatagagagggtgctagtctcactgaagatcaagcactttgtgcttccagctgcacatgaagctgaagggatctggatgaacaaatttggcttctctagaatctctcccgaagagctggaagcttatcttaatggggcgcacttgactatattccatggaacgtcatacatgtacaaggctgttccagtgtcataattgatgggatagaagagatatgggtgatttcgtctgtcttttggggggtgggggtccgctcgctattgtgatgtacagagagagttgataaggaagcaaagcatggcaaagacaatgtacaggagctggaagccaaggcgaagcatcggatgaatctaaatgaatgaattccccttggtttgtttactcttgaatcgaaggaagcctgtctttttttggtgtgatatactagactagatgcaatgcaattgaaggagtcgcaccgagtcctggtactagagccagattttttgcaatttaaattttgactctgaaactgctaccagagctgctgtgcattcttctctttctgcatacaatttaaaagttgcaaatgacaccgtcatgtgtgac

SEQ ID NO: 57683 - DNA, 3459 bp, Zea Mays
gggcgattggtttccttctcggactcttcgtcgtcttctccgatctccccttcctccctcgctctctcccgcccccgtggtccaaaccctaacaaacagcaatcaagcggaacccctgcaatcgtaatcggttcgctgcctaatcccctccctttctcatctcatgaccatgccggcctcgtccccctccgttggcagcgcctgtgacccaccgccgccgccgcctccgccgccgccgcgggctatgaagcgcgagctcgccttcgcgctccagtccctgtccgagatctctgcctcccacggccgcacgcgctccggccgccccatctcttcccttccagacccatcggcatcagcatctctcaagaggcgcaagagatctgacccgcccgcccctgcccccgcccccgcccctgcccccgcagccgatctcgtctccccgcccacgccgcctatcgacgccgagccgcctaaccagcccctccgtgacatcatccaaccgctacatggatctaatcctcccaccgcctctgaccaccgattcgattccaatgccgatcaagaggtcttggcaatggaagtgattgcaaagccgaatctgcccgcagaagaggatattgcagcagatgactcggcaatggaagtgactgcaaagtcgaatgtggctgcagcggatggtgtatcaaagccgaatgtttccgcagaggatactgcatcaaagtcaaatgtggccgctactgtagcagtagcaccaactctgttggaaactgccattgcagctggaaatgaccagtgtgatacctcaaactcaaatggagaaaatctacagcagcaagccgtggaaaatgtattagtctccaccactatgttagctgaggacactgtcacacctgcagctgctgccgggctcaagcctgcaaggcgcttcactcgatcgttgctcaagaataataaaccagataaagaagagtctgcatcttgtgaaagtcaggcaacaccagatggtagcaaggatgcctcagttggttttactttgctcctggagaagcctcagagaaggttcacaaggtcgttgctcaagacaaaggttgagagcagtttggttggatctgatgatgtgctggacagtgcatctgattcccctccatcagtgaagaagatggagatgaagatgtcaaagaaagttgcatgtctcacgaagcaccctggaaacattagagagctgctcaacacaggcatgcttgaggggatgccagttatgtacatcattcctcatagcaagaaggctgtcctaaaaggagtgattactggttgcaatatacgttgcttttgcctgtcctgtaatggcgccaaggccatttcagcttattactttgaacaacatgctggaagcaccaaaaaacaccctgctgattacatttacttagggaatggcaatagtttgcgtgacgtgctacgtgcatctgacagatctcccttggaggctctggaagaaacgattcgttcctccattgatccagtagttaaaaggagccgcattaattgtctgaattgcaatgagcttgttcttccgtcatcacatgaaaatgtactgtgtcaagtttgcctcgagtcaaagcaacctcaagatcctcttactgcatcgtatacatgtaatggcagttcgagtctgagtcgaagttccaaggaggctttgctaaggaacatatcatcaggcaagaagggtgggagtgccggcaaagtaacaaacaaggataacagactacacaaattggtctttaatgttctgcttgatggcacagaagtagcttactatgttgatgggcagagaaaggttgatgggtatatcaaggatcatagaatctactgtaatcactgcaacagagtggttagcccatcagcatttgaagctcatgcaggtgagggatcaaggcgcaaaccgtatgataacatattcacatcaaacggagtatcattgcatgagctggcgatgaaaatatcaaaggatatggaactgtcagaacgcgagacagatgatctgtgcagagaatgtggtcaggggggagacattttcccgtgcaaaatctgtccaaggtcatttcatccagcttgcgttggactgtctaaagtccccgcagaatggtattgtgatagttgtcgcaatcttgtgcaaaaagaaaaggctttagcaaagaacaaaaatgctaaagctgctgggaggcaagctggagttgattccattgaacagataatgaagagagctatacgaattgtccccatctctgatgatcttggaggctgtgctctgtgcaatgtgagaaagagtatcatgtaggatgcttgcagagtcaatggcaagtagaactaaaggaattgcccgaggaggagtggttctgttgcagtagttgctctgagacacgatcatcattggacaagataatctccgatggagctcaactgttggcggacccagatcttgaaatcataaagaagaaacatgagacacgaggtttatgcatggacaccagtaaagatctcaaatggcaattactttctggtaaaagggctactgaagacggaagcatattgctctctgctgcagtgccaatttttcatcaatcttttgatccaatccgtgaagctctcactggtagagatctgattcctgagatggttaacgggaggggacctaaggagggaatgcccgggcaagattacagtggaatgtactgcgcactgttaactgtgggctctaccgtggtgtcagcagcacttttgcgtgtgatgggaggtgatgtggccgagctgccactagttgctacaagccaggatgttcaagggctgggctacttccaagccttgttctcgtgcatagagagggtgctagtctcactgaagatcaagcactttgtgcttccagctgcacatgaagctgaagggatctggatgaacaaatttggcttctctagaatctctcccgaagagctggaagcttatcttaatggggcgcacttgactatattccatggaacgtcatacatgtacaaggctgttccagtgtcataattgatgggatagaagagatatgggtgatttcgtctgtcttttggggggtgggggtccgctcgctattgtgatgtacagagagagttgataaggaagcaaagcatggcaaagacaatgtacaggagctggaagccaaggcgaagcatcggatgaatctaaatgaatgaattccccttggtttgtttactcttgaatcgaaggaagcctgtctttttttggtgtgatatactagactagatgcaatgcaattgaaggagtcgcaccgagtcctggtactagagccagattttttgcaatttaaattttgactctgaaactgctaccagagctgctgtgcattcttctctttctgcatacaatttaaaagttgcaaatgacaccgtcatgtgtgac

SEQ ID NO: 57684 - DNA, 3437 bp, Zea Mays
gggcgattggtttccttctcggactcttcgtcgtcttctccgatctccccttcctccctcgctctctcccgcccccgtggtccaaaccctaacaaacagcaatcaagcggaacccctgcaatcgtaatcggttcgctgcctaatcccctccctttctcatctcatgaccatgccggcctcgtccccctccgttggcagcgcctgtgacccaccgccgccgccgcctccgccgccgccgcgggctatgaagcgcgagctcgccttcgcgctccagtccctgtccgagatctctgcctcccacggccgcacgcgctccggccgccccatctcttcccttccagacccatcggcatcagcatctctcaagaggcgcaagagatctgacccgcccgcccctgcccccgcccccgcccctgcccccgcagccgatctcgtctccccgcccacgccgcctatcgacgccgagccgcctaaccagcccctccgtgacatcatccaaccgctacatggatctaatcctcccaccgcctctgaccaccgattcgattccaatgccgatcaagaggtcttggcaatggaagtgattgcaaagccgaatctgcccgcagaagaggatattgcagcagatgactcggcaatggaagtgactgcaaagtcgaatgtggctgcagcggatggtgtatcaaagccgaatgtttccgcagaggatactgcatcaaagtcaaatgtggccgctactgtagcagtagcaccaactctgttggaaactgccattgcagctggaaatgaccagtgtgatacctcaaactcaaatggagaaaatctacagcagcaagccgtggaaaatgtattagtctccaccactatgttagctgaggacactgtcacacctgcagctgctgccgggctcaagcctgcaaggcgcttcactcgatcgttgctcaagaataataaaccagataaagaagagtctgcatcttgtgaaagtcaggcaacaccagatggtagcaaggatgcctcagttggttttactttgctcctggagaagcctcagagaaggttcacaaggtcgttgctcaagacaaaggttgagagcagtttggttggatctgatgatgtgctggacagtgcatctgattcccctccatcagtgaagaagatggagatgaagatgtcaaagaaagttgcatgtctcacgaagcaccctggaaacattagagagctgctcaacacaggcatgcttgaggggatgccagttatgtacatcattcctcatagcaagaaggctgtcctaaaaggagtgattactggttgcaatatacgttgcttttgcctgtcctgtaatggcgccaaggccatttcagcttattactttgaacaacatgctggaagcaccaaaaaacaccctgctgattacatttacttagggaatggcaatagtttgcgtgacgtgctacgtgcatctgacagatctcccttggaggctctggaagaaacgattcgttcctccattgatccagtagttaaaaggagccgcattaattgtctgaattgcaatgagcttgttcttccgtcatcacatgaaaatgtactgtgtcaagtttgcctcgagtcaaagcaacctcaagatcctcttactgcatcgtatacatgtaatggcagttcgagtctgagtcgaagttccaaggaggctttgctaaggaacatatcatcaggcaagaagggtgggagtgccggcaaagtaacaaacaaggataacagactacacaaattggtctttaatgttctgcttgatggcacagaagtagcttactatgttgatgggcagagaaaggttgatgggtatatcaaggatcatagaatctactgtaatcactgcaacagagtggttagcccatcagcatttgaagctcatgcaggtatgataacatattcacatcaaacggagtatcattgcatgagctggcgatgaaaatatcaaaggatatggaactgtcagaacgcgagacagatgatctgtgcagagaatgtggtcaggggggagacattttcccgtgcaaaatctgtccaaggtcatttcatccagcttgcgttggactgtctaaagtccccgcagaatggtattgtgatagttgtcgcaatcttgtgcaaaaagaaaaggctttagcaaagaacaaaaatgctaaagctgctgggaggcaagctggagttgattccattgaacagataatgaagagagctatacgaattgtccccatctctgatgatcttggaggctgtgctctgtgcaatgtgagaaagagtatcatgtaggatgcttgcagagtcaatggcaagtagaactaaaggaattgcccgaggaggagtggttctgttgcagtagttgctctgagacacgatcatcattggacaagataatctccgatggagctcaactgttggcggacccagatcttgaaatcataaagaagaaacatgagacacgaggtttatgcatggacaccagtaaagatctcaaatggcaattactttctggtaaaagggctactgaagacggaagcatattgctctctgctgcagtgccaatttttcatcaatcttttgatccaatccgtgaagctctcactggtagagatctgattcctgagatggttaacgggaggggacctaaggagggaatgcccgggcaagattacagtggaatgtactgcgcactgttaactgtgggctctaccgtggtgtcagcagcacttttgcgtgtgatgggaggtgatgtggccgagctgccactagttgctacaagccaggatgttcaagggctgggctacttccaagccttgttctcgtgcatagagagggtgctagtctcactgaagatcaagcactttgtgcttccagctgcacatgaagctgaagggatctggatgaacaaatttggcttctctagaatctctcccgaagagctggaagcttatcttaatggggcgcacttgactatattccatggaacgtcatacatgtacaaggctgttccagtgtcataattgatgggatagaagagatatgggtgatttcgtctgtcttttggggggtgggggtccgctcgctattgtgatgtacagagagagttgataaggaagcaaagcatggcaaagacaatgtacaggagctggaagccaaggcgaagcatcggatgaatctaaatgaatgaattccccttggtttgtttactcttgaatcgaaggaagcctgtctttttttggtgtgatatactagactagatgcaatgcaattgaaggagtcgcaccgagtcctggtactagagccagattttttgcaatttaaattttgactctgaaactgctaccagagctgctgtgcattcttctctttctgcatacaatttaaaagttgcaaatgacaccgtcatgtgtgac

SEQ ID NO: 57685 - DNA, 3523 bp, Zea Mays
gggcgattggtttccttctcggactcttcgtcgtcttctccgatctccccttcctccctcgctctctcccgcccccgtggtccaaaccctaacaaacagcaatcaagcggaacccctgcaatcgtaatcggttcgctgcctaatcccctccctttctcatctcatgaccatgccggcctcgtccccctccgttggcagcgcctgtgacccaccgccgccgccgcctccgccgccgccgcgggctatgaagcgcgagctcgccttcgcgctccagtccctgtccgagatctctgcctcccacggccgcacgcgctccggccgccccatctcttcccttccagacccatcggcatcagcatctctcaagaggcgcaagagatctgacccgcccgcccctgcccccgcccccgcccctgcccccgcagccgatctcgtctccccgcccacgccgcctatcgacgccgagccgcctaaccagcccctccgtgacatcatccaaccgctacatggatctaatcctcccaccgcctctgaccaccgattcgattccaatgccgatcaagaggtcttggcaatggaagtgattgcaaagccgaatctgcccgcagaagaggatattgcagcagatgactcggcaatggaagtgactgcaaagtcgaatgtggctgcagcggatggtgtatcaaagccgaatgtttccgcagaggatactgcatcaaagtcaaatgtggccgctactgtagcagtagcaccaactctgttggaaactgccattgcagctggaaatgaccagtgtgatacctcaaactcaaatggagaaaatctacagcagcaagccgtggaaaatgtattagtctccaccactatgttagctgaggacactgtcacacctgcagctgctgccgggctcaagcctgcaaggcgcttcactcgatcgttgctcaagaataataaaccagataaagaagagtctgcatcttgtgaaagtcaggcaacaccagatggtagcaaggatgcctcagttggttttactttgctcctggagaagcctcagagaaggttcacaaggtcgttgctcaagacaaaggttgagagcagtttggttggatctgatgatgtgctggacagtgcatctgattcccctccatcagtgaagaagatggagatgaagatgtcaaagaaagttgcatgtctcacgaagcaccctggaaacattagagagctgctcaacacaggcatgcttgaggggatgccagttatgtacatcattcctcatagcaagttgcagaaggctgtcctaaaaggagtgattactggttgcaatatacgttgcttttgcctgtcctgtaatggcgccaaggccatttcagcttattactttgaacaacatgctggaagcaccaaaaaacaccctgctgattacatttacttagggaatggcaatagtttgcgtgacgtgctacgtgcatctgacagatctcccttggaggctctggaagaaacgattcgttcctccattgatccagtagttaaaaggagccgcattaattgtctgaattgcaatgagcttgttcttccgtcatcacatgaaaatgtactgtgtcaagtttgcctcgagtcaaagcaacctcaagatcctcttactgcatcgtatacatgtaatggcagttcgagtctgagtcgaagttccaaggaggctttgctaaggaacatatcatcaggcaagaagggtgggagtgccggcaaagtaacaaacaaggataacagactacacaaattggtctttaatgttctgcttgatggcacagaagtagcttactatgttgatgggcagagaaaggttgatgggtatatcaaggatcatagaatctactgtaatcactgcaacagagtggttagcccatcagcatttgaagctcatgcaggtgagggatcaaggcgcaaaccgtatgataacatattcacatcaaacggagtatcattgcatgagctggcgatgaaaatatcaaaggatatggaactgtcagaacgcgagacagatgatctgtgcagagaatgtggtcaggggggagacattttcccgtgcaaaatctgtccaaggtcatttcatccagcttgcgttggactgtctaaagtccccgcagaatggtattgtgatagttgtcgcaatcttgtgcaaaaagaaaaggctttagcaaagaacaaaaatgctaaagctgctgggaggcaagctggagttgattccattgaacagataatgaagagagctatacgaattgtccccatctctgatgatcttggaggctgtgctctgtgcaaacagaaagatttcaacaatgctgtgtttgatgagcgcactgtgatactctgtgaccaatgtgagaaagagtatcatgtaggatgcttgcagagtcaatggcaagtagaactaaaggaattgcccgaggaggagtggttctgttgcagtagttgctctgagacacgatcatcattggacaagataatctccgatggagctcaactgttggcggacccagatcttgaaatcataaagaagaaacatgagacacgaggtttatgcatggacaccagtaaagatctcaaatggcaattactttctggtaaaagggctactgaagacggaagcatattgctctctgctgcagtgccaatttttcatcaatcttttgatccaatccgtgaagctctcactggtagagatctgattcctgagatggttaacgggaggggacctaaggagggaatgcccgggcaagattacagtggaatgtactgcgcactgttaactgtgggctctaccgtggtgtcagcagcacttttgcgtgtgatgggaggtgatgtggccgagctgccactagttgctacaagccaggatgttcaagggctgggctacttccaagccttgttctcgtgcatagagagggtgctagtctcactgaagatcaagcactttgtgcttccagctgcacatgaagctgaagggatctggatgaacaaatttggcttctctagaatctctcccgaagagctggaagcttatcttaatggggcgcacttgactatattccatggaacgtcatacatgtacaaggctgttccagtgtcataattgatgggatagaagagatatgggtgatttcgtctgtcttttggggggtgggggtccgctcgctattgtgatgtacagagagagttgataaggaagcaaagcatggcaaagacaatgtacaggagctggaagccaaggcgaagcatcggatgaatctaaatgaatgaattccccttggtttgtttactcttgaatcgaaggaagcctgtctttttttggtgtgatatactagactagatgcaatgcaattgaaggagtcgcaccgagtcctggtactagagccagattttttgcaatttaaattttgactctgaaactgctaccagagctgctgtgcattcttctctttctgcatacaatttaaaagttgcaaatgacaccgtcatgtgtgac

SEQ ID NO: 57686 - DNA, 3513 bp, Zea Mays
gggcgattggtttccttctcggactcttcgtcgtcttctccgatctccccttcctccctcgctctctcccgcccccgtggtccaaaccctaacaaacagcaatcaagcggaacccctgcaatcgtaatcggttcgctgcctaatcccctccctttctcatctcatgaccatgccggcctcgtccccctccgttggcagcgcctgtgacccaccgccgccgccgcctccgccgccgccgcgggctatgaagcgcgagctcgccttcgcgctccagtccctgtccgagatctctgcctcccacggccgcacgcgctccggccgccccatctcttcccttccagacccatcggcatcagcatctctcaagaggcgcaagagatctgacccgcccgcccctgcccccgcccccgcccctgcccccgcagccgatctcgtctccccgcccacgccgcctatcgacgccgagccgcctaaccagcccctccgtgacatcatccaaccgctacatggatctaatcctcccaccgcctctgaccaccgattcgattccaatgccgatcaagaggtcttggcaatggaagtgattgcaaagccgaatctgcccgcagaagaggatattgcagcagatgactcggcaatggaagtgactgcaaagtcgaatgtggctgcagcggatggtgtatcaaagccgaatgtttccgcagaggatactgcatcaaagtcaaatgtggccgctactgtagcagtagcaccaactctgttggaaactgccattgcagctggaaatgaccagtgtgatacctcaaactcaaatggagaaaatctacagcagcaagccgtggaaaatgtattagtctccaccactatgttagctgaggacactgtcacacctgcagctgctgccgggctcaagcctgcaaggcgcttcactcgatcgttgctcaagaataataaaccagataaagaagagtctgcatcttgtgaaagtcaggcaacaccagatggtagcaaggatgcctcagttggttttactttgctcctggagaagcctcagagaaggttcacaaggtcgttgctcaagacaaaggttgagagcagtttggttggatctgatgatgtgctggacagtgcatctgattcccctccatcagtgaagaagatggagatgaagatgtcaaagaaagttgcatgtctcacgaagcaccctggaaacattagagagctgctcaacacaggcatgcttgaggggatgccagttatgtacatcattcctcatagcaagaaggctgtcctaaaaggagtgattactggttgcaatatacgttgcttttgcctgtcctgtaatggcgccaaggccatttcagcttattactttgaacaacatgctggaagcaccaaaaaacaccctgctgattacatttacttagggaatggcaatagtttgcgtgacgtgctacgtgcatctgacagatctcccttggaggctctggaagaaacgattcgttcctccattgatccagtagttaaaaggagccgcattaattgtctgaattgcaatgagcttgttcttccgtcatcacatgaaaatgtactgtgtcaagtttgcctcgagtcaaagcaacctcaagatcctcttactgcatcgtatacatgtaatggcagttcgagtctgagtcgaagttccaaggaggctttgctaaggaacatatcatcaggcaagaagggtgggagtgccggcaaagtaacaaacaaggataacagactacacaaattggtctttaatgttctgcttgatggcacagaagtagcttactatgttgatgggcagagaaaggttgatgggtatatcaaggatcatagaatctactgtaatcactgcaacagagtggttagcccatcagcatttgaagctcatgcaggtgagggatcaaggcgcaaaccgtatgataacatattcacatcaaacggagtatcattgcatgagctggcgatgaaaatatcaaaggatatggaactgtcagaacgcgagacagatgatctgtgcagagaatgtggtcaggggggagacattttcccgtgcaaaatctgtccaaggtcatttcatccagcttgcgttggactgtctaaagtccccgcagaatggtattgtgatagttgtcgcaatcttgtgcaaaaagaaaaggctttagcaaagaacaaaaatgctaaagctgctgggaggcaagctggagttgattccattgaacagataatgaagagagctatacgaattgtccccatctctgatgatcttggaggctgtgctctgtgcaaaaagatttcaacaatgctgtgtttgatgagcgcactgtgatactctgtgaccaatgtgagaaagagtatcatgtaggatgcttgcagagtcaatggcaagtagaactaaaggaattgcccgaggaggagtggttctgttgcagtagttgctctgagacacgatcatcattggacaagataatctccgatggagctcaactgttggcggacccagatcttgaaatcataaagaagaaacatgagacacgaggtttatgcatggacaccagtaaagatctcaaatggcaattactttctggtaaaagggctactgaagacggaagcatattgctctctgctgcagtgccaatttttcatcaatcttttgatccaatccgtgaagctctcactggtagagatctgattcctgagatggttaacgggaggggacctaaggagggaatgcccgggcaagattacagtggaatgtactgcgcactgttaactgtgggctctaccgtggtgtcagcagcacttttgcgtgtgatgggaggtgatgtggccgagctgccactagttgctacaagccaggatgttcaagggctgggctacttccaagccttgttctcgtgcatagagagggtgctagtctcactgaagatcaagcactttgtgcttccagctgcacatgaagctgaagggatctggatgaacaaatttggcttctctagaatctctcccgaagagctggaagcttatcttaatggggcgcacttgactatattccatggaacgtcatacatgtacaaggctgttccagtgtcataattgatgggatagaagagatatgggtgatttcgtctgtcttttggggggtgggggtccgctcgctattgtgatgtacagagagagttgataaggaagcaaagcatggcaaagacaatgtacaggagctggaagccaaggcgaagcatcggatgaatctaaatgaatgaattccccttggtttgtttactcttgaatcgaaggaagcctgtctttttttggtgtgatatactagactagatgcaatgcaattgaaggagtcgcaccgagtcctggtactagagccagattttttgcaatttaaattttgactctgaaactgctaccagagctgctgtgcattcttctctttctgcatacaatttaaaagttgcaaatgacaccgtcatgtgtgac

SEQ ID NO: 57687 - DNA, 1854 bp, Zea Mays
actctaaccgtttggacccagccagctcatgagctcacatgcctaggcgtgaggcgtatcgtcttcgacccttcgccttcctcgtccctttctctctcccagattctgactccgtcgggctcccccgtgtctgtgtcttgttgaccttttgaagccagatacaacagtgatcttccgcaatgccaagattgatatgttcaagggcaccatgagactggcggtggacaagtggggccggattgaggtgactgattcttctgttttcaaggtgaatgaagacaacaacatgtcactggtggagtacgagctggtggatgtggatgaagaggagtgagctgaagcgatattgcattgccatctgttgggccaagtcgtgctgcggatatgtatttccagctaaaggagggcggtagcgtttaggcttctatctagttatttattattattattatcctggaaggctggcgattgggacggttagttttaagaccatcctaaagaagcacgtcaaattatgtacatcagcattaggtgttctgtctgactgatgctttctgttccgcgacgccgaagtctatcctaatgctactacttttttccctctcacgttgggttgggtgtgtgtgtgtgttgttaatcctttttgacctgtagttttggtagattaaaatctagattctcttagaaaccttaaaaaatcttataaataaaaacatatttcagagtattttgattatttcaaactagaccgaatcactcactggaaactaacgtggaagtgtttctagtgaatggaggtttatagtaattctggaagttcgaaggtgtttctgtttgaaagttggaagtgttagtgatttggaggcgtattccaaaggtgtttctagtgaataggctgttcgcttcagcttaagactgatacagctgtaattcaaaaaggcaaaacattatagaagtcagtacatattaaagccaagcgaatagcctgtaagtttacttgtgttataataattcttgctatatggttatggtcgactctcttttttcccttttgtttgcagatttgcgatccttagactgacggtggttgttcaggaaatcggcataaattttacactgcatctacttgactgacctatggcgtgttcccctgggaccaggaagaagccaagccgttcccttctaccggttgtacgtgctgtcgtcatatccggagccgcctgatgcaaagctcacacccctcctgagctgggccagcctcagatttgggtcaaagaaacctggaataatcctggatatgcctagtttctcagctgcatgacaccaaagctctcatcggcctgcgaccgtagaagttcaagccgtagggcaagaaatttgccctggctgtggtgggcagatggttgttgtttccagggtccacggttgagtctccaagtacaaggagtgtagtacagcccgtagtgcggttgatcgtcattccaggtggtgccggtgcaggaggttcctgtggtggcacgaccaaccttggcggtgctggatcctgctgatccgtcggtgctggtggccgtcgatgtggtgatccccgacgtcgtggaggtggaggtggtgatgttggcccaggcgcctgcggtggcgtttgctcatctgctgttggtgcttcgggggactgtggtgcagcctccggtgcatctgctgctgatgctgctcttgcgcagtgcaactccccggcaagcaatgccactatgatgagtagcagctggaaacccctcatggcttgtgttgtatgagcaggagaaatccgcggcaagcaaagagctagggatcgatgcatgtatggctatgcagcactgt

SEQ ID NO: 57688 - DNA, 1624 bp, Zea Mays
aaaaaaataaaggaaggcaagtgtaggcgggtcacgggtgggcgtggacacgttgactttttcaactgtctgcccctgatgtccgttggctcccgacggaggccgccgccgccgcatcaccaccgtcgcgccatgacacctgcctcctccgtctccgtccccgcgccggttcccgcgccccctaagcctctctacctccggggcccggtcatcgcaggcgccgtcgcgctggccgcgtttctcctcctcgccgccgcctacgccaccaggcgagcagggtccccgccggccgccctcctctcccacccagctgtttccaccaggttcttctccttcgacctggtgcgcgagtaccctcacgacccggccgccttcacccagggtatcttgtacgcgggaaatgacacgcttttcgagtccactggcctctacggcaggtcttcagttcgaaaggttgagcttcagaccggaaaagttttggttaaccaccaaatggacggagatgtgtttggagaaggtttaactcttcttggtgacagattgtttcaggttacctggttgaagaacgacgggtttatatatgaccggcataacttctccaaatgcacgagttttacccataaaatgcgagatggttggggtctggcgactgatggaaaagttctttttggcagtgatggcacctcaatgctgtataagctggattcaaagtcacttgaagtcatgaaagtggtgactgtcaagtatcacggtaatcaagtcccctatcttaatgagctggaatatatagatggtgaagtctgggcaaatgtctggcagattgcatagctagagtgtcccctgaagatggcctagtggtgggttggatctttcttcatgagctgaggcggcagttgtggaactcaggcaacacgaatattgacgtcttaaacgggatagcttgggatgaaagaaggcacagattatttgtgacagggaaactgtggccaaagctatatgagatcaagctacgggcagtagatggtccagcagatggatctgtagaaaagctttgtccaaaagccagcttctatcgctgaagagtgtagaaccgcatatacactgggtgtgctaacatgggccttcatttgtttaaacgcacgatgcgaaggatgtggagatgtgagtacgtacatgtttgatctggtaccactgtcatatatatatacacccatgagttagtagatgtagctgtacattgttgtgacctgtatgaattttgatgatggctgtgttgtttgtgttaagagtgaattgcaacagattttgatgcattcaatgcaacttaatagcttgaagaaactggtgctgttgggcatgtattcatccctgggaagggaaagaaagtcgccaacttatttgggtagatctcagtcactttttggaaagaagaatgtctgggccaactctctctcgagaaacagattttgatgcatcaacatgggggatgatgaatacttctatactgcgttgcgagtacttcggaatgacctgtattaactcaactccgcttcaatcatagaccgtataagaaagccaaaaaaagggatgatgaatataaaccgcgtctgctgtgattactgaa

SEQ ID NO: 57689 - DNA, 819 bp, Zea Mays
gtgggcgtggacacgttgactttttcaactgtctgcccctgatgtccgttggctcccgacggaggccgccgccgccgcatcaccaccgtcgcgccatgacacctgcctcctccgtctccgtccccgcgccggttcccgcgccccctaagcctctctacctccggggcccggtcatcgcaggcgccgtcgcgctggccgcgtttctcctcctcgccgccgcctacgccaccaggcgagcagggtccccgccggccgccctcctctcccacccagctgtttccaccaggttcttctccttcgacctggtgcgcgagtaccctcacgacccggccgccttcacccagggtatcttgtacgcgggaaatgacacgcttttcgagtccactggcctctacggcaggtcttcagttcgaaaggttgagcttcagaccggaaaagttttggttaaccaccaaatggacggagatgtgtttggagaaggtttaactcttcttggtgacagattgtttcaggttacctggttgaagaacgacgggtttatatatgaccggcataacttctccaaatgcacgagttttacccataaaatgcgagatggttggggtctggcgactgatggaaaagttctttttggcagtgatggcacctcaatgctgtataagctggattcaaagtcacttgaagtcatgaaagtggtgactgtcaagtatcacggtaatcaagtcccctatcttaatgagctggaatatatagatggtgaagtctgggcaaatgtctggcagctccaccggacgctgaagacgcggctgcagcttctct

SEQ ID NO: 57690 - DNA, 1581 bp, Zea Mays
gtgggcgtggacacgttgactttttcaactgtctgcccctgatgtccgttggctcccgacggaggccgccgccgccgcatcaccaccgtcgcgccatgacacctgcctcctccgtctccgtccccgcgccggttcccgcgccccctaagcctctctacctccggggcccggtcatcgcaggcgccgtcgcgctggccgcgtttctcctcctcgccgccgcctacgccaccaggcgagcagggtccccgccggccgccctcctctcccacccagctgtttccaccaggttcttctccttcgacctggtgcgcgagtaccctcacgacccggccgccttcacccagggtatcttgtacgcgggaaatgacacgcttttcgagtccactggcctctacggcaggtcttcagttcgaaaggttgagcttcagaccggaaaagttttggttaaccaccaaatggacggagatgtgtttggagaaggtttaactcttcttggtgacaggttacctggttgaagaacgacgggtttatatatgaccggcataacttctccaaatgcacgagttttacccataaaatgcgagatggttggggtctggcgactgatggaaaagttctttttggcagtgatggcacctcaatgctgtataagctggattcaaagtcacttgaagtcatgaaagtggtgactgtcaagtatcacggtaatcaagtcccctatcttaatgagctggaatatatagatggtgaagtctgggcaaatgtctggcagacagattgcatagctagagtgtcccctgaagatggcctagtggtgggttggatctttcttcatgagctgaggcggcagttgtggaactcaggcaacacgaatattgacgtcttaaacgggatagcttgggatgaaagaaggcacagattatttgtgacagggaaactgtggccaaagctatatgagatcaagctacgggcagtagatggtccagcagatggatctgtagaaaagctttgtccaaaagccagcttctatcgctgaagagtgtagaaccgcatatacactgggtgtgctaacatgggccttcatttgtttaaacgcacgatgcgaaggatgtggagatgtgagtacgtacatgtttgatctggtaccactgtcatatatatatacacccatgagttagtagatgtagctgtacattgttgtgacctgtatgaattttgatgatggctgtgttgtttgtgttaagagtgaattgcaacagattttgatgcattcaatgcaacttaatagcttgaagaaactggtgctgttgggcatgtattcatccctgggaagggaaagaaagtcgccaacttatttgggtagatctcagtcactttttggaaagaagaatgtctgggccaactctctctcgagaaacagattttgatgcatcaacatgggggatgatgaatacttctatactgcgttgcgagtacttcggaatgacctgtattaactcaactccgcttcaatcatagaccgtataagaaagccaaaaaaagggatgatgaatataaaccgcgtctgctgtgattactgaa

SEQ ID NO: 57691 - DNA, 1288 bp, Zea Mays
cctgatgcgagatctgatctcaaccacatcacaaataaggaggggggaattcgcttcctgtgggtatcttgtacgcgggaaatgacacgcttttcgagtccactggcctctacggcaggtcttcagttcgaaaggttttggttaaccaccaaatggacggagatgtgtttggagaaggtttaactcttcttggtgacagattgtttcaggttacctggttgaagaacgacgggtttatatatgaccggcataacttctccaaatgcacgagttttacccataaaatgcgagatggttggggtctggcgactgatggaaaagttctttttggcagtgatggcacctcaatgctgtataagctggattcaaagtcacttgaagtcatgaaagtggtgactgtcaagtatcacggtaatcaagtcccctatcttaatgagctggaatatatagatggtgaagtctgggcaaatgtctggcagacagattgcatagctagagtgtcccctgaagatggcctagtggtgggttggatctttcttcatgagctgaggcggcagttgtggaactcaggcaacacgaatattgacgtcttaaacgggatagcttgggatgaaagaaggcacagattatttgtgacagggaaactgtggccaaagctatatgagatcaagctacgggcagtagatggtccagcagatggatctgtagaaaagctttgtccaaaagccagcttctatcgctgaagagtgtagaaccgcatatacactgggtgtgctaacatgggccttcatttgtttaaacgcacgatgcgaaggatgtggagatgtgagtacgtacatgtttgatctggtaccactgtcatatatatatacacccatgagttagtagatgtagctgtacattgttgtgacctgtatgaattttgatgatggctgtgttgtttgtgttaagagtgaattgcaacagattttgatgcattcaatgcaacttaatagcttgaagaaactggtgctgttgggcatgtattcatccctgggaagggaaagaaagtcgccaacttatttgggtagatctcagtcactttttggaaagaagaatgtctgggccaactctctctcgagaaacagattttgatgcatcaacatgggggatgatgaatacttctatactgcgttgcgagtacttcggaatgacctgtattaactcaactccgcttcaatcatagaccgtataagaaagccaaaaaaagggatgatgaatataaaccgcgtctgctgtgattactgaa

SEQ ID NO: 57692 - DNA, 2520 bp, Zea Mays
ctccacttttatttatttatcgcgttttagtttaaaattaaattagttggctcaaatatttaagaaaggaggtagtatagtgtaatgtgatgaaactcaagaacgaaagatgtcacatctctcagcttagaattcttgaataaaaaagttatcatgtcacatttgctgcgtacagctgtagtacgtacgtgaagaacatgtgaattgagataggaaaatatctcgtcaacgtcgttatgcttgttcgcttggcttctattatattactccaaaacgaactacttgttcatgcagctggtaccggcaataataggtggcttgccatctgccaaccactcgctgctgctggacctggagatggagtcctccgactccgactccaacgcagcagcatcagcagcagtagaggaggaggcggcggcggcggcccagcagagcatcttcttggatccaacacaagcctctgaccatgctactgggctgggtgctgaaaaccaagttgagaaacaggacaatgtcagcgctcaacaaactaaccacagttcgagtaatggcaacttggaaaatggttcacactctaatggtgtgcatgagatctccagcagcagtgaaaccgtgacgaccattgcggacggactcaaactgatcacaaccatccgcgagggcaggcagcacatcttgccaagttggagtggctctcttgaccacgtttctggtggcagcacgagcacatctcaggttcatgaaattgaagttgagaaggaagtcagtaagggcgacgtcaaagttgaagagtatgatcttgagaagattctggacgagcaagaaacccatgacctctattgccccaactgcaaatcgtgcataactcgaagggtcatccttaaaaagagaaagagaacagtaaggcaagaaacaggcaaggaaccaccaaaaagaccacagcttgtagagcctcccgccaatgctccaagccaaacaatcaatcaagactcgccggaagtatttagatgcttgtcgtgcttcactttcttcatcccaacaggttgcgggtttaatatattccgcatatttgaaaggagggatgtagaccaacaagttcaatctcagcattcttctgcgtctgttgaaaattgtggaagttggcttctttcttgtttccggacaatagatagtccaaagccattacataatgcagattcattggaggaacctctagtaagtgattcgcagaggactgacaatataacttcagttgaagagaacacaccattgcatagtgataacacaataggtaaagcagaacaatcaaacaaaccatcaccaactggatcccaaaccacagctgcgacgtatgaagtaaaggagtccttcagtcaattccatgcatcatctaaagacgtgacaggatccacgcaaaaagaggcaggacatgtggtaactgtgcagcgaaacggagcacgccaagagcaaattcctctctcacggcctgctgttgatactaaaactgataccagtcatctaggccacaaagaagaattcacgcaaacagaagcaggacatgtggtaactgtgcagcgaaatggagcacgccaagagcaaattcctctctcgcagccttctggtgatactgcgaatgattcaatgcaccttggccacaaacaagatattctggaagatataatggcgccctctgataacagcacatttttcagcccatcgtttgttaaaccagtacttacaatcccaataaaagttttgcctggggaggacaaccagacggttgagaaaccaacttcagttattcgtcagccagctgagccagaagctccacctcatagagtattggcagtccctgaggccgaggcactagttcctgcaccatcagctgagagggatgaatgggatatcctgaaagccgtagtgtatggtggccttgttgaatcaatcacgagcctctcagttgtatcagcagctgcagcaagtggtgccaagactttggatatattcatcctgggcatagcaaaccttattggtggtcttcctgtactttaccacaatattgctgatctacgaaacacaggagatatagctgaaagcagtgagcaagtggggcattactggctagagctgggaaggcgatccaagtaccagttgcacatggtgatagccatactgtcatacatcctcttcgggctgctgccaccagtcatctacggactgtcattcaggacgagcgacaacagagagaacaaagtgctggtggtcgctgctgcatctctcctgtgcattgcgctgctcgcaatcgggaaggcacatgttaagaggcataggacatacctcacaaccctcctctactacctgtccattggattcagcagctccggactgtcgtacgtcgcaggcgtcctcctcgcgaaggtcctagcacacttcggtatcattgatcagggtggtgcatcagctcctgctcctccaggtctctcattccctgaagcagccgcctgggcttcctactga

SEQ ID NO: 57693 - DNA, 2539 bp, Zea Mays
gctgagctcttcctcctgcccctgcccctgcccctcccccctcctagtgctatgtataaaggaagcaaagcaatccatggagacccaaccatcaatcccatttccctcccatctaggcagtcagcaggcagtaggcagtaggctgcatctcaatctccatctacacgactgcactcctgctcctactcctacaggaaacacacaagaaaagaaaagaaaagatgatggaggtggagaggccgatgtgggagctcaaggaggaggaggaggagccgccgcagctgctcatggaggccgaggaggatgactatgaggaggaggaagacacctccgccctcctatacactagggagagagagagcatgaggaagaagatgacgacaacgatggcggacctggacctggagatggagtcctccgactccgactccaacgcagcagcatcagcagcagtagaggaggaggcggcggcggcggcccagcagagcatcttcttggatccaacacaagcctctgaccatgctactgggctgggtgctgaaaaccaagttgagaaacaggacaatgtcagcgctcaacaaactaaccacagttcgagtaatggcaacttggaaaatggttcacactctaatggtgtgcatgagatctccagcagcagtgaaaccgtgacgaccattgcggacggactcaaactgatcacaaccatccgcgagggcaggcagcacatcttgccaagttggagtggctctcttgaccacgtttctggtggcagcacgagcacatctcaggttcatgaaattgaagttgagaaggaagtcagtaagggcgacgtcaaagttgaagagtatgatcttgagaagattctggacgagcaagaaacccatgacctctattgccccaactgcaaatcgtgcataactcgaagggtcatccttaaaaagagaaagagaacagtaaggcaagaaacaggcaaggaaccaccaaaaagaccacagcttgtagagcctcccgccaatgctccaagccaaacaatcaatcaagactcgccggaagtatttagatgcttgtcgtgcttcactttcttcatcccaacaggttgcgggtttaatatattccgcatatttgaaaggagggatgtagaccaacaagttcaatctcagcattcttctgcgtctgttgaaaattgtggaagttggcttctttcttgtttccggacaatagatagtccaaagccattacataatgcagattcattggaggaacctctagtaagtgattcgcagaggactgacaatataacttcagttgaagagaacacaccattgcatagtgataacacaataggtaaagcagaacaatcaaacaaaccatcaccaactggatcccaaaccacagctgcgacgtatgaagtaaaggagtccttcagtcaattccatgcatcatctaaagacgtgacaggatccacgcaaaaagaggcaggacatgtggtaactgtgcagcgaaacggagcacgccaagagcaaattcctctctcacggcctgctgttgatactaaaactgataccagtcatctaggccacaaagaagaattcacgcaaacagaagcaggacatgtggtaactgtgcagcgaaatggagcacgccaagagcaaattcctctctcgcagccttctggtgatactgcgaatgattcaatgcaccttggccacaaacaagatattctggaagatataatggcgccctctgataacagcacatttttcagcccatcgtttgttaaaccagggaggacaaccagacggttgagaaaccaacttcagttattcgtcagccagctgagccagaagctccacctcatagagtattggcagtccctgaggccgaggcactagttcctgcaccatcagctgagagggatgaatgggatatcctgaaagccgtagtgtatggtggccttgttgaatcaatcacgagcctctcagttgtatcagcagctgcagcaagtggtgccaagactttggatatattcatcctgggcatagcaaaccttattggtggtcttcctgtactttaccacaatattgctgatctacgaaacacaggagatatagctgaaagcagtgagcaagtggggcattactggctagagctgggaaggcgatccaagtaccagttgcacatggtgatagccatactgtcatacatcctcttcgggctgctgccaccagtcatctacggactgtcattcaggacgagcgacaacagagagaacaaagtgctggtggtcgctgctgcatctctcctgtgcattgcgctgctcgcaatcgggaaggcacatgttaagaggcataggacatacctcacaaccctcctctactacctgtccattggattcagcagctccggactgtcgtacgtcgcaggcgtcctcctcgcgaaggtcctagcacacttcggtatcattgatcagggtggtgcatcagctcctgctcctccaggtctctcattccctgaagcagccgcctgggcttcctactga

SEQ ID NO: 57694 - DNA, 2729 bp, Zea Mays
gctgagctcttcctcctgcccctgcccctgcccctcccccctcctagtgctatgtataaaggaagcaaagcaatccatggagacccaaccatcaatcccatttccctcccatctaggcagtcagcaggcagtaggcagtaggctgcatctcaatctccatctacacgactgcactcctgctcctactcctacaggaaacacacaagaaaagaaaagaaaagatgatggaggtggagaggccgatgtgggagctcaaggaggaggaggaggagccgccgcagctgctcatggaggccgaggaggatgactatgaggaggaggaagacacctccgccctcctatacactagggagagagagagcatgaggaagaagatgacgacaacgatggcggacctggacctggagatggagtcctccgactccgactccaacgcagcagcatcagcagcagtagaggaggaggcggcggcggcggcccagcagagcatcttcttggatccaacacaaggtctatggaagtgccggcactgcgattggacgcaccaacgcttgagtggtccatgcacagctgaaataatcctccacagtcagcagggacactgcaaaattgccagcaacgtcgattcgttagttcagcaccaaccattatatagttcaccacacaaagcctctgaccatgctactgggctgggtgctgaaaaccaagttgagaaacaggacaatgtcagcgctcaacaaactaaccacagttcgagtaatggcaacttggaaaatggttcacactctaatggtgtgcatgagatctccagcagcagtgaaaccgtgacgaccattgcggacggactcaaactgatcacaaccatccgcgagggcaggcagcacatcttgccaagttggagtggctctcttgaccacgtttctggtggcagcacgagcacatctcaggttcatgaaattgaagttgagaaggaagtcagtaagggcgacgtcaaagttgaagagtatgatcttgagaagattctggacgagcaagaaacccatgacctctattgccccaactgcaaatcgtgcataactcgaagggtcatccttaaaaagagaaagagaacagtaaggcaagaaacaggcaaggaaccaccaaaaagaccacagcttgtagagcctcccgccaatgctccaagccaaacaatcaatcaagactcgccggaagtatttagatgcttgtcgtgcttcactttcttcatcccaacaggttgcgggtttaatatattccgcatatttgaaaggagggatgtagaccaacaagttcaatctcagcattcttctgcgtctgttgaaaattgtggaagttggcttctttcttgtttccggacaatagatagtccaaagccattacataatgcagattcattggaggaacctctagtaagtgattcgcagaggactgacaatataacttcagttgaagagaacacaccattgcatagtgataacacaataggtaaagcagaacaatcaaacaaaccatcaccaactggatcccaaaccacagctgcgacgtatgaagtaaaggagtccttcagtcaattccatgcatcatctaaagacgtgacaggatccacgcaaaaagaggcaggacatgtggtaactgtgcagcgaaacggagcacgccaagagcaaattcctctctcacggcctgctgttgatactaaaactgataccagtcatctaggccacaaagaagaattcacgcaaacagaagcaggacatgtggtaactgtgcagcgaaatggagcacgccaagagcaaattcctctctcgcagccttctggtgatactgcgaatgattcaatgcaccttggccacaaacaagatattctggaagatataatggcgccctctgataacagcacatttttcagcccatcgtttgttaaaccagtacttacaatcccaataaaagttttgcctggggaggacaaccagacggttgagaaaccaacttcagttattcgtcagccagctgagccagaagctccacctcatagagtattggcagtccctgaggccgaggcactagttcctgcaccatcagctgagagggatgaatgggatatcctgaaagccgtagtgtatggtggccttgttgaatcaatcacgagcctctcagttgtatcagcagctgcagcaagtggtgccaagactttggatatattcatcctgggcatagcaaaccttattggtggtcttcctgtactttaccacaatattgctgatctacgaaacacaggagatatagctgaaagcagtgagcaagtggggcattactggctagagctgggaaggcgatccaagtaccagttgcacatggtgatagccatactgtcatacatcctcttcgggctgctgccaccagtcatctacggactgtcattcaggacgagcgacaacagagagaacaaagtgctggtggtcgctgctgcatctctcctgtgcattgcgctgctcgcaatcgggaaggcacatgttaagaggcataggacatacctcacaaccctcctctactacctgtccattggattcagcagctccggactgtcgtacgtcgcaggcgtcctcctcgcgaaggtcctagcacacttcggtatcattgatcagggtggtgcatcagctcctgctcctccaggtctctcattccctgaagcagccgcctgggcttcctactga

SEQ ID NO: 57695 - DNA, 2239 bp, Zea Mays
gctgagctcttcctcctgcccctgcccctgcccctcccccctcctagtgctatgtataaaggaagcaaagcaatccatggagacccaaccatcaatcccatttccctcccatctaggcagtcagcaggcagtaggcagtaggctgcatctcaatctccatctacacgactgcactcctgctcctactcctacaggaaacacacaagaaaagaaaagaaaagatgatggaggtctatggaagtgccggcactgcgattggacgcaccaacgcttgagtggtccatgcacagctgaaataatcctccacagtcagcagggacactgcaaaattgccagcaacgtcgattcgttagttcagcaccaaccattatatagttcaccacacaaagcctctgaccatgctactgggctgggtgctgaaaaccaagttgagaaacaggacaatgtcagcgctcaacaaactaaccacagttcgagtaatggcaacttggaaaatggttcacactctaatggtgtgcatgagatctccagcagcagtgaaaccgtgacgaccattgcggacggactcaaactgatcacaaccatccgcgagggcaggcagcacatcttgccaagttggagtggctctcttgaccacgtttctggtggcagcacgagcacatctcaggttcatgaaattgaagttgagaaggaagtcagtaagggcgacgtcaaagttgaagagtatgatcttgagaagattctggacgagcaagaaacccatgacctctattgccccaactgcaaatcgtgcataactcgaagggtcatccttaaaaagagaaagagaacagtaaggcaagaaacaggcaaggaaccaccaaaaagaccacagcttgtagagcctcccgccaatgctccaagccaaacaatcaatcaagactcgccggaagtatttagatgcttgtcgtgcttcactttcttcatcccaacaggttgcgggtttaatatattccgcatatttgaaaggagggatgtagaccaacaagttcaatctcagcattcttctgcgtctgttgaaaattgtggaagttggcttctttcttgtttccggacaatagatagtccaaagccattacataatgcaggatccacgcaaaaagaggcaggacatgtggtaactgtgcagcgaaacggagcacgccaagagcaaattcctctctcacggcctgctgttgatactaaaactgataccagtcatctaggccacaaagaagaattcacgcaaacagaagcaggacatgtggtaactgtgcagcgaaatggagcacgccaagagcaaattcctctctcgcagccttctggtgatactgcgaatgattcaatgcaccttggccacaaacaagatattctggaagatataatggcgccctctgataacagcacatttttcagcccatcgtttgttaaaccagtacttacaatcccaataaaagttttgcctggggaggacaaccagacggttgagaaaccaacttcagttattcgtcagccagctgagccagaagctccacctcatagagtattggcagtccctgaggccgaggcactagttcctgcaccatcagctgagagggatgaatgggatatcctgaaagccgtagtgtatggtggccttgttgaatcaatcacgagcctctcagttgtatcagcagctgcagcaagtggtgccaagactttggatatattcatcctgggcatagcaaaccttattggtggtcttcctgtactttaccacaatattgctgatctacgaaacacaggagatatagctgaaagcagtgagcaagtggggcattactggctagagctgggaaggcgatccaagtaccagttgcacatggtgatagccatactgtcatacatcctcttcgggctgctgccaccagtcatctacggactgtcattcaggacgagcgacaacagagagaacaaagtgctggtggtcgctgctgcatctctcctgtgcattgcgctgctcgcaatcgggaaggcacatgttaagaggcataggacatacctcacaaccctcctctactacctgtccattggattcagcagctccggactgtcgtacgtcgcaggcgtcctcctcgcgaaggtcctagcacacttcggtatcattgatcagggtggtgcatcagctcctgctcctccaggtctctcattccctgaagcagccgcctgggcttcctactga

SEQ ID NO: 57696 - DNA, 1506 bp, Zea Mays
taacactcgcgacgaccgatacctccccggcaccccgcccgtcctcccggcgaccgacgcctcccgaccatcctcccaacgactagcgtcaggcaccccagcctcgggcgccgcgaagctattagccccgtggacgcggcggcggcggcggctccggctgccacaccaacacagacaggcaatggctaggcaaggcgcaagaagaggaggggaagtcgaaaataatttagcagcggaagcggaagcagcagcacgagggaccttccttcctgatacaggaaggcagggttcatgagtggcggcacgcctgcagcaagcagtagcctgcggacatcactctcatactacgtgaggcaagtccgcgcctatgactaccaccactacctctgccttctccacctggccccggccgtgcgcaaggccgcgttcaccttccgcaccttcaacatcgagacagcaagggccatggatgtggtgttcgacccccgagccggcctcatgcgcctcctctggtggaaggagggggtcgacaagatctttggcaacaagctagtcgagcacccagttgcccaggcgctctcttcgatcatcgcagaccacaaggttagcaagcactggctgaagcggtccgtggaggcgaggatcaacgacgccaaccgtgaggaaggcaccattcctaggacgagcgcgaagttggagagctagtgtggccgaggaatgcggcctgctcatcacacgggagggcggcaggtcggaggtcagggcaggcgagaggctgctagacgtagttttcaaggtcgcatctgttgcggaggctcacctgcataaggcgcgagagttggcaccgtccgtgcccaaagaggcgatccctatgctcctcccagccttgccggcccaggtcctcctggataccctgcgaaggtgagttcaacgtgtttgatccttggctgtcgaggggagtccacggggtctctcctctgtggtaccagctgaagcttaactggaacgcgcggcgaagcaggtactaatgaggaggaggaaccttttgccctcagccatgggagctgttgctgttccttgtagcaaaaagctttttattgggggtttttgacatagcagagattgaataactacttgcggcagatttgaagctgttagggtttagggttattcaattgtgccatgggagctgttgctgttccttgtagcaaaaagctttttattggtgttttttgacatagcagagattgaataactacttgcggcagatttgaagctgttgaatatgtgtcgtgcttttcgttgtgtttgtgggctgggctcatttacattgcacaattgcaacactgacagtgactgttttatttttcttttggaacatacaatgcctgtttgtattaatacagcagaaagcagacaatattttttgataaacgcaattagttttctatagtctatactgaaagtcgcctagaggggggtgaatagggcgaaactgaaatttat

SEQ ID NO: 57697 - DNA, 1457 bp, Zea Mays
cgactctccatctagcaaagcagtacataaagggaccttccttcctgatacaggaaggcagggttcatgagtggcggcacgcctgcagcaagcagtagcctgcggacatcactctcatactacgtgaggcaagtccgcgcctatgactaccaccactacctctgccttctccacctggccccggccgtgcgcaaggccgcgttcaccttccgcaccttcaacatcgagacagcaagggccatggatgtggtgttcgacccccgagccggcctcatgcgcctcctctggtggaaggagggggtcgacaagatctttggcaacaagctagtcgagcacccagttgcccaggcgctctcttcgatcatcgcagaccacaaggttagcaagcactggctgaagcggtccgtggaggcgaggatcaacgacgccaaccgtgaggaaggcaccattcctaggacgagcgcgaagttggagaggtatgtggaggacacccagtccaccatcctttacatgaccttgcaggctggcggaatacagtccaccgtggctgaccacgccgcctctcacatcggcaaggccagcgggcttctgttactgctcaaggcgctgccgcaccatgtaaataatcaagggacggtacattatatcccagctagtgtggccgaggaatgcggcctgctcatcacacgggagggcggcaggtcggaggtcagggcaggcgagaggctgctagacgtagttttcaaggtcgcatctgttgcggaggctcacctgcataaggcgcgagagttggcaccgtccgtgcccaaagaggcgatccctatgctcctcccagccttgccggcccaggtcctcctggataccctgcgaaggtgagttcaacgtgtttgatccttggctgtcgaggggagtccacggggtctctcctctgtggtaccagctgaagcttaactggaacgcgcggcgaagcaggtactaatgaggaggaggaaccttttgccctcagccatgggagctgttgctgttccttgtagcaaaaagctttttattgggggtttttgacatagcagagattgaataactacttgcggcagatttgaagctgttagggtttagggttattcaattgtgccatgggagctgttgctgttccttgtagcaaaaagctttttattggtgttttttgacatagcagagattgaataactacttgcggcagatttgaagctgttgaatatgtgtcgtgcttttcgttgtgtttgtgggctgggctcatttacattgcacaattgcaacactgacagtgactgttttatttttcttttggaacatacaatgcctgtttgtattaatacagcagaaagcagacaatattttttgataaacgcaattagttttctatagtctatactgaaagtcgcctagaggggggtgaatagggcgaaactgaaatttat

SEQ ID NO: 57698 - DNA, 1342 bp, Zea Mays
cagccacctgatcctccatccccacgagctcgtctgtcgtctccacctaatccacatcgagctctccgacgtcgtccccttccactcgacaagggaccttccttcctgatacaggaaggcagggttcatgagtggcggcacgcctgcagcaagcagtagcctgcggacatcactctcatactacgtgaggcaagtccgcgcctatgactaccaccactacctctgccttctccacctggccccggccgtgcgcaaggccgcgttcaccttccgcaccttcaacatcgagacagcaagggccatggatgtggtgttcgacccccgagccggcctcatgcgcctcctctggtggaaggagggggtcgacaagatctttggcaacaagctagtcgagcacccagttgcccaggcgctctcttcgatcatcgcagaccacaaggttagcaagcactggctgaagcggtccgtggaggcgaggatcaacgacgccaaccgtgaggaaggcaccattcctaggacgagcgcgaagttggagagctagtgtggccgaggaatgcggcctgctcatcacacgggagggcggcaggtcggaggtcagggcaggcgagaggctgctagacgtagttttcaaggtcgcatctgttgcggaggctcacctgcataaggcgcgagagttggcaccgtccgtgcccaaagaggcgatccctatgctcctcccagccttgccggcccaggtcctcctggataccctgcgaaggtgagttcaacgtgtttgatccttggctgtcgaggggagtccacggggtctctcctctgtggtaccagctgaagcttaactggaacgcgcggcgaagcaggtactaatgaggaggaggaaccttttgccctcagccatgggagctgttgctgttccttgtagcaaaaagctttttattgggggtttttgacatagcagagattgaataactacttgcggcagatttgaagctgttagggtttagggttattcaattgtgccatgggagctgttgctgttccttgtagcaaaaagctttttattggtgttttttgacatagcagagattgaataactacttgcggcagatttgaagctgttgaatatgtgtcgtgcttttcgttgtgtttgtgggctgggctcatttacattgcacaattgcaacactgacagtgactgttttatttttcttttggaacatacaatgcctgtttgtattaatacagcagaaagcagacaatattttttgataaacgcaattagttttctatagtctatactgaaagtcgcctagaggggggtgaatagggcgaaactgaaatttat

SEQ ID NO: 57699 - DNA, 1301 bp, Zea Mays
cgacgtcgtccccttccactcgacaagggaccttccttcctgatacaggaaggcagaattcatgagcggcggcacgcctgcagcaagcagtagcctgcggacagcactctcatactgcgtgaggcaagtccgcgcctatgactaccaccactacctctgccttctccacctggccccggccgtgcgcaaggcagcgttcaccttccgcgccttcaacatcgagacagcaagggccatggatgtggtgtccgacccccggaccggcctcatgcgcctcctctggtggaaggaggcggtcgacaaggtctttggcaacaagctggtcgagcacccagttgcccaggcgctctcttcggtcatcgcagaccacaaggttagcaagcactggctgaagcggtccgtggaggcgaggatcaacgacgccaaccgtgaggaaggcaccattcctgggacgagcgcggagttggagaggtatgcggaggacacccagtccaccatcctttacatgaccttgcaggctggcggaatacagtccaccgtggctgaccacgccgcctctcacatcggcaaggccagcgggcttctgttactgctcaaggcgctgccgcaccatgtaaataagcaagggacggtacattatatcccagctagtgtggccgaggaatgcggcctgctcatcacacgggagggcggcaggtcggaggtcagggcaggcgagaggctgccagacgcagttttcaaggttgcatctgttgcggaggctcacttgcacaaggcgcgggagttggcaccgtccgtgcccaaagaggcgatccctgtgctcctcccagccttgccggcccaggtcctcctggataccctgcgaaggtgtgagttcaacgtgtttgatcctcggctgtcgaggggagtccacggggtctctcctctgtggtaccagctgaagcttaactggaacgcgtggcgaagcaggtactaatgaggaggaggaaccttttgccctcagccatgggagctgttgctgttccttgtagcaaaaagctttttattggggttttttgacatagcagagattgaataactacttgcggcagatttgaagctgttgaatatgtgtcgtgcttttcgttgtgtttgtgggctgggctcatttacattgcacaattgcaacactgacagtgcctgttttatttttcttttggaacatacaatgcctgtttgtattaatacagcagaaagcagacaatattttttgataaacgcaattagttttctatagtctatataattcctgttttcggttc

SEQ ID NO: 57700 - DNA, 1485 bp, Zea Mays
ctcacaccgggccgccacacaaaatcccacacctgcgtatcgcgctgcccaccgcacatccccgcctcccgccggccggccggccgcctgacgactcgcggtcaccgcctgcgggccaccgtccgcccccagctcgctcacgatattgtacgttcgtggcgcggagcaccgtggtgttggcctagtacgtcgatttcacggtgacttcactaccattgccgcccagtggctgcagaagctccccgccagcaacaagttcacctacaactgcgacggccacaccttcagttacctcatagagaaaggatttaggaccttccttcctgatacaggaaggcagaattcatgagcggcggcacgcctgcagcaagcagtagcctgcggacagcactctcatactgcgtgaggcaagtccgcgcctatgactaccaccactacctctgccttctccacctggccccggccgtgcgcaaggcagcgttcaccttccgcgccttcaacatcgagacagcaagggccatggatgtggtgtccgacccccggaccggcctcatgcgcctcctctggtggaaggaggcggtcgacaaggtctttggcaacaagctggtcgagcacccagttgcccaggcgctctcttcggtcatcgcagaccacaaggttagcaagcactggctgaagcggtccgtggaggcgaggatcaacgacgccaaccgtgaggaaggcaccattcctgggacgagcgcggagttggagaggccagcgggcttctgttactgctcaaggcgctgccgcaccatgtaaataagcaagggacggtacattatatcccagctagtgtggccgaggaatgcggcctgctcatcacacgggagggcggcaggtcggaggtcagggcaggcgagaggctgccagacgcagttttcaaggttgcatctgttgcggaggctcacttgcacaaggcgcgggagttggcaccgtccgtgcccaaagaggcgatccctgtgctcctcccagccttgccggcccaggtcctcctggataccctgcgaaggtgtgagttcaacgtgtttgatcctcggctgtcgaggggagtccacggggtctctcctctgtggtaccagctgaagcttaactggaacgcgtggcgaagcaggtactaatgaggaggaggaaccttttgccctcagccatgggagctgttgctgttccttgtagcaaaaagctttttattggggttttttgacatagcagagattgaataactacttgcggcagatttgaagctgttgaatatgtgtcgtgcttttcgttgtgtttgtgggctgggctcatttacattgcacaattgcaacactgacagtgcctgttttatttttcttttggaacatacaatgcctgtttgtattaatacagcagaaagcagacaatattttttgataaacgcaattagttttctatagtctatataattcctgttttcggttc

SEQ ID NO: 57701 - DNA, 1348 bp, Zea Mays
ccgccgcgggctcgaatcgggttcggcttgcttggatctcgcggggttcgcctcgatccgctagatggtatcagggaccttccttcctgatacaggaaggcagaattcatgagcggcggcacgcctgcagcaagcagtagcctgcggacagcactctcatactgcgtgaggcaagtccgcgcctatgactaccaccactacctctgccttctccacctggccccggccgtgcgcaaggcagcgttcaccttccgcgccttcaacatcgagacagcaagggccatggatgtggtgtccgacccccggaccggcctcatgcgcctcctctggtggaaggaggcggtcgacaaggtctttggcaacaagctggtcgagcacccagttgcccaggcgctctcttcggtcatcgcagaccacaaggttagcaagcactggctgaagcggtccgtggaggcgaggatcaacgacgccaaccgtgaggaaggcaccattcctgggacgagcgcggagttggagaggtatgcggaggacacccagtccaccatcctttacatgaccttgcaggctggcggaatacagtccaccgtggctgaccacgccgcctctcacatcggcaaggccagcgggcttctgttactgctcaaggcgctgccgcaccatgtaaataagcaagggacggtacattatatcccagctagtgtggccgaggaatgcggcctgctcatcacacgggagggcggcaggtcggaggtcagggcaggcgagaggctgccagacgcagttttcaaggttgcatctgttgcggaggctcacttgcacaaggcgcgggagttggcaccgtccgtgcccaaagaggcgatccctgtgctcctcccagccttgccggcccaggtcctcctggataccctgcgaaggtgtgagttcaacgtgtttgatcctcggctgtcgaggggagtccacggggtctctcctctgtggtaccagctgaagcttaactggaacgcgtggcgaagcaggtactaatgaggaggaggaaccttttgccctcagccatgggagctgttgctgttccttgtagcaaaaagctttttattggggttttttgacatagcagagattgaataactacttgcggcagatttgaagctgttgaatatgtgtcgtgcttttcgttgtgtttgtgggctgggctcatttacattgcacaattgcaacactgacagtgcctgttttatttttcttttggaacatacaatgcctgtttgtattaatacagcagaaagcagacaatattttttgataaacgcaattagttttctatagtctatataattcctgttttcggttc

SEQ ID NO: 57702 - DNA, 5577 bp, Zea Mays
ccctggactacggagtctaggttttggccacatatcaaggactacatacgagcgatcgatggaagccactttcccgcctttgtccctttgtcaaagcaacccaaatatattggttgtcacgggtacgcataacagaatgtcatggtcgtttgtgactccgatataaggtacacatttgtcgttactgggtggcctggttcggtgcatgacactagagtgctacatgatacttttatcacgtacgggaataggttcctacatcctccagaaggtattagtataatctacttttgtagcatttccaattaatgttgttatgtaccccaacaggaagggatacctcgcatcttataatggtcaaaattaccatatttttgaatggcagcatgcgaggcaaccagttggtgccaaagaagttttcaactacgcacactcatccacgaggaatgttataaagcgatcatttggggtgctgaagataaagtggagaatccttctcaatctgcattcattttgactaaggaagcaatccaagataattaatgtatgcatggcgttgcataacttcattcaggacagtgttatacacgatcgcgactttgactagtatttatcttgtacgaggtatgtttatgatgtagctataggtgatagtagtaccaacacatcatatgagttagacatgagtgtttttagtgatgcaattgctaatgtgttagtgtcttatgtagttatctgaaccgataaataattatattataatggacaaatcatgtgtaattgcaatcagatgttgattattgtgtctgtctttttcttttttttcactcagaatctataatatcagaatttgcgtatctaaacacccagattgtaaccatcagcttctcccacagcagtccaaccaaacattcagccaacttttttccacaaccagcttattctcacgaccatattaaaaaaaagccgaaccaaacgtgacctatgattgctgctcactaagtgttacccaaatcgtcagagtgagggggaggcggagggtgaatgtgaacttccggatgtctccaattgcttctgatcctgtccactccattaccaagaatagcactccatgtatcttggagtagagggaggaggagggagctcagccagtcatctatggattggtgccccaaacaacaagaccggccgagagggaagagcggaggccggaggggtcagctcttgcacttgtcaggggaggctagtctaggctaggggatctctgattgcctcctatcctctcctagccctgccctgccgcagcgcaacgactccgaaatctgaatcgccgcctccctccgccattcgcgtcagtgacatctattccttcaattcattcagtcaggcgacagcccatgcccttcacacaatcaaaatcgaatgttggttacacaactggaaaaataacgcacaccccgcaacatactagggagtaagaacgacagcgcattgccaggatagaaatcgtcctgatgttcttcgtaagtctggcatttagaccaggctgacaatgtcagcttccgagttcaggattccataccagcaagtttcaccttcgcagcctgctgagaatgtaaatcagtttaagacctgtcgatgtggggagggagacccgaactccacttctgaaactggtgacagtccaccggcctcttgtcctaattgccaggtccttaagagtggacatttactactttcatctaaaggaattggatggacatcatggaaaaagcgctggtttgttcttacgagggcatccctagtgttcttcagaagcgaccctaatgtgccgccacccagaggagctgaaccaattgttacacttggtggaattgacttgaataattctggaagtgtcgtcatcaaagaagaaaggaaacttttgacagtgttctttcctgatggccatggtgaacgaactttcactctgaaggcagaaaccacaggagatctaaatgagtggagaaatgcactggagagtgctatagctcaggcacccagcatagcaaatacaatggggcaaaatccaatattcagcactgatgtagaagcagaatctgctgaatctccagctgaacattcggaggaccgttctgttattggcagacctgcaaaatttgcacttgtagatgctgatggtagtccatcattcttggagaaggccctgaagttcattgaagatcatgggaaaaacgagttctctccagaagaggatgctcatgttattggtgactgtattaaggactcggaagaaggttcctgttcttcagatgcttatacggagtctgaggatgatgttgacaaggaatattccacagataatgacacccatgatgacgatggttcttatgattctggtgaagatgacattgaagaagatttggactactctgatgacagtgaacatgacagtaagatcaacgctaatatcaaggatggcaaggttaaaaacaatatctcagaaactgcagaagttgcacaggcagaggatacctctcctatggatatcaatagtcaatccaaccagaagcaagaatcatgtggaccgaatggatccaaagatcgtatactaagatcaacttctcgttcatcatcttccagagaaaaaactatggagaaatcatgcagttcagcacacaagggcaaaagaaccttatggggccgtacttcagcaagaaaagacctgtcaacagaggagattgaatgctgcagcgatgatgaggcccttgttgagaaacttgagagtaacaagattgatctccaatcaaaaattgcaaaggaggccaaagaaaatgcaatcctatggtcaagtctagaaaaacggaaagaagaactacatgagcgtcgtttagcacttgaaaaagaagttgaaaatttgagggaccagctgaagagggtgatgaatttgcgaagggggcaggtgtcctcgccttcaacaatagacagcaaggtcaggggccagcagctgtgctgtgaatcatgcaaccaacgtctcctaaatacagacaggcttagcggacctgaaagctcatcagtggaagcgtcaccgactgttgggagtgatcctgcatttgacatgggtgatatcgagcaatcaaggaagcaagccgcacagcattcgccttcttcaagagacaagccaagtcacgaggcggtcgggggcatcacccagagggctcctcaaagagggcattcgattgccagggagggccaagatgggtcgtcgtcgttgtcatcctctaattcgaagtggaatcttgcgcagaaacaatattcaaatagcccattgataagagggcttcatgtatccagcagactagaggatttcggtggaagcatatcaccagcagcgtcatcggcattagccaagctgacgaaccggctcaacttcctgaaagaacggagggcgctgctggcaagcgagatgcagagcttggatttgggtcggcccccaacagtgaagtccccaacaccaaaaggccatgaaagcaagaatagttgatgttagtctgttcctgtcgtgctcttctgaatgctagatagccttatgattaaaaccagcagtgtagtttgtgtgcatcccgttctcatccatgtagtgctgtctgtacatgtttccacaaaattctgctgcttcaaacttgcagatacatatagatacagattgaacgtgtcagctgctagtaggctgctttgttgaacacactacacaccaagcactagctgttctcattgctgaatggatcgtggctcaaagcactcttcactgatatacatagagagatggatctagtgatctggacatggtgacacattctaaagctcaaaatggctgtctgtccacataaaaacatggataacattgaaggtacaacaaagtgcagagatagctccctccagcattccaactaggataatagggagtctcaacaaagtgcagagttgtctcaggtctaaacttctcctagacgatagactagtagatatgctgctgctactgatctttcatcgggattcaggcatgatgatcctgacggccttgttcgcagtagccctattctcatcggagatggctccacattctgggagatcaaacttcctgtggctcagtaattctgcttccctggtggctcatggcttcaagctcctctagcatagatttctttgcggtccttaccatggattgaggggcaagcaccaaagatggccagagtccgaggctaatgtgatattatgatttatgcatctacagaaagagcaggtagcatgatttatgcatcatgccaaccaccattcactttcactggttatatggaacccagggataaaatgagatacaagcaggcttttatgaacgaaacagtttagtctgttggcaagtacatgtttagtacaaaagaaggatcagaaggaagttgaggaagaaacagttcgactgattaacatatattctttgtttttctcttgaatatgcaggagagttaaggacaaagaaagttgtgtatcattatattaaaaaaagaagaaagaacaagagcccatacaaacgaacacccactcaactcagaacatacaatgcgcctttaaaaaaacgaccaagaatcaactaggtcctcctgatatcaaacttcctctagaaccatgctgcggccaatctccagagtatgagctcctcaccggctagggacatagctcggtcgatggaaagggagaaaccatcaaacacacacctttttcgattggttccaaagaatccatacccctagaacaactagagaattaaggcattttctaacaggggcatgtgctgcagccagagttctttctcaccatgccaccactcatcaaaattttcttcccctagttttggacttaggttatgcagcctgactttttgtaaaagtctaaaccaaaatactcgagcaaagatgcaggagagaaacaagtgattaatagtttcctcagcttgatcacaaagtgggcacattggtgggtgcaggagtccacactttgcaagccgatgagctgtccaacacctatttctcacgacaagccacataaaaagcgacatttttcaggggcaatgcattccaaattctttcccaaaatctaaaggccacaatcctagaatataggttcttatagctagactttgtagattatttcctgtctggtgaaataaagagactaatatcattgattgtgccattgataaaaaggccaaatcacttgccttggctggtagcgaaataaatatgaagcattatttgaaagaaagacttgcccttttattaagagaagaggagattaagtggtatgaaagagcgaaggttaataacctattacaaggtgacaataatactcgcttttcccatctagttgccaatggtaaacaccgcaacaacacatcttcaaattagaacaggaagggtgagttttcatgggagatgataatttaaaggcatatataaagggttgtttggaccaccagagaataccaatataaccttggtggaagattatattgaagatatc

SEQ ID NO: 57703 - DNA, 5795 bp, Zea Mays
ccctggactacggagtctaggttttggccacatatcaaggactacatacgagcgatcgatggaagccactttcccgcctttgtccctttgtcaaagcaacccaaatatattggttgtcacgggtacgcataacagaatgtcatggtcgtttgtgactccgatataaggtacacatttgtcgttactgggtggcctggttcggtgcatgacactagagtgctacatgatacttttatcacgtacgggaataggttcctacatcctccagaaggtattagtataatctacttttgtagcatttccaattaatgttgttatgtaccccaacaggaagggatacctcgcatcttataatggtcaaaattaccatatttttgaatggcagcatgcgaggcaaccagttggtgccaaagaagttttcaactacgcacactcatccacgaggaatgttataaagcgatcatttggggtgctgaagataaagtggagaatccttctcaatctgcattcattttgactaaggaagcaatccaagataattaatgtatgcatggcgttgcataacttcattcaggacagtgttatacacgatcgcgactttgactagtatttatcttgtacgaggtatgtttatgatgtagctataggtgatagtagtaccaacacatcatatgagttagacatgagtgtttttagtgatgcaattgctaatgtgttagtgtcttatgtagttatctgaaccgataaataattatattataatggacaaatcatgtgtaattgcaatcagatgttgattattgtgtctgtctttttcttttttttcactcagaatctataatatcagaatttgcgtatctaaacacccagattgtaaccatcagcttctcccacagcagtccaaccaaacattcagccaacttttttccacaaccagcttattctcacgaccatattaaaaaaaagccgaaccaaacgtgacctatgattgctgctcactaagtgttacccaaatcgtcagagtgagggggaggcggagggtgaatgtgaacttccggatgtctccaattgcttctgatcctgtccactccattaccaagaatagcactccatgtatcttggagtagagggaggaggagggagctcagccagtcatctatggattggtgccccaaacaacaagaccggccgagagggaagagcggaggccggaggggtcagctcttgcacttgtcaggggaggctagtctaggctaggggatctctgattgcctcctatcctctcctagccctgccctgccgcagcgcaacgactccgaaatctgaatcgccgcctccctccgccattcgcgtcagtgacatctattccttcaattcattcagtcaggcgacagcccatgcccttcacacaatcaaaatcgaatgttggttacacaactggaaaaataacgcacaccccgcaacatactaggcacgtctttatctcggatcagtattcgggagtaagaacgacagcgcattgccaggatagaaatcgtcctgatgttcttcgtaagtctggcatttagaccaggctgacaatgtcagcttccgagttcaggattccataccagcaacctgctgagaatgtaaatcagtttaagacctgtcgatgtggggagggagacccgaactccacttctgaaactggtgacagtccaccggcctcttgtcctaattgccaggtccttaagagtggacatttactactttcatctaaaggaattggatggacatcatggaaaaagcgctggtttgttcttacgagggcatccctagtgttcttcagaagcgaccctaatgtgccgccacccagaggagctgaaccaattgttacacttggtggaattgacttgaataattctggaagtgtcgtcatcaaagaagaaaggaaacttttgacagtgttctttcctgatggccatggtgaacgaactttcactctgaaggcagaaaccacaggagatctaaatgagtggagaaatgcactggagagtgctatagctcaggcacccagcatagcaaatacaatggggcaaaatccaatattcagcactgatgtagaagcagaatctgctgaatctccagctgaacattcggaggaccgttctgttattggcagacctgcaaaatttgcacttgtagatgctgatggtagtccatcattcttggagaaggccctgaagttcattgaagatcatgggatcaaggtagagggcatcctgcgtcagtctgctgatgttgaagaagtcaaacgcagaattagggattatgaaaaggggaaaaacgagttctctccagaagaggatgctcatgttattggtgactgtattaagtatgttcttcgagagatgccatcatctccagttcctgcatcatgttgcactgctctggttaaagcataccgaagtgacaaggcaagaagacttgatgagattaatagagtgataaatgaagttttcccagaaccaaatcgacaattgttgcagaggactcggaagaaggttcctgttcttcagatgcttatacggagtctgaggatgatgttgacaaggaatattccacagataatgacacccatgatgacgatggttcttatgattctggtgaagatgacattgaagaagatttggactactctgatgacagtgaacatgacagtaagatcaacgctaatatcaaggatggcaagaagttgcacaggcagaggatacctctcctatggatatcaatagtcaatccaaccagaagcaagaatcatgtggaccgaatggatccaaagatcgtatactaagatcaacttctcgttcatcatcttccagagaaaaaactatggagaaatcatgcagttcagcacacaagggcaaaagaaccttatggggccgtacttcagcaagaaaagacctgtcaacagaggagattgaatgctgcagcgatgatgaggcccttgttgagaaacttgagagtaacaagattgatctccaatcaaaaattgcaaaggaggccaaagaaaatgcaatcctatggtcaagtctagaaaaacggaaagaagaactacatgagcgtcgtttagcacttgaaaaagaagttgaaaatttgagggaccagctgaagagggtgatgaatttgcgaagggggcaggtgtcctcgccttcaacaatagacagcaaggtcaggggccagcagctgtgctgtgaatcatgcaaccaacgtctcctaaatacagacaggcttagcggacctgaaagctcatcagtggaagcgtcaccgactgttgggagtgatcctgcatttgacatgggtgatatcgagcaatcaaggaagcaagccgcacagcattcgccttcttcaagagacaagccaagtcacgaggcggtcgggggcatcacccagagggctcctcaaagagggcattcgattgccagggagggccaagatgggtcgtcgtcgttgtcatcctctaattcgaagtggaatcttgcgcagaaacaatattcaaatagcccattgataagagggcttcatgtatccagcagactagaggatttcggtggaagcatatcaccagcagcgtcatcggcattagccaagctgacgaaccggctcaacttcctgaaagaacggagggcgctgctggcaagcgagatgcagagcttggatttgggtcggcccccaacagtgaagtccccaacaccaaaaggccatgaaagcaagaatagttgatgttagtctgttcctgtcgtgctcttctgaatgctagatagccttatgattaaaaccagcagtgtagtttgtgtgcatcccgttctcatccatgtagtgctgtctgtacatgtttccacaaaattctgctgcttcaaacttgcagatacatatagatacagattgaacgtgtcagctgctagtaggctgctttgttgaacacactacacaccaagcactagctgttctcattgctgaatggatcgtggctcaaagcactcttcactgatatacatagagagatggatctagtgatctggacatggtgacacattctaaagctcaaaatggctgtctgtccacataaaaacatggataacattgaaggtacaacaaagtgcagagatagctccctccagcattccaactaggataatagggagtctcaacaaagtgcagagttgtctcaggtctaaacttctcctagacgatagactagtagatatgctgctgctactgatctttcatcgggattcaggcatgatgatcctgacggccttgttcgcagtagccctattctcatcggagatggctccacattctgggagatcaaacttcctgtggctcagtaattctgcttccctggtggctcatggcttcaagctcctctagcatagatttctttgcggtccttaccatggattgaggggcaagcaccaaagatggccagagtccgaggctaatgtgatattatgatttatgcatctacagaaagagcaggtagcatgatttatgcatcatgccaaccaccattcactttcactggttatatggaacccagggataaaatgagatacaagcaggcttttatgaacgaaacagtttagtctgttggcaagtacatgtttagtacaaaagaaggatcagaaggaagttgaggaagaaacagttcgactgattaacatatattctttgtttttctcttgaatatgcaggagagttaaggacaaagaaagttgtgtatcattatattaaaaaaagaagaaagaacaagagcccatacaaacgaacacccactcaactcagaacatacaatgcgcctttaaaaaaacgaccaagaatcaactaggtcctcctgatatcaaacttcctctagaaccatgctgcggccaatctccagagtatgagctcctcaccggctagggacatagctcggtcgatggaaagggagaaaccatcaaacacacacctttttcgattggttccaaagaatccatacccctagaacaactagagaattaaggcattttctaacaggggcatgtgctgcagccagagttctttctcaccatgccaccactcatcaaaattttcttcccctagttttggacttaggttatgcagcctgactttttgtaaaagtctaaaccaaaatactcgagcaaagatgcaggagagaaacaagtgattaatagtttcctcagcttgatcacaaagtgggcacattggtgggtgcaggagtccacactttgcaagccgatgagctgtccaacacctatttctcacgacaagccacataaaaagcgacatttttcaggggcaatgcattccaaattctttcccaaaatctaaaggccacaatcctagaatataggttcttatagctagactttgtagattatttcctgtctggtgaaataaagagactaatatcattgattgtgccattgataaaaaggccaaatcacttgccttggctggtagcgaaataaatatgaagcattatttgaaagaaagacttgcccttttattaagagaagaggagattaagtggtatgaaagagcgaaggttaataacctattacaaggtgacaataatactcgcttttcccatctagttgccaatggtaaacaccgcaacaacacatcttcaaattagaacaggaagggtgagttttcatgggagatgataatttaaaggcatatataaagggttgtttggaccaccagagaataccaatataaccttggtggaagattatattgaagatatc

SEQ ID NO: 57704 - DNA, 6004 bp, Zea Mays
ccctggactacggagtctaggttttggccacatatcaaggactacatacgagcgatcgatggaagccactttcccgcctttgtccctttgtcaaagcaacccaaatatattggttgtcacgggtacgcataacagaatgtcatggtcgtttgtgactccgatataaggtacacatttgtcgttactgggtggcctggttcggtgcatgacactagagtgctacatgatacttttatcacgtacgggaataggttcctacatcctccagaaggtattagtataatctacttttgtagcatttccaattaatgttgttatgtaccccaacaggaagggatacctcgcatcttataatggtcaaaattaccatatttttgaatggcagcatgcgaggcaaccagttggtgccaaagaagttttcaactacgcacactcatccacgaggaatgttataaagcgatcatttggggtgctgaagataaagtggagaatccttctcaatctgcattcattttgactaaggaagcaatccaagataattaatgtatgcatggcgttgcataacttcattcaggacagtgttatacacgatcgcgactttgactagtatttatcttgtacgaggtatgtttatgatgtagctataggtgatagtagtaccaacacatcatatgagttagacatgagtgtttttagtgatgcaattgctaatgtgttagtgtcttatgtagttatctgaaccgataaataattatattataatggacaaatcatgtgtaattgcaatcagatgttgattattgtgtctgtctttttcttttttttcactcagaatctataatatcagaatttgcgtatctaaacacccagattgtaaccatcagcttctcccacagcagtccaaccaaacattcagccaacttttttccacaaccagcttattctcacgaccatattaaaaaaaagccgaaccaaacgtgacctatgattgctgctcactaagtgttacccaaatcgtcagagtgagggggaggcggagggtgaatgtgaacttccggatgtctccaattgcttctgatcctgtccactccattaccaagaatagcactccatgtatcttggagtagagggaggaggagggagctcagccagtcatctatggattggtgccccaaacaacaagaccggccgagagggaagagcggaggccggaggggtcagctcttgcacttgtcaggggaggctagtctaggctaggggatctctgattgcctcctatcctctcctagccctgccctgccgcagcgcaacgactccgaaatctgaatcgccgcctccctccgccattcgcgtcagtgacatctattccttcaattcattcagtcaggcgacagcccatgcccttcacacaatcaaaatcgaatgttggttacacaactggaaaaataacgcacaccccgcaacatactaggcacgtctttatctcggatcagtattcgggagtaagaacgacagcgcattgccaggatagaaatcgtcctgatgttcttcgtaagtctggcatttagaccaggctgacaatgtcagcttccgagttcaggattccataccagcaagtttcaccttcgcagcctgctgagaatgtaaatcagtttaagacctgtcgatgtggggagggagacccgaactccacttctgaaactggtgacagtccaccggcctcttgtcctaattgccaggtccttaagagtggacatttactactttcatctaaaggaattggatggacatcatggaaaaagcgctggtttgttcttacgagggcatccctagtgttcttcagaagcgaccctaatgtgccgccacccagaggagctgaaccaattgttacacttggtggaattgacttgaataattctggaagtgtcgtcatcaaagaagaaaggaaacttttgacagtgttctttcctgatggccatggtgaacgaactttcactctgaaggcagaaaccacaggagatctaaatgagtggagaaatgcactggagagtgctatagctcaggcacccagcatagcaaatacaatggggcaaaatccaatattcagcactgatgtagaagcagaatctgctgaatctccagctgaacattcggaggaccgttctgttattggcagacctgcaaaatttgcacttgtagatgctgatggtagtccatcattcttggagaaggccctgaagttcattgaagatcatgggaaaaacgagttctctccagaagaggatgctcatgttattggtgactgtattaagtatgttcttcgagagatgccatcatctccagttcctgcatcatgttgcactgctctggttaaagcataccgaagtgacaaggcaagaagacttgatgagattaatagagtgataaatgaagttttcccagaaccaaatcgacaattgttgcagaggactcttaagatgatgcaagttgttgagtcacacaaagctgtgaatagaatgtctcaatctgctttggcagcttgcatggcaccactacttcttcgacctcttcttcttggagaatgtgacatagacaatgaatttagtatgggaggggatagttcattccagctacttcaagctgctgcggctgcgaatcatgcacaggctattgttattattatgatggaggaatttgatcagatatttgatgactcggaagaaggttcctgttcttcagatgcttatacggagtctgaggatgatgttgacaaggaatattccacagataatgacacccatgatgacgatggttcttatgattctggtgaagatgacattgaagaagatttggactactctgatgacagtgaacatgacagtaagatcaacgctaatatcaaggatggcaaggttaaaaacaatatctcagaaactgcagaagttgcacaggcagaggatacctctcctatggatatcaatagtcaatccaaccagaagcaagaatcatgtggaccgaatggatccaaagatcgtatactaagatcaacttctcgttcatcatcttccagagaaaaaactatggagaaatcatgcagttcagcacacaagggcaaaagaaccttatggggccgtacttcagcaagaaaagacctgtcaacagaggagattgaatgctgcagcgatgatgaggcccttgttgagaaacttgagagtaacaagattgatctccaatcaaaaattgcaaaggaggccaaagaaaatgcaatcctatggtcaagtctagaaaaacggaaagaagaactacatgagcgtcgtttagcacttgaaaaagaagttgaaaatttgagggaccagctgaagagggtgatgaatttgcgaagggggcaggtgtcctcgccttcaacaatagacagcaaggtcaggggccagcagctgtgctgtgaatcatgcaaccaacgtctcctaaatacagacaggcttagcggacctgaaagctcatcagtggaagcgtcaccgactgttgggagtgatcctgcatttgacatgggtgatatcgagcaatcaaggaagcaagccgcacagcattcgccttcttcaagagacaagccaagtcacgaggcggtcgggggcatcacccagagggctcctcaaagagggcattcgattgccagggagggccaagatgggtcgtcgtcgttgtcatcctctaattcgaagtggaatcttgcgcagaaacaatattcaaatagcccattgataagagggcttcatgtatccagcagactagaggatttcggtggaagcatatcaccagcagcgtcatcggcattagccaagctgacgaaccggctcaacttcctgaaagaacggagggcgctgctggcaagcgagatgcagagcttggatttgggtcggcccccaacagtgaagtccccaacaccaaaaggccatgaaagcaagaatagttgatgttagtctgttcctgtcgtgctcttctgaatgctagatagccttatgattaaaaccagcagtgtagtttgtgtgcatcccgttctcatccatgtagtgctgtctgtacatgtttccacaaaattctgctgcttcaaacttgcagatacatatagatacagattgaacgtgtcagctgctagtaggctgctttgttgaacacactacacaccaagcactagctgttctcattgctgaatggatcgtggctcaaagcactcttcactgatatacatagagagatggatctagtgatctggacatggtgacacattctaaagctcaaaatggctgtctgtccacataaaaacatggataacattgaaggtacaacaaagtgcagagatagctccctccagcattccaactaggataatagggagtctcaacaaagtgcagagttgtctcaggtctaaacttctcctagacgatagactagtagatatgctgctgctactgatctttcatcgggattcaggcatgatgatcctgacggccttgttcgcagtagccctattctcatcggagatggctccacattctgggagatcaaacttcctgtggctcagtaattctgcttccctggtggctcatggcttcaagctcctctagcatagatttctttgcggtccttaccatggattgaggggcaagcaccaaagatggccagagtccgaggctaatgtgatattatgatttatgcatctacagaaagagcaggtagcatgatttatgcatcatgccaaccaccattcactttcactggttatatggaacccagggataaaatgagatacaagcaggcttttatgaacgaaacagtttagtctgttggcaagtacatgtttagtacaaaagaaggatcagaaggaagttgaggaagaaacagttcgactgattaacatatattctttgtttttctcttgaatatgcaggagagttaaggacaaagaaagttgtgtatcattatattaaaaaaagaagaaagaacaagagcccatacaaacgaacacccactcaactcagaacatacaatgcgcctttaaaaaaacgaccaagaatcaactaggtcctcctgatatcaaacttcctctagaaccatgctgcggccaatctccagagtatgagctcctcaccggctagggacatagctcggtcgatggaaagggagaaaccatcaaacacacacctttttcgattggttccaaagaatccatacccctagaacaactagagaattaaggcattttctaacaggggcatgtgctgcagccagagttctttctcaccatgccaccactcatcaaaattttcttcccctagttttggacttaggttatgcagcctgactttttgtaaaagtctaaaccaaaatactcgagcaaagatgcaggagagaaacaagtgattaatagtttcctcagcttgatcacaaagtgggcacattggtgggtgcaggagtccacactttgcaagccgatgagctgtccaacacctatttctcacgacaagccacataaaaagcgacatttttcaggggcaatgcattccaaattctttcccaaaatctaaaggccacaatcctagaatataggttcttatagctagactttgtagattatttcctgtctggtgaaataaagagactaatatcattgattgtgccattgataaaaaggccaaatcacttgccttggctggtagcgaaataaatatgaagcattatttgaaagaaagacttgcccttttattaagagaagaggagattaagtggtatgaaagagcgaaggttaataacctattacaaggtgacaataatactcgcttttcccatctagttgccaatggtaaacaccgcaacaacacatcttcaaattagaacaggaagggtgagttttcatgggagatgataatttaaaggcatatataaagggttgtttggaccaccagagaataccaatataaccttggtggaagattatattgaagatatc

SEQ ID NO: 57705 - DNA, 6244 bp, Zea Mays
ccctggactacggagtctaggttttggccacatatcaaggactacatacgagcgatcgatggaagccactttcccgcctttgtccctttgtcaaagcaacccaaatatattggttgtcacgggtacgcataacagaatgtcatggtcgtttgtgactccgatataaggtacacatttgtcgttactgggtggcctggttcggtgcatgacactagagtgctacatgatacttttatcacgtacgggaataggttcctacatcctccagaaggtattagtataatctacttttgtagcatttccaattaatgttgttatgtaccccaacaggaagggatacctcgcatcttataatggtcaaaattaccatatttttgaatggcagcatgcgaggcaaccagttggtgccaaagaagttttcaactacgcacactcatccacgaggaatgttataaagcgatcatttggggtgctgaagataaagtggagaatccttctcaatctgcattcattttgactaaggaagcaatccaagataattaatgtatgcatggcgttgcataacttcattcaggacagtgttatacacgatcgcgactttgactagtatttatcttgtacgaggtatgtttatgatgtagctataggtgatagtagtaccaacacatcatatgagttagacatgagtgtttttagtgatgcaattgctaatgtgttagtgtcttatgtagttatctgaaccgataaataattatattataatggacaaatcatgtgtaattgcaatcagatgttgattattgtgtctgtctttttcttttttttcactcagaatctataatatcagaatttgcgtatctaaacacccagattgtaaccatcagcttctcccacagcagtccaaccaaacattcagccaacttttttccacaaccagcttattctcacgaccatattaaaaaaaagccgaaccaaacgtgacctatgattgctgctcactaagtgttacccaaatcgtcagagtgagggggaggcggagggtgaatgtgaacttccggatgtctccaattgcttctgatcctgtccactccattaccaagaatagcactccatgtatcttggagtagagggaggaggagggagctcagccagtcatctatggattggtgccccaaacaacaagaccggccgagagggaagagcggaggccggaggggtcagctcttgcacttgtcaggggaggctagtctaggctaggggatctctgattgcctcctatcctctcctagccctgccctgccgcagcgcaacgactccgaaatctgaatcgccgcctccctccgccattcgcgtcagtgacatctattccttcaattcattcagtcaggcgacagcccatgcccttcacacaatcaaaatcgaatgttggttacacaactggaaaaataacgcacaccccgcaacatactaggcacgtctttatctcggatcagtattcgggagtaagaacgacagcgcattgccaggatagaaatcgtcctgatgttcttcgtaagtctggcatttagaccaggctgacaatgtcagcttccgagttcaggattccataccagcaagtttcaccttcgcagcctgctgagaatgtaaatcagtttaagacctgtcgatgtggggagggagacccgaactccacttctgaaactggtgacagtccaccggcctcttgtcctaattgccaggtccttaagagtggacatttactactttcatctaaaggaattggatggacatcatggaaaaagcgctggtttgttcttacgagggcatccctagtgttcttcagaagcgaccctaatgtgccgccacccagaggagctgaaccaattgttacacttggtggaattgacttgaataattctggaagtgtcgtcatcaaagaagaaaggaaacttttgacagtgttctttcctgatggccatggtgaacgaactttcactctgaaggcagaaaccacaggagatctaaatgagtggagaaatgcactggagagtgctatagctcaggcacccagcatagcaaatacaatggggcaaaatccaatattcagcactgatgtagaagcagaatctgctgaatctccagctgaacattcggaggaccgttctgttattggcagacctgcaaaatttgcacttgtagatgctgatggtagtccatcattcttggagaaggccctgaagttcattgaagatcatgggaaaaacgagttctctccagaagaggatgctcatgttattggtgactgtattaagtatgttcttcgagagatgccatcatctccagttcctgcatcatgttgcactgctctggttaaagcataccgaagtgacaaggcaagaagacttgatgagattaatagagtgataaatgaagttttcccagaaccaaatcgacaattgttgcagaggtactaacttatatgcttatatcatattttctttcaacctaagctttatatttaacatattaattcttgtggtgtcatagctggattttcattcttgatgggggtttctcattccttgatatcattgtaataaatttgaatgagttacattatcctgtagaaccttaacaacattattccaacaaatgggctccatactaatcaggttctttcaggactcttaagatgatgcaagttgttgagtcacacaaagctgtgaatagaatgtctcaatctgctttggcagcttgcatggcaccactacttcttcgacctcttcttcttggagaatgtgacatagacaatgaatttagtatgggaggggatagttcattccagctacttcaagctgctgcggctgcgaatcatgcacaggctattgttattattatgatggaggaatttgatcagatatttgatgactcggaagaaggttcctgttcttcagatgcttatacggagtctgaggatgatgttgacaaggaatattccacagataatgacacccatgatgacgatggttcttatgattctggtgaagatgacattgaagaagatttggactactctgatgacagtgaacatgacagtaagatcaacgctaatatcaaggatggcaaggttaaaaacaatatctcagaaactgcaggtagtgataataatcagtatcttcaaccctcctataagagcaacaagagtagaaaatggtgcatcaagagaaaaaactatggagaaatcatgcagttcagcacacaagggcaaaagaaccttatggggccgtacttcagcaagaaaagacctgtcaacagaggagattgaatgctgcagcgatgatgaggcccttgttgagaaacttgagagtaacaagattgatctccaatcaaaaattgcaaaggaggccaaagaaaatgcaatcctatggtcaagtctagaaaaacggaaagaagaactacatgagcgtcgtttagcacttgaaaaagaagttgaaaatttgagggaccagctgaagagggtgatgaatttgcgaagggggcaggtgtcctcgccttcaacaatagacagcaaggtcaggggccagcagctgtgctgtgaatcatgcaaccaacgtctcctaaatacagacaggcttagcggacctgaaagctcatcagtggaagcgtcaccgactgttgggagtgatcctgcatttgacatggtaagaaggcaaaatccctttcgttctgctttcattataagtgggaggaaagtctgttatcaggttaaaaagaagagaacatttcagggtgatatcgagcaatcaaggaagcaagccgcacagcattcgccttcttcaagagacaagccaagtcacgaggcggtcgggggcatcacccagagggctcctcaaagagggcattcgattgccagggagggccaagatgggtcgtcgtcgttgtcatcctctaattcgaagtggaatcttgcgcagaaacaatattcaaatagcccattgataagagggcttcatgtatccagcagactagaggatttcggtggaagcatatcaccagcagcgtcatcggcattagccaagctgacgaaccggctcaacttcctgaaagaacggagggcgctgctggcaagcgagatgcagagcttggatttgggtcggcccccaacagtgaagtccccaacaccaaaaggccatgaaagcaagaatagttgatgttagtctgttcctgtcgtgctcttctgaatgctagatagccttatgattaaaaccagcagtgtagtttgtgtgcatcccgttctcatccatgtagtgctgtctgtacatgtttccacaaaattctgctgcttcaaacttgcagatacatatagatacagattgaacgtgtcagctgctagtaggctgctttgttgaacacactacacaccaagcactagctgttctcattgctgaatggatcgtggctcaaagcactcttcactgatatacatagagagatggatctagtgatctggacatggtgacacattctaaagctcaaaatggctgtctgtccacataaaaacatggataacattgaaggtacaacaaagtgcagagatagctccctccagcattccaactaggataatagggagtctcaacaaagtgcagagttgtctcaggtctaaacttctcctagacgatagactagtagatatgctgctgctactgatctttcatcgggattcaggcatgatgatcctgacggccttgttcgcagtagccctattctcatcggagatggctccacattctgggagatcaaacttcctgtggctcagtaattctgcttccctggtggctcatggcttcaagctcctctagcatagatttctttgcggtccttaccatggattgaggggcaagcaccaaagatggccagagtccgaggctaatgtgatattatgatttatgcatctacagaaagagcaggtagcatgatttatgcatcatgccaaccaccattcactttcactggttatatggaacccagggataaaatgagatacaagcaggcttttatgaacgaaacagtttagtctgttggcaagtacatgtttagtacaaaagaaggatcagaaggaagttgaggaagaaacagttcgactgattaacatatattctttgtttttctcttgaatatgcaggagagttaaggacaaagaaagttgtgtatcattatattaaaaaaagaagaaagaacaagagcccatacaaacgaacacccactcaactcagaacatacaatgcgcctttaaaaaaacgaccaagaatcaactaggtcctcctgatatcaaacttcctctagaaccatgctgcggccaatctccagagtatgagctcctcaccggctagggacatagctcggtcgatggaaagggagaaaccatcaaacacacacctttttcgattggttccaaagaatccatacccctagaacaactagagaattaaggcattttctaacaggggcatgtgctgcagccagagttctttctcaccatgccaccactcatcaaaattttcttcccctagttttggacttaggttatgcagcctgactttttgtaaaagtctaaaccaaaatactcgagcaaagatgcaggagagaaacaagtgattaatagtttcctcagcttgatcacaaagtgggcacattggtgggtgcaggagtccacactttgcaagccgatgagctgtccaacacctatttctcacgacaagccacataaaaagcgacatttttcaggggcaatgcattccaaattctttcccaaaatctaaaggccacaatcctagaatataggttcttatagctagactttgtagattatttcctgtctggtgaaataaagagactaatatcattgattgtgccattgataaaaaggccaaatcacttgccttggctggtagcgaaataaatatgaagcattatttgaaagaaagacttgcccttttattaagagaagaggagattaagtggtatgaaagagcgaaggttaataacctattacaaggtgacaataatactcgcttttcccatctagttgccaatggtaaacaccgcaacaacacatcttcaaattagaacaggaagggtgagttttcatgggagatgataatttaaaggcatatataaagggttgtttggaccaccagagaataccaatataaccttggtggaagattatattgaagatatc

SEQ ID NO: 57706 - DNA, 6082 bp, Zea Mays
ccctggactacggagtctaggttttggccacatatcaaggactacatacgagcgatcgatggaagccactttcccgcctttgtccctttgtcaaagcaacccaaatatattggttgtcacgggtacgcataacagaatgtcatggtcgtttgtgactccgatataaggtacacatttgtcgttactgggtggcctggttcggtgcatgacactagagtgctacatgatacttttatcacgtacgggaataggttcctacatcctccagaaggtattagtataatctacttttgtagcatttccaattaatgttgttatgtaccccaacaggaagggatacctcgcatcttataatggtcaaaattaccatatttttgaatggcagcatgcgaggcaaccagttggtgccaaagaagttttcaactacgcacactcatccacgaggaatgttataaagcgatcatttggggtgctgaagataaagtggagaatccttctcaatctgcattcattttgactaaggaagcaatccaagataattaatgtatgcatggcgttgcataacttcattcaggacagtgttatacacgatcgcgactttgactagtatttatcttgtacgaggtatgtttatgatgtagctataggtgatagtagtaccaacacatcatatgagttagacatgagtgtttttagtgatgcaattgctaatgtgttagtgtcttatgtagttatctgaaccgataaataattatattataatggacaaatcatgtgtaattgcaatcagatgttgattattgtgtctgtctttttcttttttttcactcagaatctataatatcagaatttgcgtatctaaacacccagattgtaaccatcagcttctcccacagcagtccaaccaaacattcagccaacttttttccacaaccagcttattctcacgaccatattaaaaaaaagccgaaccaaacgtgacctatgattgctgctcactaagtgttacccaaatcgtcagagtgagggggaggcggagggtgaatgtgaacttccggatgtctccaattgcttctgatcctgtccactccattaccaagaatagcactccatgtatcttggagtagagggaggaggagggagctcagccagtcatctatggattggtgccccaaacaacaagaccggccgagagggaagagcggaggccggaggggtcagctcttgcacttgtcaggggaggctagtctaggctaggggatctctgattgcctcctatcctctcctagccctgccctgccgcagcgcaacgactccgaaatctgaatcgccgcctccctccgccattcgcgtcagtgacatctattccttcaattcattcagtcaggcgacagcccatgcccttcacacaatcaaaatcgaatgttggttacacaactggaaaaataacgcacaccccgcaacatactaggcacgtctttatctcggatcagtattcgggagtaagaacgacagcgcattgccaggatagaaatcgtcctgatgttcttcgtaagtctggcatttagaccaggctgacaatgtcagcttccgagttcaggattccataccagcaagtttcaccttcgcagcctgctgagaatgtaaatcagtttaagacctgtcgatgtggggagggagacccgaactccacttctgaaactggtgacagtccaccggcctcttgtcctaattgccaggtccttaagagtggacatttactactttcatctaaaggaattggatggacatcatggaaaaagcgctggtttgttcttacgagggcatccctagtgttcttcagaagcgaccctaatgtgccgccacccagaggagctgaaccaattgttacacttggtggaattgacttgaataattctggaagtgtcgtcatcaaagaagaaaggaaacttttgacagtgttctttcctgatggccatggtgaacgaactttcactctgaaggcagaaaccacaggagatctaaatgagtggagaaatgcactggagagtgctatagctcaggcacccagcatagcaaatacaatggggcaaaatccaatattcagcactgatgtagaagcagaatctgctgaatctccagctgaacattcggaggaccgttctgttattggcagacctgcaaaatttgcacttgtagatgctgatggtagtccatcattcttggagaaggccctgaagttcattgaagatcatgggatcaaggtagagggcatcctgcgtcagtctgctgatgttgaagaagtcaaacgcagaattagggattatgaaaaggggaaaaacgagttctctccagaagaggatgctcatgttattggtgactgtattaagtatgttcttcgagagatgccatcatctccagttcctgcatcatgttgcactgctctggttaaagcataccgaagtgacaaggcaagaagacttgatgagattaatagagtgataaatgaagttttcccagaaccaaatcgacaattgttgcagaggactcttaagatgatgcaagttgttgagtcacacaaagctgtgaatagaatgtctcaatctgctttggcagcttgcatggcaccactacttcttcgacctcttcttcttggagaatgtgacatagacaatgaatttagtatgggaggggatagttcattccagctacttcaagctgctgcggctgcgaatcatgcacaggctattgttattattatgatggaggaatttgatcagatatttgatgactcggaagaaggttcctgttcttcagatgcttatacggagtctgaggatgatgttgacaaggaatattccacagataatgacacccatgatgacgatggttcttatgattctggtgaagatgacattgaagaagatttggactactctgatgacagtgaacatgacagtaagatcaacgctaatatcaaggatggcaaggttaaaaacaatatctcagaaactgcagaagttgcacaggcagaggatacctctcctatggatatcaatagtcaatccaaccagaagcaagaatcatgtggaccgaatggatccaaagatcgtatactaagatcaacttctcgttcatcatcttccagagaaaaaactatggagaaatcatgcagttcagcacacaagggcaaaagaaccttatggggccgtacttcagcaagaaaagacctgtcaacagaggagattgaatgctgcagcgatgatgaggcccttgttgagaaacttgagagtaacaagattgatctccaatcaaaaattgcaaaggaggccaaagaaaatgcaatcctatggtcaagtctagaaaaacggaaagaagaactacatgagcgtcgtttagcacttgaaaaagaagttgaaaatttgagggaccagctgaagagggtgatgaatttgcgaagggggcaggtgtcctcgccttcaacaatagacagcaaggtcaggggccagcagctgtgctgtgaatcatgcaaccaacgtctcctaaatacagacaggcttagcggacctgaaagctcatcagtggaagcgtcaccgactgttgggagtgatcctgcatttgacatgggtgatatcgagcaatcaaggaagcaagccgcacagcattcgccttcttcaagagacaagccaagtcacgaggcggtcgggggcatcacccagagggctcctcaaagagggcattcgattgccagggagggccaagatgggtcgtcgtcgttgtcatcctctaattcgaagtggaatcttgcgcagaaacaatattcaaatagcccattgataagagggcttcatgtatccagcagactagaggatttcggtggaagcatatcaccagcagcgtcatcggcattagccaagctgacgaaccggctcaacttcctgaaagaacggagggcgctgctggcaagcgagatgcagagcttggatttgggtcggcccccaacagtgaagtccccaacaccaaaaggccatgaaagcaagaatagttgatgttagtctgttcctgtcgtgctcttctgaatgctagatagccttatgattaaaaccagcagtgtagtttgtgtgcatcccgttctcatccatgtagtgctgtctgtacatgtttccacaaaattctgctgcttcaaacttgcagatacatatagatacagattgaacgtgtcagctgctagtaggctgctttgttgaacacactacacaccaagcactagctgttctcattgctgaatggatcgtggctcaaagcactcttcactgatatacatagagagatggatctagtgatctggacatggtgacacattctaaagctcaaaatggctgtctgtccacataaaaacatggataacattgaaggtacaacaaagtgcagagatagctccctccagcattccaactaggataatagggagtctcaacaaagtgcagagttgtctcaggtctaaacttctcctagacgatagactagtagatatgctgctgctactgatctttcatcgggattcaggcatgatgatcctgacggccttgttcgcagtagccctattctcatcggagatggctccacattctgggagatcaaacttcctgtggctcagtaattctgcttccctggtggctcatggcttcaagctcctctagcatagatttctttgcggtccttaccatggattgaggggcaagcaccaaagatggccagagtccgaggctaatgtgatattatgatttatgcatctacagaaagagcaggtagcatgatttatgcatcatgccaaccaccattcactttcactggttatatggaacccagggataaaatgagatacaagcaggcttttatgaacgaaacagtttagtctgttggcaagtacatgtttagtacaaaagaaggatcagaaggaagttgaggaagaaacagttcgactgattaacatatattctttgtttttctcttgaatatgcaggagagttaaggacaaagaaagttgtgtatcattatattaaaaaaagaagaaagaacaagagcccatacaaacgaacacccactcaactcagaacatacaatgcgcctttaaaaaaacgaccaagaatcaactaggtcctcctgatatcaaacttcctctagaaccatgctgcggccaatctccagagtatgagctcctcaccggctagggacatagctcggtcgatggaaagggagaaaccatcaaacacacacctttttcgattggttccaaagaatccatacccctagaacaactagagaattaaggcattttctaacaggggcatgtgctgcagccagagttctttctcaccatgccaccactcatcaaaattttcttcccctagttttggacttaggttatgcagcctgactttttgtaaaagtctaaaccaaaatactcgagcaaagatgcaggagagaaacaagtgattaatagtttcctcagcttgatcacaaagtgggcacattggtgggtgcaggagtccacactttgcaagccgatgagctgtccaacacctatttctcacgacaagccacataaaaagcgacatttttcaggggcaatgcattccaaattctttcccaaaatctaaaggccacaatcctagaatataggttcttatagctagactttgtagattatttcctgtctggtgaaataaagagactaatatcattgattgtgccattgataaaaaggccaaatcacttgccttggctggtagcgaaataaatatgaagcattatttgaaagaaagacttgcccttttattaagagaagaggagattaagtggtatgaaagagcgaaggttaataacctattacaaggtgacaataatactcgcttttcccatctagttgccaatggtaaacaccgcaacaacacatcttcaaattagaacaggaagggtgagttttcatgggagatgataatttaaaggcatatataaagggttgtttggaccaccagagaataccaatataaccttggtggaagattatattgaagatatc

SEQ ID NO: 57707 - DNA, 6443 bp, Zea Mays
ccctggactacggagtctaggttttggccacatatcaaggactacatacgagcgatcgatggaagccactttcccgcctttgtccctttgtcaaagcaacccaaatatattggttgtcacgggtacgcataacagaatgtcatggtcgtttgtgactccgatataaggtacacatttgtcgttactgggtggcctggttcggtgcatgacactagagtgctacatgatacttttatcacgtacgggaataggttcctacatcctccagaaggtattagtataatctacttttgtagcatttccaattaatgttgttatgtaccccaacaggaagggatacctcgcatcttataatggtcaaaattaccatatttttgaatggcagcatgcgaggcaaccagttggtgccaaagaagttttcaactacgcacactcatccacgaggaatgttataaagcgatcatttggggtgctgaagataaagtggagaatccttctcaatctgcattcattttgactaaggaagcaatccaagataattaatgtatgcatggcgttgcataacttcattcaggacagtgttatacacgatcgcgactttgactagtatttatcttgtacgaggtatgtttatgatgtagctataggtgatagtagtaccaacacatcatatgagttagacatgagtgtttttagtgatgcaattgctaatgtgttagtgtcttatgtagttatctgaaccgataaataattatattataatggacaaatcatgtgtaattgcaatcagatgttgattattgtgtctgtctttttcttttttttcactcagaatctataatatcagaatttgcgtatctaaacacccagattgtaaccatcagcttctcccacagcagtccaaccaaacattcagccaacttttttccacaaccagcttattctcacgaccatattaaaaaaaagccgaaccaaacgtgacctatgattgctgctcactaagtgttacccaaatcgtcagagtgagggggaggcggagggtgaatgtgaacttccggatgtctccaattgcttctgatcctgtccactccattaccaagaatagcactccatgtatcttggagtagagggaggaggagggagctcagccagtcatctatggattggtgccccaaacaacaagaccggccgagagggaagagcggaggccggaggggtcagctcttgcacttgtcaggggaggctagtctaggctaggggatctctgattgcctcctatcctctcctagccctgccctgccgcagcgcaacgactccgaaatctgaatcgccgcctccctccgccattcgcgtcagtgacatctattccttcaattcattcagtcaggcgacagcccatgcccttcacacaatcaaaatcgaatgttggttacacaactggaaaaataacgcacaccccgcaacatactaggcacgtctttatctcggatcagtattcgggagtaagaacgacagcgcattgccaggatagaaatcgtcctgatgttcttcgtaagtctggcatttagaccaggctgacaatgtcagcttccgagttcaggattccataccagcaagtttcaccttcgcagcctgctgagaatgtaaatcagtttaagacctgtcgatgtggggagggagacccgaactccacttctgaaactggtgacagtccaccggcctcttgtcctaattgccaggtccttaagagtggacatttactactttcatctaaaggaattggatggacatcatggaaaaagcgctggtttgttcttacgagggcatccctagtgttcttcagaagcgacccttcactgacaacagcctacaagtttggcattctaataattcctagagttgaaatcagtgtgctgctgtacaatccaagtcattaccagaatgtgccgccacccagaggagctgaaccaattgttacacttggtggaattgacttgaataattctggaagtgtcgtcatcaaagaagaaaggaaacttttgacagtgttctttcctgatggccatggtgaacgaactttcactctgaaggcagaaaccacaggagatctaaatgagtggagaaatgcactggagagtgctatagctcaggcacccagcatagcaaatacaatggggcaaaatccaatattcagcactgatgtagaagcagaatctgctgaatctccagctgaacattcggaggaccgttctgttattggcagacctgcaaaatttgcacttgtagatgctgatggtagtccatcattcttggagaaggccctgaagttcattgaagatcatgggatcaaggtagagggcatcctgcgtcagtctgctgatgttgaagaagtcaaacgcagaattagggattatgaaaagggtgatttcttttgactaaaccttttcttttcttatctaggataactgtgtttggtgtttggcagtctttagttcaattaataaaataatctgtcttcttcagtatgttttcataaagatattttatgcgggccataataatgtgtgggaattgtatttttatttgctttgactgctttaccatcttctttgtactatataagacacatttaatttgtttttagggaaaaacgagttctctccagaagaggatgctcatgttattggtgactgtattaagtatgttcttcgagagatgccatcatctccagttcctgcatcatgttgcactgctctggttaaagcataccaaatcgtaggatgatcaaggctagtgttacacaggaagtgacaaggcaagaagacttgatgagattaatagagtgataaatgaagttttcccagaaccaaatcgacaattgttgcagaggactcttaagatgatgcaagttgttgagtcacacaaagctgtgaatagaatgtctcaatctgctttggcagcttgcatggcaccactacttcttcgacctcttcttcttggagaatgtgacatagacaatgaatttagtatgggaggggatagttcattccagctacttcaagctgctgcggctgcgaatcatgcacaggctattgttattattatgatggaggaatttgatcagatatttgatgtatcctctttttactggatccatttgaagtacttcgcgtagtcgttcatgagctataattcaactgattatcatacaggactcggaagaaggttcctgttcttcagatgcttatacggagtctgaggatgatgttgacaaggaatattccacagataatgacacccatgatgacgatggttcttatgattctggtgaagatgacattgaagaagatttggactactctgatgacagtgaacatgacagtaagatcaacgctaatatcaaggatggcaaggttaaaaacaatatctcagaaactgcaggtagtgataataatcagtatcttcaaccctcctataagagcaacaagagtagaaaatggtgcatcaagagaaaaaactatggagaaatcatgcagttcagcacacaagggcaaaagaaccttatggggccgtacttcagcaagaaaagacctgtcaacagaggagattgaatgctgcagcgatgatgaggcccttgttgagaaacttgagagtaacaagattgatctccaatcaaaaattgcaaaggaggccaaagaaaatgcaatcctatggtcaagtctagaaaaacggaaagaagaactacatgagcgtcgtttagcacttgaaaaagaagttgaaaatttgagggaccagctgaagagggtgatgaatttgcgaagggggcaggtgtcctcgccttcaacaatagacagcaaggtcaggggccagcagctgtgctgtgaatcatgcaaccaacgtctcctaaatacagacaggcttagcggacctgaaagctcatcagtggaagcgtcaccgactgttgggagtgatcctgcatttgacatgggtgatatcgagcaatcaaggaagcaagccgcacagcattcgccttcttcaagagacaagccaagtcacgaggcggtcgggggcatcacccagagggctcctcaaagagggcattcgattgccagggagggccaagatgggtcgtcgtcgttgtcatcctctaattcgaagtggaatcttgcgcagaaacaatattcaaatagcccattgataagagggcttcatgtatccagcagactagaggatttcggtggaagcatatcaccagcagcgtcatcggcattagccaagctgacgaaccggctcaacttcctgaaagaacggagggcgctgctggcaagcgagatgcagagcttggatttgggtcggcccccaacagtgaagtccccaacaccaaaaggccatgaaagcaagaatagttgatgttagtctgttcctgtcgtgctcttctgaatgctagatagccttatgattaaaaccagcagtgtagtttgtgtgcatcccgttctcatccatgtagtgctgtctgtacatgtttccacaaaattctgctgcttcaaacttgcagatacatatagatacagattgaacgtgtcagctgctagtaggctgctttgttgaacacactacacaccaagcactagctgttctcattgctgaatggatcgtggctcaaagcactcttcactgatatacatagagagatggatctagtgatctggacatggtgacacattctaaagctcaaaatggctgtctgtccacataaaaacatggataacattgaaggtacaacaaagtgcagagatagctccctccagcattccaactaggataatagggagtctcaacaaagtgcagagttgtctcaggtctaaacttctcctagacgatagactagtagatatgctgctgctactgatctttcatcgggattcaggcatgatgatcctgacggccttgttcgcagtagccctattctcatcggagatggctccacattctgggagatcaaacttcctgtggctcagtaattctgcttccctggtggctcatggcttcaagctcctctagcatagatttctttgcggtccttaccatggattgaggggcaagcaccaaagatggccagagtccgaggctaatgtgatattatgatttatgcatctacagaaagagcaggtagcatgatttatgcatcatgccaaccaccattcactttcactggttatatggaacccagggataaaatgagatacaagcaggcttttatgaacgaaacagtttagtctgttggcaagtacatgtttagtacaaaagaaggatcagaaggaagttgaggaagaaacagttcgactgattaacatatattctttgtttttctcttgaatatgcaggagagttaaggacaaagaaagttgtgtatcattatattaaaaaaagaagaaagaacaagagcccatacaaacgaacacccactcaactcagaacatacaatgcgcctttaaaaaaacgaccaagaatcaactaggtcctcctgatatcaaacttcctctagaaccatgctgcggccaatctccagagtatgagctcctcaccggctagggacatagctcggtcgatggaaagggagaaaccatcaaacacacacctttttcgattggttccaaagaatccatacccctagaacaactagagaattaaggcattttctaacaggggcatgtgctgcagccagagttctttctcaccatgccaccactcatcaaaattttcttcccctagttttggacttaggttatgcagcctgactttttgtaaaagtctaaaccaaaatactcgagcaaagatgcaggagagaaacaagtgattaatagtttcctcagcttgatcacaaagtgggcacattggtgggtgcaggagtccacactttgcaagccgatgagctgtccaacacctatttctcacgacaagccacataaaaagcgacatttttcaggggcaatgcattccaaattctttcccaaaatctaaaggccacaatcctagaatataggttcttatagctagactttgtagattatttcctgtctggtgaaataaagagactaatatcattgattgtgccattgataaaaaggccaaatcacttgccttggctggtagcgaaataaatatgaagcattatttgaaagaaagacttgcccttttattaagagaagaggagattaagtggtatgaaagagcgaaggttaataacctattacaaggtgacaataatactcgcttttcccatctagttgccaatggtaaacaccgcaacaacacatcttcaaattagaacaggaagggtgagttttcatgggagatgataatttaaaggcatatataaagggttgtttggaccaccagagaataccaatataaccttggtggaagattatattgaagatatc

SEQ ID NO: 57708 - DNA, 3854 bp, Zea Mays
atgtcagcttccgagttcaggattccataccagcaagtttcaccttcgcagcctgctgagaatgtaaatcagtttaagacctgtcgatgtggggagggagacccgaactccacttctgaaactggtgacagtccaccggcctcttgtcctaattgccaggtccttaagagtggacatttactactttcatctaaaggaattggatggacatcatggaaaaagcgctggtttgttcttacgagggcatccctagtgttcttcagaagcgacccttcactgacaacagcctacaagtttggcattctaataattcctagagttgaaatcagtgtgctgctgtacaatccaagtcattaccagaatgtgccgccacccagaggagctgaaccaattgttacacttggtggaattgacttgaataattctggaaggcagaaaccacaggagatctaaatgagtggagaaatgcactggagagtgctatagctcaggcacccagcatagcaaatacaatggggcaaaatccaatattcagcactgatgtagaagcagaatctgctgaatctccagctgaacattcggaggaccgttctgttattggcagacctgcaaaatttgcacttgtagatgctgatggtagtccatcattcttggagaaggccctgaagttcattgaagatcatgggaaaaacgagttctctccagaagaggatgctcatgttattggtgactgtattaaggactcggaagaaggttcctgttcttcagatgcttatacggagtctgaggatgatgttgacaaggaatattccacagataatgacacccatgatgacgatggttcttatgattctggtgaagatgacattgaagaagatttggactactctgatgacagtgaacatgacagtaagatcaacgctaatatcaaggatggcaaggttaaaaacaatatctcagaaactgcagaagttgcacaggcagaggatacctctcctatggatatcaatagtcaatccaaccagaagcaagaatcatgtggaccgaatggatccaaagatcgtatactaagatcaacttctcgttcatcatcttccagagaaaaaactatggagaaatcatgcagttcagcacacaagggcaaaagaaccttatggggccgtacttcagcaagaaaagacctgtcaacagaggagattgaatgctgcagcgatgatgaggcccttgttgagaaacttgagagtaacaagattgatctccaatcaaaaattgcaaaggaggccaaagaaaatgcaatcctatggtcaagtctagaaaaacggaaagaagaactacatgagcgtcgtttagcacttgaaaaagaagttgaaaatttgagggaccagctgaagagggtgatgaatttgcgaagggggcaggtgtcctcgccttcaacaatagacagcaaggtcaggggccagcagctgtgctgtgaatcatgcaaccaacgtctcctaaatacagacaggcttagcggacctgaaagctcatcagtggaagcgtcaccgactgttgggagtgatcctgcatttgacatgggtgatatcgagcaatcaaggaagcaagccgcacagcattcgccttcttcaagagacaagccaagatttcggtggaagcatatcaccagcagcgtcatcggcattagccaagctgacgaaccggctcaacttcctgaaagaacggagggcgctgctggcaagcgagatgcagagcttggatttgggtcggcccccaacagtgaagtccccaacaccaaaaggccatgaaagcaagaatagttgatgttagtctgttcctgtcgtgctcttctgaatgctagatagccttatgattaaaaccagcagtgtagtttgtgtgcatcccgttctcatccatgtagtgctgtctgtacatgtttccacaaaattctgctgcttcaaacttgcagatacatatagatacagattgaacgtgtcagctgctagtaggctgctttgttgaacacactacacaccaagcactagctgttctcattgctgaatggatcgtggctcaaagcactcttcactgatatacatagagagatggatctagtgatctggacatggtgacacattctaaagctcaaaatggctgtctgtccacataaaaacatggataacattgaaggtacaacaaagtgcagagatagctccctccagcattccaactaggataatagggagtctcaacaaagtgcagagttgtctcaggtctaaacttctcctagacgatagactagtagatatgctgctgctactgatctttcatcgggattcaggcatgatgatcctgacggccttgttcgcagtagccctattctcatcggagatggctccacattctgggagatcaaacttcctgtggctcagtaattctgcttccctggtggctcatggcttcaagctcctctagcatagatttctttgcggtccttaccatggattgaggggcaagcaccaaagatggccagagtccgaggctaatgtgatattatgatttatgcatctacagaaagagcaggtagcatgatttatgcatcatgccaaccaccattcactttcactggttatatggaacccagggataaaatgagatacaagcaggcttttatgaacgaaacagtttagtctgttggcaagtacatgtttagtacaaaagaaggatcagaaggaagttgaggaagaaacagttcgactgattaacatatattctttgtttttctcttgaatatgcaggagagttaaggacaaagaaagttgtgtatcattatattaaaaaaagaagaaagaacaagagcccatacaaacgaacacccactcaactcagaacatacaatgcgcctttaaaaaaacgaccaagaatcaactaggtcctcctgatatcaaacttcctctagaaccatgctgcggccaatctccagagtatgagctcctcaccggctagggacatagctcggtcgatggaaagggagaaaccatcaaacacacacctttttcgattggttccaaagaatccatacccctagaacaactagagaattaaggcattttctaacaggggcatgtgctgcagccagagttctttctcaccatgccaccactcatcaaaattttcttcccctagttttggacttaggttatgcagcctgactttttgtaaaagtctaaaccaaaatactcgagcaaagatgcaggagagaaacaagtgattaatagtttcctcagcttgatcacaaagtgggcacattggtgggtgcaggagtccacactttgcaagccgatgagctgtccaacacctatttctcacgacaagccacataaaaagcgacatttttcaggggcaatgcattccaaattctttcccaaaatctaaaggccacaatcctagaatataggttcttatagctagactttgtagattatttcctgtctggtgaaataaagagactaatatcattgattgtgccattgataaaaaggccaaatcacttgccttggctggtagcgaaataaatatgaagcattatttgaaagaaagacttgcccttttattaagagaagaggagattaagtggtatgaaagagcgaaggttaataacctattacaaggtgacaataatactcgcttttcccatctagttgccaatggtaaacaccgcaacaacacatcttcaaattagaacaggaagggtgagttttcatgggagatgataatttaaaggcatatataaagggttgtttggaccaccagagaataccaatataaccttggtggaagattatattgaagatatc

SEQ ID NO: 57709 - DNA, 1461 bp, Zea Mays
attgttggagatagcctaagcatctcctgttcgcgtcccctctctctcgttcagttctttctcccttcccatgtcttcctctgattccccacgctaacaattggtatcagattcgccgttccttggcgattctcaatctggagcacggctacttcacgcgttcgcagcgacgcgcgggtgtgatggatcccaatgtcctgttcatcgttgatgagatggagaagtttgcatctatggatgtcaagtgggagaagcgcttgtcggagctggtggcagctaaggaggagcgcctgatctccctcgagcgcgtcagcggggagttggaagcatggtagcccacggtggatgtagcgatggatgataccaagttgcagctccgcaaggtgaatctgcagttggatcatgccgttctggaggcggctggcggagattctagtctgttggggaaaccggatccatccttcggcaaatcggggtcgatcctgcatcaggaggatccgatcagtgaggatttcactctaggcgctccgattccgggtacttctggtgccgcgaaggttgacagcttatgaagcagcgcatgatcctttgtactttaccacacgatttgtggatgggctccgaggtgacatacgtgccgttgtggtgattcattgaccaacagatttagacacagcatgcactttagcattgttgtaggaagaagtatctgaaccagcccatcggaaagaggtgcgcaagtttgagatgactccttggagcaaaaccacaacatctggcccactgtcgttaccgatgccactaggggttgacaagggtgttcggtctccatctcagcttgagaaacctgtggggagacctcaacgtcctgccgaagataagatgggagcacttcgagcttatcgtcgtgctaggggtctgtgtgataggtgtgccgagaagtgtgtcacacccggttttggaaggcaaaccgaatgtgaaacatgtacgtgacaggatcagaaactcacgtacacagtgattatataattggacgtcatcacacaatgctcaaagtaaatagcggaagagtattttattacaacaagatgtctgttgggggtatgcttcgtagccgaagatcctgaagaaagaaacaccttcagcagatcctctcaaaagcagtgctgaagctatcacctataaagctttggcatagcgacatgtctcaagacgaaggagtgaaccgacttaaagatgaaatgaccaataaacccatgatagtttgtgtcatgactgtaatcgattgtaaagggcttaaatgtaatttcacacaggctacgccctgtgcttataaatagatgaacagtacacccgtactgttcacgcaatcttgtaatcacttgcacgcgacatttgaattattgtcttctgtcaagacgaaagtataaatgcgattaaatgttatgttttaatatttaa

SEQ ID NO: 57710 - DNA, 1221 bp, Zea Mays
agggtgttacaacttcgccgcccattccatccgccgcccttagctccctccacggcggacctaggccccctatgtggcgcctgaccggaaaggagcaagcctcctcagtgctcgatctcggccccctctgcggcaagggaccaggagctggtccggtccgcgctccggctgcctccagctagtttgtgccctgtgctccagacgcctccggcctgtcagctgacgcctcacacttcgccgcccactgcccctccaccccggtcgtctacgcccatctaccgcccttagccccattcatcgctacccactccctcccaactccctccgaggctgatctgtgtccccgccaacaaacttgtgttgcatcccgtcgtcgaccctgctcgccgtcatcgtatttttgtctgatactgaattagctgtgatttggttcttttacttgttttcctttgtcgaatcaggaaaagagggaggaatacttgtgaatgcaacccttctatctacattagatggcaccgtgaattagcaatgattgcaatctatctacattgacattactgatcatctattgttttctgtcctgtaatatgttgccatgaaaaatatgtgtcctgtaacctgaaatatttgatatagtttgtgtgtatccttatctataccttaaattatttgtgtttgtagcatggattcacacatgtcaccggcaagtggctcctccgatagaggacaaggatggcctaggtatggtccggtgccgctaattcgctgccccaagtgcgaaaggccagagtcgctcatgagacttagatcgaaaaggtcaagatgattgaacgggctaggttaatgggtgactcgggggagatgatggcgtctaatatgtgtaacgaacgaacggcggcaaatagggcagatatgactacaaactgggacacatttgctgccgaactgaagaagatgaatttgctaccaaactgaagaagatgaatgacaacttgagcgagttgaagaagatgtttggagccttttatgcttctatgatttttaccgtcttgcttttcttcgtgatgaactataattgtaagcaccaaatgtgagggtacccctaaatgtgatggtggatctgtgatgaacattggtgatgatggtctatgatgaaactatgaaaatttgtgatgatgaatgtgtggacaaaaatgtgtgaattttagtgtgatgaggttg

SEQ ID NO: 57711 - DNA, 1123 bp, Zea Mays
agggtgttacaacttcgccgcccattccatccgccgcccttagctccctccacggcggacctaggccccctatgtggcgcctgaccggaaaggagcaagcctcctcagtgctcgatctcggccccctctgcggcaagggaccaggagctggtccggtccgcgctccggctgcctccagctagtttgtgccctgtgctccagacgcctccggcctgtcagctgacgcctcacacttcgccgcccactgcccctccaccccggtcgtctacgcccatctaccgcccttagccccattcatcgctacccactccctcccaactccctccgaggctgatctgtgtccccgccaacaaacttgtgttgcatcccgtcgtcgaccctgctcgccgtcatccatggattcacacatgtcaccggcaagtggctcctccgatagaggacaaggatggcctaggtatggtccggtgccgctaattcgctgccccaagtgcgaaaggccagagtcgctcatgagacttagatcgaaaaggtgggagaacgacaactttggtcaagagttcgtgaagtgtgagaacaagccataccaagataaagtttggtcgtgtttttgcccattacggttgatttcattgtttgtgattatttatgaactatgaaaccctatttggattgtttaggttctcaaaaaatgcaatttttcatgtggatggacgattaggtcaagatgattgaacgggctaggttaatgggtgactcgggggagatgatggcgtctaatatgtgtaacgaacgaacggcggcaaatagggcagatatgactacaaactgggacacatttgctgccgaactgaagaagatgaatttgctaccaaactgaagaagatgaatgacaacttgagcgagttgaagaagatgtttggagccttttatgcttctatgatttttaccgtcttgcttttcttcgtgatgaactataattgtaagcaccaaatgtgagggtacccctaaatgtgatggtggatctgtgatgaacattggtgatgatggtctatgatgaaactatgaaaatttgtgatgatgaatgtgtggacaaaaatgtgtgaattttagtgtgatgaggttg

SEQ ID NO: 57712 - DNA, 1897 bp, Zea Mays
tgtatacactcttcaatcagtgtaggtattagtatgtggtaaggattaaagatagccacaaggactgaaaaggaaggggacacacacacgctcccagcagcatctttaattatttacacagggaaaagaaaaaaggttgtcaatctagctagctactccagttagctacaaaagctaaccatagcagtgtgtgcagtggtctctctcttgctcgccggccagtataattgatccgtggtgcggccggccggcgtcgtacgtcgtccatggccatccaccacccgcacctcctcgacttctcgccgcctccgaacacggtggccatggaggaggcgccgcccccaccccacttcgaccacggcctcctcgggctccatgtcgatggcatgcctcatcgcgtcctcgccgacgacgcgccggtggcggcatgggcgccgcaggccgtggtctcccactccctgtacggatacgataacacagcagcgggggcgtcgtcgctgtttggccaccatgaggcatcagaggcccagttctccgtgcttccgccggcagcgtcgtcgtttgcactactacctaaccaccaccaccagcagcagctgccgacgacgacggcggcgtcgagcatgcagcagccgttccagctgaggagctccaagtacctgggtcctgcgcaggagctgctcgccgagttctgcagcctggaaggggacctgctgcacgccacgaacaagcagggagcttccggagcagcagcaggtaacagcaggtgggacgacgtggagacgtcgtcgtcttcttctgctggcctctgggggcacctgtccctgagctccatggatctcctggagctcgagaggaggaaggccaggctcttgtccatggttgaagaggtggaccggcggtaccggcgataccgcgagcagatgaggtcagtggaggtgtcgttcgaggcggtggccggagccggcgcgtcgcaggtgtacacgcggctggcgctgcgggccatgtcgcggcacttccggtgcctgcgggatgcgctggtggcgcaggtgcgcgctctgcggaaggccatgggggagagggacggcggcccagctggtgcggcggcgggcgccaccaagggcgacacgcccaggctcaaggtgttggaccagtgcctgcggcagcagcgggcgttccagcacccgggcaccatcgacaactacccgtggcggccccagcgcggcctgccggagcgcgccgtcgccgtcctccgagcctggctcttcgaacacttcctccacccgtatccgaacgatgtggacaagcacattctagcgcgccagacaggactgtcaagaagccagggtgaggctgtggaagccgatgatagaggagatgtacacggaagaagtgaacccgaaaccggccgacgacacaagccaaaaccctagcgccggtggcggcgtcggcgtcggcgtcgccatcaaacctgagcagcaggtgagcacagctgcggcgggagccaccatcggaggcggcggcggcgaccatctgttcggtcctagttatcccagcatgtacgggagccacggcggcgccgtgtcgcttaccctagggctccagcagcagccgtttgcgtcgacgatgatgcaccagcgacgaccactgatgacgtttcaaggtgacgagcaagagccggcgctgccgtacagagaccttatgggctctcagttgctgcatcatttcgctgggtagcttgttacctacacatgcttgctagctagctaggagggtgggtatacggtggctaaatttttatatatattaaagacaaggtaaattttgtttaaatttcttgtcgactaaacgatcgatatatataccaaattaagcacacagattgtttaaatgctgg

SEQ ID NO: 57713 - DNA, 2756 bp, Zea Mays
cattagggtctggccagtcccgctgccgccccctccgcctctctcggccgtagtcgcaacgctgtgtcacgccgcacatggcgaagcgcccgcgccacgccggaaacggcgccggccgctcccagctggcgtcattcgagcggaagcttcacgacctcatactcaacggcggcctagcaggccccggcgcctccgccgaggacatcgccaacaccctccgcatccaccaccctaagttccgccgcctgaagcacggccccttctttgcctccgtccgccgcgctctcacctccatccccatcccctcctcctccgatgacgacggctcctccgcctcccgctgccgccacgacgcccacaccacctcctccgcctccgtctccgacgccgccgcccacccgtcgccaccggcccccgccttcgacgttaccaagtccacgctcttctcccattacgccgctcagacgcgcaagcggaaccaaaaccagcagctggagatcgaggtcacagcggagaagccgcgccgcctcatcacggccgaaggcggtggcggtggcgacgcgaagcccgaggccgtcccggctgctgaagggttttgcagagaggacaagggacccaggttcgccgacctcggcgggatggaggcggtgatcgaggagctcatgatggaggtggtcgtgcccctgtgccatccgaagctgccgcaccgccttggagtcagacctgtcgcggggctgctgctgcacggaccacccggctgcggaaagaccacccttgcccatgccatcgctattgagactggcgtgctgttctacaagatatctgcaccggaagttgtatctggggtgtctggagcttctgaggaaaacatcagaggcctgtttcagaaggcctatcggactgctccctcgattgtattcattgatgagatagatgcaattgcatccaagagggagaatctgcaacgagagatggagcgacgaatagttactcaattaatgacatgcatggatcaataccaccagaatattggatcggacactggcaatttggatgctgaatcatctgaatagaaacctggttatgttattgtaattggagccacaaataggcctgatgctgtggaccaagctctgcgaaggccaggaaggtttgatcgagagatatctcttggtgttccagatgagaatgcacgaaaacaaatactgaagatgcttactcagcatcttcgacttgaaggcgaatttgacttgttcaagatagctagagcgacacaaggttttgttggtgctgacttgaaggcattagtggataaagcagggaatcttgcaatgaagagaataattgataaaagaagaattcactatcgccgtgagcatgacgggaatagcaagcatgactggtggaggcaaccttgggatgaaagtgaggtggagggcctacatattactatggatgactttgaggaagcaacaaaaatggttcaaccatctttgagaagagaagggttttcttctgttcctgatgtcacttgggatgatgttggcggtcttgattcattaagaaaagagtttgaccgctgcattattcgttgtatcaagaaccctgaagactatgaggtatttggagtgaatatgcaagctggcttcctgctgttcggtcctcctggttgcgggaaaacactaatagcaaaagcagtggcacatgaggcaggagccaattttattcatataaaggggcctgagctattgaacaagtatgttggggagagtgaatcagaagttaggaaaatattcactcgtgcacgtactaactctccatgcatcctattttttgatgaggttgatgctttgacaacaaaaagagggaaagagggaggatgggttgttgaacgtctcttaaatcagttacttatcgaacttgatggtgctgatcaacgacaaggtgtctatgtgataggagctacgaacagctcctttctggtgtaggattgatgtgatagatgatgctgttctacggcctggtagatttggaaagaaacattatgtacctttacctggtgcacacgagcgggtttcaatattaaaagcacatgctcgcagcaagcccatctcgaccgatgttcatttggatgcacttgcacgtcgtgccgagtgcaacaatctcactggtgctgacctagcatcactggtcaatgaagcagccatggcagcattggaagagcgattagagttcattgagaacgggacatcctcaatgggttcatcttgtttgattaagctctcacactttgagcgtgctctatcgaagatcaagccatcagtatctgaacagcaaattaaatattacgaggcgttgtcaaagagatactcgtcaaactgaggcaaatttttgtatggccttaagatacattatacaaggatgagtagtaccacaaatatgtcgcagttaatgctatcgaaggcctccagtcgtggagcgcattcccccagtgtgctggtgtctgtccgattaaacttgctccctggtttggttgaatggtgatcaaacttactggtttggttgagtgatataaagtttgcagcaggtttaaacattaaaatgcagatgatagacgatatatgagtcactggatttagaaatttatatgaaggtcatagatggattgctaattttagatttcaagtaaaatcgtatcatacatattgttaagttgtagagggagctgtatgtgctttgtataatgtggatttatg

SEQ ID NO: 57714 - DNA, 3163 bp, Zea Mays
gtctggccagtcccgctgccgccccctccgcctctctcggccgtagtcgcaacgctgtgtcacgccgcacatggcgaagcgcccgcgccacgccggaaacggcgccggccgctcccagctggcgtcattcgagcggaagcttcacgacctcatactcaacggcggcctagcaggccccggcgcctccgccgaggacatcgccaacaccctccgcatccaccaccctaagttccgccgcctgaagcacggccccttctttgcctccgtccgccgcgctctcacctccatccccatcccctcctcctccgatgacgacggctcctccgcctcccgctgccgccacgacgcccacaccacctcctccgcctccgtctccgacgccgccgcccacccgtcgccaccggcccccgccttcgacgttaccaagtccacgctcttctcccattacgccgctcagacgcgcaagcggaaccaaaaccagcagctggagatcgaggtcacagcggagaagccgcgccgcctcatcacggccgaaggcggtggcggtggcgacgcgaagcccgaggccgtcccggctgctgaagggttttgcagagaggacaagggacccaggttcgccgacctcggcgggatggaggcggtgatcgaggagctcatgatggaggtggtcgtgcccctgtgccatccgaagctgccgcaccgccttggagtcagacctgtcgcggggctgctgctgcacggaccacccggctgcggaaagaccacccttgcccatgccatcgctattgagactggcgtgctgttctacaagatatctgcaccggaagttgtatctggggtgtctggagcttctgaggaaaacatcagaggcctgtttcagaaggcctatcggactgctccctcgattgtattcattgatgagatagatgcaattgcatccaagagggagaatctgcaacgagagatggagcgacgaatagttactcaattaatgacatgcatggatcaataccaccagaatattggatcggacactggcaatttggatgctgaatcatctgaatagaaacctggttatgttattgtaattggagccacaaataggcctgatgctgtggaccaagctctgcgaaggccaggaaggtttgatcgagagatatctcttggtgttccagatgagaatgcacgaaaacaaatactgaagatgcttactcagcatcttcgacttgaaggcgaatttgacttgttcaagatagctagagcgacacaaggttttgttggtgctgacttgaaggcattagtggataaagcagggaatcttgcaatgaagagaataattgataaaagaagaattcactatcgccgtgagcatgacgggaatagcaagcatgactggtggaggcaaccttgggatgaaagtgaggtggagggcctacatattactatggatgactttgaggaagcaacaaaaatggttcaaccatctttgagaagagaagggttttcttctgttcctgatgtcacttgggatgatgttggcggtcttgattcattaagaaaagagtttgaccgctgcattattcgttgtatcaagaaccctgaagactatgaggtatttggagtgaatatgcaagctggcttcctgctgttcggtcctcctggttgcgggaaaacactaatagcaaaagcagtggcacatgaggcaggagccaattttattcatataaaggggcctgagctattgaacaagtatgttggggagagtgaatcagaagttaggaaaatattcactcgtgcacgtactaactctccatgcatcctattttttgatgaggttgatgctttgacaacaaaaagagggaaagagggaggatgggttgttgaacgtctcttaaatcagttacttatcgaacttgatggtgctgatcaacgacaaggtgtctatgtgataggagctacgaacagctcctttctggtgtaggattgatgtgatagatgatgctgttctacggcctggtagatttggaaagaaacattatgtacctttacctggtgcacacgagcgggtttcaatattaaaagcacatgctcgcagcaagcccatctcgaccgatgttcatttggatgcacttgcacgtcgtgccgagtgcaacaatctcactggtgctgacctagcatcactggtaatatttgtgatatatcatcgaaccattcttttggaagttgtccaaacacaagcactagtgcttcttcagtttgcagaatgtagcattgttttctctctctcgtattgttaccttttgctttgcattgagatgggtgctggtgaattcaacctgacttagttgacaagctagctgcatcgtaataattaatagcagcgcttctttcatcgggtcaacgaagcacttgcagaacgttttaccaaaaaagagagagagagaagggagtgatgtgcttctttcaccaggtcaatgaagcagccatggcagcattggaagagcgattagagttcattgagaacgggacatcctcaatgggttcatcttgtttgattaagctctcacactttgagcgtgctctatcgaagatcaagccatcagtatctgaacagcaaattaaatattacgaggcgttgtcaaagagatactcgtcaaactgaggtatcaccacgtctccatgactcccatccatggttcgtcagtggttgcagctttgtatttttggtggtggtgaatggtgatgaaattctacagttgtagaaatcattttaggttttgctgcctacaggcaaatttttgtatggccttaagatacattatacaaggatgagtagtaccacaaatatgtcgcagttaatgctatcgaaggcctccagtcgtggagcgcattcccccagtgtgctggtgtctgtccgattaaacttgctccctggtttggttgaatggtgatcaaacttactggtttggttgagtgatataaagtttgcagcaggtttaaacattaaaatgcagatgatagacgatatatgagtcactggatttagaaatttatatgaaggtcatagatggattgctaattttagatttcaagtaaaatcgtatcatacatattgttaagttgtagagggagctgtatgtgctttgtataatgtggatttatg

SEQ ID NO: 57715 - DNA, 3143 bp, Zea Mays
gtctggccagtcccgctgccgccccctccgcctctctcggccgtagtcgcaacgctgtgtcacgccgcacatggcgaagcgcccgcgccacgccggaaacggcgccggccgctcccagctggcgtcattcgagcggaagcttcacgacctcatactcaacggcggcctagcaggccccggcgcctccgccgaggacatcgccaacaccctccgcatccaccaccctaagttccgccgcctgaagcacggccccttctttgcctccgtccgccgcgctctcacctccatccccatcccctcctcctccgatgacgacggctcctccgcctcccgctgccgccacgacgcccacaccacctcctccgcctccgtctccgacgccgccgcccacccgtcgccaccggcccccgccttcgacgttaccaagtccacgctcttctcccattacgccgctcagacgcgcaagcggaaccaaaaccagcagctggagatcgaggtcacagcggagaagccgcgccgcctcatcacggccgaaggcggtggcggtggcgacgcgaagcccgaggccgtcccggctgctgaagggttttgcagagaggacaagggacccaggttcgccgacctcggcgggatggaggcggtgatcgaggagctcatgatggaggtggtcgtgcccctgtgccatccgaagctgccgcaccgccttggagtcagacctgtcgcggggctgctgctgcacggaccacccggctgcggaaagaccacccttgcccatgccatcgctattgagactggcgtgctgttctacaagatatctgcaccggaagttgtatctggggtgtctggagcttctgaggaaaacatcagaggcctgtttcagaaggcctatcggactgctccctcgattgtattcattgatgagatagatgcaattgcatccaagagggagaatctgcaacgagagatggagcgacgaatagttactcaattaatgacatgcatggatcaataccaccagaatattggatcggacactggcaatttggatgctgaatcatctgaatagaaacctggttatgttattgtaattggagccacaaataggcctgatgctgtggaccaagctctgcgaaggccaggaaggtttgatcgagagatatctcttggtgttccagatgagaatgcacgaaaacaaatactgaagatgcttactcagcatcttcgacttgaaggcgaatttgacttgttcaagatagctagagcgacacaaggttttgttggtgctgacttgaaggcattagtggataaagcagggaatcttgcaatgaagagaataattgataaaagaagaattcactatcgccgtgagcatgacgggaatagcaagcatgactggtggaggcaaccttgggatgaaagtgaggtggagggcctacatattactatggatgactttgagcaacaaaaatggttcaaccatctttgagaagagaagggttttcttctgttcctgatgtcacttgggatgatgttggcggtcttgattcattaagaaaagagtttgaccgctgcattattcgttgtatcaagaaccctgaagactatgaggtatttggagtgaatatgcaagctggcttcctgctgttcggtcctcctggttgcgggaaaacactaatagcaaaagcagtggcacatgaggcaggagccaattttattcatataaaggggcctgagctattgaacaagtatgttggggagagtgaatcagaagttaggaaaatattcactcgtgcacgtactaactctccatgcatcctattttttgatgaggttgatgctttgacaacaaaaagagggaaagagggaggatgggttgttgaacgtctcttaaatcagttacttatcgaacttgatggtgctgatcaacgacaaggtgtctatgtgataggagctacgaacaggattgatgtgatagatgatgctgttctacggcctggtagatttggaaagaaacattatgtacctttacctggtgcacacgagcgggtttcaatattaaaagcacatgctcgcagcaagcccatctcgaccgatgttcatttggatgcacttgcacgtcgtgccgagtgcaacaatctcactggtgctgacctagcatcactggtaatatttgtgatatatcatcgaaccattcttttggaagttgtccaaacacaagcactagtgcttcttcagtttgcagaatgtagcattgttttctctctctcgtattgttaccttttgctttgcattgagatgggtgctggtgaattcaacctgacttagttgacaagctagctgcatcgtaataattaatagcagcgcttctttcatcgggtcaacgaagcacttgcagaacgttttaccaaaaaagagagagagagaagggagtgatgtgcttctttcaccaggtcaatgaagcagccatggcagcattggaagagcgattagagttcattgagaacgggacatcctcaatgggttcatcttgtttgattaagctctcacactttgagcgtgctctatcgaagatcaagccatcagtatctgaacagcaaattaaatattacgaggcgttgtcaaagagatactcgtcaaactgaggtatcaccacgtctccatgactcccatccatggttcgtcagtggttgcagctttgtatttttggtggtggtgaatggtgatgaaattctacagttgtagaaatcattttaggttttgctgcctacaggcaaatttttgtatggccttaagatacattatacaaggatgagtagtaccacaaatatgtcgcagttaatgctatcgaaggcctccagtcgtggagcgcattcccccagtgtgctggtgtctgtccgattaaacttgctccctggtttggttgaatggtgatcaaacttactggtttggttgagtgatataaagtttgcagcaggtttaaacattaaaatgcagatgatagacgatatatgagtcactggatttagaaatttatatgaaggtcatagatggattgctaattttagatttcaagtaaaatcgtatcatacatattgttaagttgtagagggagctgtatgtgctttgtataatgtggatttatg

SEQ ID NO: 57716 - DNA, 2856 bp, Zea Mays
gtctggccagtcccgctgccgccccctccgcctctctcggccgtagtcgcaacgctgtgtcacgccgcacatggcgaagcgcccgcgccacgccggaaacggcgccggccgctcccagctggcgtcattcgagcggaagcttcacgacctcatactcaacggcggcctagcaggccccggcgcctccgccgaggacatcgccaacaccctccgcatccaccaccctaagttccgccgcctgaagcacggccccttctttgcctccgtccgccgcgctctcacctccatccccatcccctcctcctccgatgacgacggctcctccgcctcccgctgccgccacgacgcccacaccacctcctccgcctccgtctccgacgccgccgcccacccgtcgccaccggcccccgccttcgacgttaccaagtccacgctcttctcccattacgccgctcagacgcgcaagcggaaccaaaaccagcagctggagatcgaggtcacagcggagaagccgcgccgcctcatcacggccgaaggcggtggcggtggcgacgcgaagcccgaggccgtcccggctgctgaagggttttgcagagaggacaagggacccaggttcgccgacctcggcgggatggaggcggtgatcgaggagctcatgatggaggtggtcgtgcccctgtgccatccgaagctgccgcaccgccttggagtcagacctgtcgcggggctgctgctgcacggaccacccggctgcggaaagaccacccttgcccatgccatcgctattgagactggcgtgctgttctacaagatatctgcaccggaagttgtatctggggtgtctggagcttctgaggaaaacatcagaggcctgtttcagaaggcctatcggactgctccctcgattgtattcattgatgagatagatgcaattgcatccaagagggagaatctgcaacgagagatggagcgacgaatagttactcaattaatgacatgcatggatcaataccaccagaatattggatcggacactggcaatttggatgctgaatcatctgaatagaaacctggttatgttattgtaattggagccacaaataggcctgatgctgtggaccaagctctgcgaaggccaggaaggtttgatcgagagatatctcttggtgttccagatgagaatgcacgaaaacaaatactgaagatgcttactcagcatcttcgacttgaaggcgaatttgacttgttcaagatagctagagcgacacaaggttttgttggtgctgacttgaaggcattagtggataaagcagggaatcttgcaatgaagagaataattgataaaagaagaattcactatcgccgtgagcatgacgggaatagcaagcatgactggtggaggcaaccttgggatgaaagtgaggtggagggcctacatattactatggatgactttgagcaacaaaaatggttcaaccatctttgagaagagaagggttttcttctgttcctgatgtcacttgggatgatgttggcggtcttgattcattaagaaaagagtttgaccgctgcattattcgttgtatcaagaaccctgaagactatgaggtatttggagtgaatatgcaagctggcttcctgctgttcggtcctcctggttgcgggaaaacactaatagcaaaagcagtggcacatgaggcaggagccaattttattcatataaaggggcctgagctattgaacaagtatgttggggagagtgaatcagaagttaggaaaatattcactcgtgcacgtactaactctccatgcatcctattttttgatgaggttgatgctttgacaacaaaaagagggaaagagggaggatgggttgttgaacgtctcttaaatcagttacttatcgaacttgatggtgctgatcaacgacaaggtgtctatgtgataggagctacgaacaggattgatgtgatagatgatgctgttctacggcctggtagatttggaaagaaacattatgtacctttacctggtgcacacgagcgggtttcaatattaaaagcacatgctcgcagcaagcccatctcgaccgatgttcatttggatgcacttgcacgtcgtgccgagtgcaacaatctcactggtgctgacctagcatcactggtcaatgaagcagccatggcagcattggaagagcgattagagttcattgagaacgggacatcctcaatgggttcatcttgtttgattaagctctcacactttgagcgtgctctatcgaagatcaagccatcagtatctgaacagcaaattaaatattacgaggcgttgtcaaagagatactcgtcaaactgaggtatcaccacgtctccatgactcccatccatggttcgtcagtggttgcagctttgtatttttggtggtggtgaatggtgatgaaattctacagttgtagaaatcattttaggttttgctgcctacaggcaaatttttgtatggccttaagatacattatacaaggatgagtagtaccacaaatatgtcgcagttaatgctatcgaaggcctccagtcgtggagcgcattcccccagtgtgctggtgtctgtccgattaaacttgctccctggtttggttgaatggtgatcaaacttactggtttggttgagtgatataaagtttgcagcaggtttaaacattaaaatgcagatgatagacgatatatgagtcactggatttagaaatttatatgaaggtcatagatggattgctaattttagatttcaagtaaaatcgtatcatacatattgttaagttgtagagggagctgtatgtgctttgtataatgtggatttatg

SEQ ID NO: 57717 - DNA, 3159 bp, Zea Mays
gtctggccagtcccgctgccgccccctccgcctctctcggccgtagtcgcaacgctgtgtcacgccgcacatggcgaagcgcccgcgccacgccggaaacggcgccggccgctcccagctggcgtcattcgagcggaagcttcacgacctcatactcaacggcggcctagcaggccccggcgcctccgccgaggacatcgccaacaccctccgcatccaccaccctaagttccgccgcctgaagcacggccccttctttgcctccgtccgccgcgctctcacctccatccccatcccctcctcctccgatgacgacggctcctccgcctcccgctgccgccacgacgcccacaccacctcctccgcctccgtctccgacgccgccgcccacccgtcgccaccggcccccgccttcgacgttaccaagtccacgctcttctcccattacgccgctcagacgcgcaagcggaaccaaaaccagcagctggagatcgaggtcacagcggagaagccgcgccgcctcatcacggccgaaggcggtggcggtggcgacgcgaagcccgaggccgtcccggctgctgaagggttttgcagagaggacaagggacccaggttcgccgacctcggcgggatggaggcggtgatcgaggagctcatgatggaggtggtcgtgcccctgtgccatccgaagctgccgcaccgccttggagtcagacctgtcgcggggctgctgctgcacggaccacccggctgcggaaagaccacccttgcccatgccatcgctattgagactggcgtgctgttctacaagatatctgcaccggaagttgtatctggggtgtctggagcttctgaggaaaacatcagaggcctgtttcagaaggcctatcggactgctccctcgattgtattcattgatgagatagatgcaattgcatccaagagggagaatctgcaacgagagatggagcgacgaatagttactcaattaatgacatgcatggatcaataccaccagaatattggatcggacactggcaatttggatgctgaatcatctgaatagaaacctggttatgttattgtaattggagccacaaataggcctgatgctgtggaccaagctctgcgaaggccaggaaggtttgatcgagagatatctcttggtgttccagatgagaatgcacgaaaacaaatactgaagatgcttactcagcatcttcgacttgaaggcgaatttgacttgttcaagatagctagagcgacacaaggttttgttggtgctgacttgaaggcattagtggataaagcagggaatcttgcaatgaagagaataattgataaaagaagaattcactatcgccgtgagcatgacgggaatagcaagcatgactggtggaggcaaccttgggatgaaagtgaggtggagggcctacatattactatggatgactttgagcaacaaaaatggttcaaccatctttgagaagagaagggttttcttctgttcctgatgtcacttgggatgatgttggcggtcttgattcattaagaaaagagtttgaccgctgcattattcgttgtatcaagaaccctgaagactatgaggtatttggagtgaatatgcaagctggcttcctgctgttcggtcctcctggttgcgggaaaacactaatagcaaaagcagtggcacatgaggcaggagccaattttattcatataaaggggcctgagctattgaacaagtatgttggggagagtgaatcagaagttaggaaaatattcactcgtgcacgtactaactctccatgcatcctattttttgatgaggttgatgctttgacaacaaaaagagggaaagagggaggatgggttgttgaacgtctcttaaatcagttacttatcgaacttgatggtgctgatcaacgacaaggtgtctatgtgataggagctacgaacagctcctttctggtgtaggattgatgtgatagatgatgctgttctacggcctggtagatttggaaagaaacattatgtacctttacctggtgcacacgagcgggtttcaatattaaaagcacatgctcgcagcaagcccatctcgaccgatgttcatttggatgcacttgcacgtcgtgccgagtgcaacaatctcactggtgctgacctagcatcactggtaatatttgtgatatatcatcgaaccattcttttggaagttgtccaaacacaagcactagtgcttcttcagtttgcagaatgtagcattgttttctctctctcgtattgttaccttttgctttgcattgagatgggtgctggtgaattcaacctgacttagttgacaagctagctgcatcgtaataattaatagcagcgcttctttcatcgggtcaacgaagcacttgcagaacgttttaccaaaaaagagagagagagaagggagtgatgtgcttctttcaccaggtcaatgaagcagccatggcagcattggaagagcgattagagttcattgagaacgggacatcctcaatgggttcatcttgtttgattaagctctcacactttgagcgtgctctatcgaagatcaagccatcagtatctgaacagcaaattaaatattacgaggcgttgtcaaagagatactcgtcaaactgaggtatcaccacgtctccatgactcccatccatggttcgtcagtggttgcagctttgtatttttggtggtggtgaatggtgatgaaattctacagttgtagaaatcattttaggttttgctgcctacaggcaaatttttgtatggccttaagatacattatacaaggatgagtagtaccacaaatatgtcgcagttaatgctatcgaaggcctccagtcgtggagcgcattcccccagtgtgctggtgtctgtccgattaaacttgctccctggtttggttgaatggtgatcaaacttactggtttggttgagtgatataaagtttgcagcaggtttaaacattaaaatgcagatgatagacgatatatgagtcactggatttagaaatttatatgaaggtcatagatggattgctaattttagatttcaagtaaaatcgtatcatacatattgttaagttgtagagggagctgtatgtgctttgtataatgtggatttatg

SEQ ID NO: 57718 - DNA, 1184 bp, Zea Mays
accggaaaaaaaaaacattcgcggtcgcttctttcttcttgcccaatccaactccaaactctccatccagtgggaaaaaaaaaacaaaaagggtaccggaagcggcgaaagcctcgccccccgccgctctcgcatcgtctccggagcgcacgtcagatcaggtgcgccgcgcccccctcgcctaagctgcgacgaccatccatcgaacaggaaggatgacgggctccatggatctcccggccaagggcgggttcagcttcgacctgtgccgccggaacaacatgctggagaagaacgggctcaaggtcccgggattcaggaagaccgggacaaccatcgtcggcctcgtctttcaggatggggttgttcttggggcagacacaagggcaactgagggccccatagttgctgataagaactgtgagaaaatccactttatggcaccgaatatatactgctgtggagcaggaactgctgcggacacggaggccgttacagatatggtgagctcccagctacagcttcaccgttatgcaacgggccgcgaatcaagagttgtaactgctcttacactactgaagtcacacctcttcaagtatcaaggccatgtcagtgctgcccttgttcttggtggagtggattgtactgggccacatttacacactgtttatccacacgggtccactgatactcttccttttgccaccatgggctctggttctcttgctgcaatgtcagtgtttgaatcgaagtacaaagaaggccttactagggaggagggaatacagattgtgtgcgaagcaatctgtgctggtattttcaatgacttgggtagtgggagcaacgtggacgtctgagtgatcttgcatcctgcattcatacaagcatattctgaatctgtgtaactttgcttagtggatcagctagaacaagaaaaaagaaaatttggagatctttgctgtactcgctggaccaaagccagggttcttatgctaaatgtgtttctaatgtttggcacattttaaattgcttgttgtttccgaatgtttaaaaccggtgaaggtatggtatttgcttggagatgttattactgtcgcgtcggttgtttgtcgaacgactaggtaatggcgcaatgaaaatcatgcctgatgcagtggtttacatgacacatctgtctggattac

SEQ ID NO: 57719 - DNA, 1135 bp, Zea Mays
ctctctttgagcttcctcctgtccttttgctgcaactagtagcactggcttcatctagagggaccgtctcctctcctgcacccagactcctctctctctctctctctctctcccctctgtgtgcggtgtgccctggcctcctccgccgccattgcagcgagcaagatcaatccctctgctgccattcatgagtcaagctggggcattccctcctgggaagaagatcacggtggtgtttgtcataggcggcccaggcagtggcaagggcacccagtgctccaagattgtcagacactttggattcacccacctgagcgctggcgacctcctgcgccaacaatgccatgatcaagaacctgatgcacgaagggaagctcgtgccgtccgacatcatcgtcaggctcctgctcacggccatgctccagagcggaaacgacaggttcctcgtcgacggattccctcgaaacgaggagaaccgccgagcgtacgagagcgttattggcattgagcctgagttggtgctgttcatcgactgcccaagggaggagctggagcggcgcatcctgcaccgcgatcagggaagagacgacgacaacgtcgacactataaggaagcggtttcaggttttccacgactccactctacctgttgttctgtactacgacagaatggggaaggtccgacgggtagatggcgccaaatccgctgatgcagtctttgacgatgtgaaggctatatttactcagctactgaccactcaggcaagccaaggtggcaatgcgagcagcaggcggagcaatccgccgctttgttcagtgctctaggatgaagcaacatacctccagctccaaataaaaaaaagaggatttcagaaaacacacacttgctgtgcgtatgtggtgtgttcgtgctgtgctgtgctgtgctgtgcagatttaatggcttgttaaaaagaaacagagaataatggccctccccagctgcagctggtatggttgttcgctcagtggcagcactagaggctgcgagcctgctgcaaacacacagcttgtatttctaattgtaaaatgtagcgaaatggatgaatgtgatgtgtgcaactcattcagtttgctttgctgcatctcatctgatg

SEQ ID NO: 57720 - DNA, 828 bp, Zea Mays
ctctctttgagcttcctcctgtccttttgctgcaactagtagcactggcttcatctagagggaccgtctcctctcctgcacccagactcctctctctctctctctctctctcccctctgtgtgcggtgtgccctggcctcctccgccgccattgcagcgagcaagatcaatccctctgctgccattcatgattggcattgagcctgagttggtgctgttcatcgactgcccaagggaggagctggagcggcgcatcctgcaccgcgatcagggaagagacgacgacaacgtcgacactataaggaagcggtttcaggttttccacgactccactctacctgttgttctgtactacgacagaatggggaaggtccgacgggtagatggcgccaaatccgctgatgcagtctttgacgatgtgaaggctatatttactcagctactgaccactcaggcaagccaaggtggcaatgcgagcagcaggcggagcaatccgccgctttgttcagtgctctaggatgaagcaacatacctccagctccaaataaaaaaaagaggatttcagaaaacacacacttgctgtgcgtatgtggtgtgttcgtgctgtgctgtgctgtgctgtgcagatttaatggcttgttaaaaagaaacagagaataatggccctccccagctgcagctggtatggttgttcgctcagtggcagcactagaggctgcgagcctgctgcaaacacacagcttgtatttctaattgtaaaatgtagcgaaatggatgaatgtgatgtgtgcaactcattcagtttgctttgctgcatctcatctgatg

SEQ ID NO: 57721 - DNA, 1145 bp, Zea Mays
ctttgagcttcctcctgtccttttgctgcaactagtagcactggcttcatctagagggaccgtctcctctcctgcacccagactcctctctctctctctctctctctcccctctgtgtgcggtgtgccctggcctcctccgccgccattgcagcgagcaagatcaatccctctgctgccattcatgagtcaagctggggcattccctcctgggaagaagatcacggtggtgtttgtcataggcggcccaggcagtggcaagggcacccagtgctccaagattgtcagacactttggattcacccacctgagcgctggcgacctcctgcgccaacaagttcagtcagatactgaacacggtgccatgatcaagaacctgatgcacgaagggaagctcgtgccgtccgacatcatcgtcaggctcctgctcacggccatgctccagagcggaaacgacaggttcctcgtcgacggattccctcgaaacgaggagaaccgccgagcgtacgagagcgttattggcattgagcctgagttggtgctgttcatcgactgcccaagggaggagctggagcggcgcatcctgcaccgcgatcagggaagagacgacgacaacgtcgacactataaggaagcggtttcaggttttccacgactccactctacctgttgttctgtactacgacagaatggggaaggtagatggcgccaaatccgctgatgcagtctttgacgatgtgaaggctatatttactcagctactgaccactcaggcaagccaaggtggcaatgcgagcagcaggcggagcaatccgccgctttgttcagtgctctaggatgaagcaacatacctccagctccaaataaaaaaaagaggatttcagaaaacacacacttgctgtgcgtatgtggtgtgttcgtgctgtgctgtgctgtgctgtgcagatttaatggcttgttaaaaagaaacagagaataatggccctccccagctgcagctggtatggttgttcgctcagtggcagcactagaggctgcgagcctgctgcaaacacacagcttgtatttctaattgtaaaatgtagcgaaatggatgaatgtgatgtgtgcaactcattcagtttgctttgctgcatctcatctgatg

SEQ ID NO: 57722 - DNA, 1117 bp, Zea Mays
cttttgctgcaactagtagcactggcttcatctagagggaccgtctcctctcctgcacccagactcctctctctctctctctctctctcccctctgtgtgcggtgtgccctggcctcctccgccgccattgcagcgagcaagatcaatccctctgctgccattcatgagtcaagctggggcattccctcctgggaagaagatcacggtggtgtttgtcataggcagtggcaagggcacccagtgctccaagattgtcagacactttggattcacccacctgagcgctggcgacctcctgcgccaacaagttcagtcagatactgaacacggtgccatgatcaagaacctgatgcacgaagggaagctcgtgccgtccgacatcatcgtcaggctcctgctcacggccatgctccagagcggaaacgacaggttcctcgtcgacggattccctcgaaacgaggagaaccgccgagcgtacgagagcgttattggcattgagcctgagttggtgctgttcatcgactgcccaagggaggagctggagcggcgcatcctgcaccgcgatcagggaagagacgacgacaacgtcgacactataaggaagcggtttcaggttttccacgactccactctacctgttgttctgtactacgacagaatggggaaggtagatggcgccaaatccgctgatgcagtctttgacgatgtgaaggctatatttactcagctactgaccactcaggcaagccaaggtggcaatgcgagcagcaggcggagcaatccgccgctttgttcagtgctctaggatgaagcaacatacctccagctccaaataaaaaaaagaggatttcagaaaacacacacttgctgtgcgtatgtggtgtgttcgtgctgtgctgtgctgtgctgtgcagatttaatggcttgttaaaaagaaacagagaataatggccctccccagctgcagctggtatggttgttcgctcagtggcagcactagaggctgcgagcctgctgcaaacacacagcttgtatttctaattgtaaaatgtagcgaaatggatgaatgtgatgtgtgcaactcattcagtttgctttgctgcatctcatctgatg

SEQ ID NO: 57723 - DNA, 3330 bp, Zea Mays
gcctgccgttgctcgaccggtcccacctccaccgccagcggccagtgcagtcgtggtcttcctcctcctgcgtgtcctcgtccttcttcatccgttttcccactctgcgtccgtccgtccacgtccatccatccccattccattccccggtcaaacaaactgcccagaggaaagttgtagcgcctttcctttcctgcaagtccagcgtcggtttgataagataatgcgggcggggcggagaacggcagttcccacgctgcccagtgcaaagatgtgttgttcgttgctgactgactgacccgagccgccgagcgggagtcgttggggggccccgcccgggcctgcaccagcaccgccggttgcggttgctggttggctggccacgaccgccgctagtgccagtggaggggttgcatttcttctctctgacccagcctgcctctcgttggaccggtcgtcgtcgaggccactccgttcactccactccacccaggggtgggtcgggaattgaattccccgccgtctctacgcctgctgccgcgggtggaaaatatctatctgcaccgggacggactagtcgcccgcgcgcaaggtgctcgacggattgctgctacaccgggcaggcatggcggcgggccggggcgactgggaggacatggtgcgccggatgttcccgccggggaccaccatcccggagccgctgcccgacatggactactccttcgcgctgacgtacaacgggccggacgtgtcgtacgagctcccgcggatccagcccgtctgcgtccccgccatacccaccgccgagccggcctcggggcccctggggctcggcagcggcgtcgtgcccgtcgcgcccgtcgtcggccctgctgcggcccgtgcccgtgccaacccgccggcagcgtcccgggctggtgctgctgatcgccgtgccgcgaggatgacgccgtcggattcctccgatgacgaggaggacgacgccggcagctccggctcccgctccacgaaggcctcgaggcctgcagtgccggaggggaggcgacctcaggtggtcacgttcggggtgccggaggaggacagcggcggcaggtacgagagcagcgagatggacggcggacacgacgcggcgtccgccgagcagcacgtcgcggtgacgaggccggccgagaggaaagggcggacctgctgccgccgctgcgggaagagcaagtgggagagcaaggagtcgtgcatcgtctgcgacgcgcgctactgcggccactgcctgctccgcgccatgggctccatgcccgagggccgcaagtgtgtcacctgcattggccagcccatcgacgaggccaagcgctccaggctcgggaagggctctaggatactgtctcgcctgctcggccccctggaggtcaggcagatcctcaaggtcgagaaggagtgccaggcgaaccagctccggcctgagcagctcctggtcaatggtttccctcttgacgacgaggagatgaccgatttgcttagctgccaacgacctcctgggaacctcaagcctggaagatattggtatgataaggagtcaggattgtggggaaaggaaggtgaaaagccagacagcatcattagcactaacctcaactttaacggaaagcttcagcctgatgctagtaacggcaccgctcaggttttcattaacgggcgggaaattacaaagattgaactgagaattctaaagattgcaaaagtccaatgcccccgtgatactcacttctgggtttaccatgatggtggctacgaggaagaaggacaaaacaatatcaaagggaaaatatgggagtcacctttgacacgttttgcgtgcgccttggtttcactaccggtgcctcctacaaactttgatgcgacaaaagatgaagccccttattcatcaaaaactgtacctgactacttagatcataaaagaatacaaaagcttcttattcttggatctcctggagctggaacaagcaccatatttaagcagtacctggggattctgcttgagggccgggagcgctttgaggaagaggctttggctgtaccaaatcacccaagctcagtgggcgatgatcctcagcaagatgaaagtaaatcttcaagttccaattcttgcatctactcgataaatgcaaaactgaagaagttttccgattggctcctggacatcatagcgacaggagacctagatacattcttccctgcagctacccgtgaatatgctccagttgttgatgagttgtggaaagatcctgccattcaagcaacatacaaaagaaaggatgaattgcattttctccctgatgctgctgagtacttcttgagcagggctgttgaagtatcaagtaacgaatacgaaccgtcagagaaagacgtgatatacgctgagggagtaacacaagggaacggattggccttcattgacttcaccttggatgaccggagccctatgtcagaatcctttggcgacaaccacgatgcgtaccctcaacaaccagtaaacaagtaccagctgattagagtgagcgccaagggcatgaacgagggctgcaagtgggtggagatgtttgaggatgttagcatggtgatcttctctgtagcgctcagcgactacgaccagctcggagccccagcgagcggcagtagcaggacactcgtgaataagatgatccaaagcagggacctgtttgaggctacaatcaggcagccgtgcttccgtgacacgccgttcctgcttttgctgaacaagtacgacgcgttcgaggagaagatcgggcggtccccgctgtcgtcgtgcgagtggttcggcgacttctgcccgctgcggacgcaccacaacagccagtcgctggcgcagcaggcgttctactacgtggccatcaagttcaaggacctgtacgcggcgagcacggggcggaagctgttcgtgtggcagacgcgcgcccgcgaccggcccaccgttgacgaggccttccgctacgtccgggaggtcctccggtgggaggacgagcgtggcgtcgccgggtactgccccgacgagtccttctacagcaccacggagctcagctcgtcccgcctcatcgccgctgcacagtgactgtcgcagcgttgttttgtgtataatgatcgtatgcttgcttgtttcccgaacaaatcaaatgctatcaaatatagtgatctgagtgatgagcagaaaactcgtactgtccttttggtgtccatgctgccgatgttcccttctcttctgattcggagcatatccggtgagcatgggcttacggtgttgtgcacatcaaatccgag

SEQ ID NO: 57724 - DNA, 3209 bp, Zea Mays
ctcctgcgtgtcctcgtccttcttcatccgttttcccactctgcgtccgtccgtccacgtccatccatccccattccattccccggtcaaacaaactgcccagaggaaagttgtagcgcctttcctttcctgcaagtccagcgtcggtttgataagataatgcgggcggggcggagaacggcagttcccacgctgcccagtgcaaagatgtgttgttcgttgctgactgactgacccgagccgccgagcgggagtcgttggggggccccgcccgggcctgcaccagcaccgccggttgcggttgctggttggctggccacgaccgccgctagtgccagtggaggggttgcatttcttctctctgacccagcctgcctctcgttggaccggtcgtcgtcgaggccactccgttcactccactccacccaggggtgggtcgggaattgaattccccgccgtctctacgcctgctgccgcgggtggaaaatatctatctgcaccgggacggactagtcgcccgcgcgcaaggtgctcgacggattgctgctacaccgggcaggcatggcggcgggccggggcgactgggaggacatggtgcgccggatgttcccgccggggaccaccatcccggagccgctgcccgacatggactactccttcgcgctgacgtacaacgggccggacgtgtcgtacgagctcccgcggatccagcccgtctgcgtccccgccatacccaccgccgagccggcctcggggcccctggggctcggcagcggcgtcgtgcccgtcgcgcccgtcgtcggccctgctgcggcccgtgcccgtgccaacccgccggcagcgtcccgggctggtgctgctgatcgccgtgccgcgaggatgacgccgtcggattcctccgatgacgaggaggacgacgccggcagctccggctcccgctccacgaaggcctcgaggcctgcagtgccggaggggaggcgacctcaggtggtcacgttcggggtgccggaggaggacagcggcggcaggtacgagagcagcgagatggacggcggacacgacgcggcgtccgccgagcagcacgtcgcggtgacgaggccggccgagaggaaagggcggacctgctgccgccgctgcgggaagagcaagtgggagagcaaggagtcgtgcatcgtctgcgacgcgcgctactgcggccactgcctgctccgcgccatgggctccatgcccgagggccgcaagtgtgtcacctgcattggccagcccatcgacgaggccaagcgctccaggctcgggaagggctctaggatactgtctcgcctgctcggccccctggaggtcaggcagatcctcaaggtcgagaaggagtgccaggcgaaccagctccggcctgagcagctcctggtcaatggtttccctcttgacgacgaggagatgaccgatttgcttagctgccaacgacctcctgggaacctcaagcctggaagatattggtatgataaggagtcaggattgtggggaaagattgcaaaagtccaatgcccccgtgatactcacttctgggtttaccatgatggtggctacgaggaagaaggacaaaacaatatcaaagggaaaatatgggagtcacctttgacacgttttgcgtgcgccttggtttcactaccggtgcctcctacaaactttgatgcgacaaaagatgaagccccttattcatcaaaaactgtacctgactacttagatcataaaagaatacaaaagcttcttattcttggatctcctggagctggaacaagcaccatatttaagcaggctaagttgttatacggcaatagatttactgatgaggaacttgagaatatcaaactaatgatccaaagcaacatgtttaagtacctggggattctgcttgagggccgggagcgctttgaggaagaggctttggctgtaccaaatcacccaagctcagtgggcgatgatcctcagcaagatgaaagtaaatcttcaagttccaattcttgcatctactcgataaatgcaaaactgaagaagttttccgattggctcctggacatcatagcgacaggagacctagatacattcttccctgcagctacccgtgaatatgctccagttgttgatgagttgtggaaagatcctgccattcaagcaacatacaaaagaaaggatgaattgcattttctccctgatgctgctgagtacttcttgagcagggctgttgaagtatcaagtaacgaatacgaaccgtcagagaaagacgtgatatacgctgagggagtaacacaagggaacggattggccttcattgacttcaccttggatgaccggagccctatgtcagaatcctttggcgacaaccacgatgcgtaccctcaacaaccagtaaacaagtaccagctgattagagtgagcgccaagggcatgaacgagggctgcaagtgggtggagatgtttgaggatgttagcatggtgatcttctctgtagcgctcagcgactacgaccagctcggagccccagcgagcggcagtagcaggacactcgtgaataagatgatccaaagcagggacctgtttgaggctacaatcaggcagccgtgcttccgtgacacgccgttcctgcttttgctgaacaagtacgacgcgttcgaggagaagatcgggcggtccccgctgtcgtcgtgcgagtggttcggcgacttctgcccgctgcggacgcaccacaacagccagtcgctggcgcagcaggcgttctactacgtggccatcaagttcaaggacctgtacgcggcgagcacggggcggaagctgttcgtgtggcagacgcgcgcccgcgaccggcccaccgttgacgaggccttccgctacgtccgggaggtcctccggtgggaggacgagcgtggcgtcgccgggtactgccccgacgagtccttctacagcaccacggagctcagctcgtcccgcctcatcgccgctgcacagtgactgtcgcagcgttgttttgtgtataatgatcgtatgcttgcttgtttcccgaacaaatcaaatgctatcaaatatagtgatctgagtgatgagcagaaaactcgtactgtccttttggtgtccatgctgccgatgttcccttctcttctgattcggagcatatccggtgagcatgggcttacggtgttgtgcacatcaaatccgag

SEQ ID NO: 57725 - DNA, 3709 bp, Zea Mays
atccgttttcccactctgcgtccgtccgtccacgtccatccatccccattccattccccggtcaaacaaactgcccagaggaaagttgtagcgcctttcctttcctgcaagtccagcgtcggtttgataagataatgcgggcggggcggagaacggcagttcccacgctgcccagtgcaaagatgtgttgttcgttgctgactgactgacccgagccgccgagcgggagtcgttggggggccccgcccgggcctgcaccagcaccgccggttgcggttgctggttggctggccacgaccgccgctagtgccagtggaggggttgcatttcttctctctgacccagcctgcctctcgttggaccggtcgtcgtcgaggccactccgttcactccactccacccaggggtgggtcgggaattgaattccccgccgtctctacgcctgctgccgcgggtggaaaatatctatctgcaccgggacggactagtcgcccgcgcgcaaggtgctcgacggattgctgctacaccgggcaggcatggcggcgggccggggcgactgggaggacatggtgcgccggatgttcccgccggggaccaccatcccggagccgctgcccgacatggactactccttcgcgctgacgtacaacgggccggacgtgtcgtacgagctcccgcggatccagcccgtctgcgtccccgccatacccaccgccgagccggcctcggggcccctggggctcggcagcggcgtcgtgcccgtcgcgcccgtcgtcggccctgctgcggcccgtgcccgtgccaacccgccggcagcgtcccgggctggtgctgctgatcgccgtgccgcgaggatgacgccgtcggattcctccgatgacgaggaggacgacgccggcagctccggctcccgctccacgaaggcctcgaggcctgcagtgccggaggggaggcgacctcaggtggtcacgttcggggtgccggaggaggacagcggcggcaggtacgagagcagcgagatggacggcggacacgacgcggcgtccgccgagcagcacgtcgcggtgacgaggccggccgagaggaaagggcggacctgctgccgccgctgcgggaagagcaagtgggagagcaaggagtcgtgcatcgtctgcgacgcgcgctactgcggccactgcctgctccgcgccatgggctccatgcccgagggccgcaagtgtgtcacctgcattggccagcccatcgacgaggccaagcgctccaggctcgggaagggctctaggatactgtctcgcctgctcggccccctggaggtcaggcagatcctcaaggtcgagaaggagtgccaggcgaaccagctccggcctgagcagctcctggtcaatggtttccctcttgacgacgaggagatgaccgatttgcttagctgccaacgacctcctgggaacctcaagcctggaagatattggtatgataaggagtcaggattgtggggaaaggaaggtgaaaagccagacagcatcattagcactaacctcaactttaacggaaagcttcagcctgatgctagtaacggcaccgctcaggttttcattaacgggcgggaaattacaaagattgaactgagaattctaaagattgcaaaagtccaatgcccccgtgatactcacttctgggtttaccatgatggtggctacgaggaagaaggacaaaacaatatcaaagggaaaatatgggagtcacctttgacacgttttgcgtgcgccttggtttcactaccggtgcctcctacaaactttgatgcgacaaaagatgaagccccttattcatcaaaaactgtacctgactacttagatcataaaagaatacaaaagcttcttattcttggatctcctggagctggaacaagcaccatatttaagcaggctaagttgttatacggcaatagatttactgatgaggaacttgagaatatcaaactaatgatccaaagcaacatgtttaagtacctggggattctgcttgagggccgggagcgctttgaggaagaggctttggctgtaccaaatcacccaagctcagtgggcgatgatcctcagcaagatgaaagtaaatcttcaagttccaattcttgcatctactcgataaatgcaaaactgaagaagttttccgattggctcctggacatcatagcgacaggagacctagatacattcttccctgcagctacccgtgaatatgctccagttgttgatgagttgtggaaagatcctgccattcaagcaacatacaaaagaaaggatgaattgcattttctccctgatgctgctgagtacttcttgagcagggtataagccaaagcagttgacttgaactaatatggtccattccattgctgataagctgcgattaagtacagagttacccttgattgatcctgttgacgacttgcattttcactgattctgctagatcagcactccatattatgacttactctactcgtgcatccttctacccattagtaatttcgttagatttttggggaaatggaattgatggtccgcaggtttttaatcatttaaggaactttaagtttccagatttttctggccttctctcatctgcaaacaatgatcttcggctccatactgactagatgtgctgctacttattttcttttccctctctgattacctaaattgacctgtccattgtatgacaaatccatgcaggctgttgaagtatcaagtaacgaatacgaaccgtcagagaaagacgtgatatacgctgagggagtaacacaagggaacggattggccttcattgacttcaccttggatgaccggagccctatgtcagaatcctttggcgacaaccacgatgcgtaccctcaacaaccagtaaacaagtaccagctgattagagtgagcgccaagggcatgaacgagggctgcaagtgggtggagatgtttgaggatgttagcatggtgatcttctctgtagcgctcagcgactacgaccagctcggagccccagcgagcggcagtagcaggacactcgtgaataagatgatccaaagcagggacctgtttgaggctacaatcaggcagccgtgcttccgtgacacgccgttcctgcttttgctgaacaagtacgacgcgttcgaggagaagatcgggcggtccccgctgtcgtcgtgcgagtggttcggcgacttctgcccgctgcggacgcaccacaacagccagtcgctggcgcagcaggcgttctactacgtggccatcaagttcaaggacctgtacgcggcgagcacggggcggaagctgttcgtgtggcagacgcgcgcccgcgaccggcccaccgttgacgaggccttccgctacgtccgggaggtcctccggtgggaggacgagcgtggcgtcgccgggtactgccccgacgagtccttctacagcaccacggagctcagctcgtcccgcctcatcgccgctgcacagtgactgtcgcagcgttgttttgtgtataatgatcgtatgcttgcttgtttcccgaacaaatcaaatgctatcaaatatagtgatctgagtgatgagcagaaaactcgtactgtccttttggtgtccatgctgccgatgttcccttctcttctgattcggagcatatccggtgagcatgggcttacggtgttgtgcacatcaaatccgag

SEQ ID NO: 57726 - DNA, 3295 bp, Zea Mays
gtccgtccacgtccatccatccccattccattccccggtcaaacaaactgcccagaggaaagttgtagcgcctttcctttcctgcaagtccagcgtcggtttgataagataatgcgggcggggcggagaacggcagttcccacgctgcccagtgcaaagatgtgttgttcgttgctgactgactgacccgagccgccgagcgggagtcgttggggggccccgcccgggcctgcaccagcaccgccggttgcggttgctggttggctggccacgaccgccgctagtgccagtggaggggttgcatttcttctctctgacccagcctgcctctcgttggaccggtcgtcgtcgaggccactccgttcactccactccacccaggggtgggtcgggaattgaattccccgccgtctctacgcctgctgccgcgggtggaaaatatctatctgcaccgggacggactagtcgcccgcgcgcaaggtgctcgacggattgctgctacaccgggcaggcatggcggcgggccggggcgactgggaggacatggtgcgccggatgttcccgccggggaccaccatcccggagccgctgcccgacatggactactccttcgcgctgacgtacaacgggccggacgtgtcgtacgagctcccgcggatccagcccgtctgcgtccccgccatacccaccgccgagccggcctcggggcccctggggctcggcagcggcgtcgtgcccgtcgcgcccgtcgtcggccctgctgcggcccgtgcccgtgccaacccgccggcagcgtcccgggctggtgctgctgatcgccgtgccgcgaggatgacgccgtcggattcctccgatgacgaggaggacgacgccggcagctccggctcccgctccacgaaggcctcgaggcctgcagtgccggaggggaggcgacctcaggtggtcacgttcggggtgccggaggaggacagcggcggcaggtacgagagcagcgagatggacggcggacacgacgcggcgtccgccgagcagcacgtcgcggtgacgaggccggccgagaggaaagggcggacctgctgccgccgctgcgggaagagcaagtgggagagcaaggagtcgtgcatcgtctgcgacgcgcgctactgcggccactgcctgctccgcgccatgggctccatgcccgagggccgcaagtgtgtcacctgcattggccagcccatcgacgaggccaagcgctccaggctcgggaagggctctaggatactgtctcgcctgctcggccccctggaggtcaggcagatcctcaaggtcgagaaggagtgccaggcgaaccagctccggcctgagcagctcctggtcaatggtttccctcttgacgacgaggagatgaccgatttgcttagctgccaacgacctcctgggaacctcaagcctggaagatattggtatgataaggagtcaggattgtggggaaaggtgaaaagccagacagcatcattagcactaacctcaactttaacggaaagcttcagcctgatgctagtaacggcaccgctcaggttttcattaacgggcgggaaattacaaagattgaactgagaattctaaagattgcaaaagtccaatgcccccgtgatactcacttctgggtttaccatgatggtggctacgaggaagaaggacaaaacaatatcaaagggaaaatatgggagtcacctttgacacgttttgcgtgcgccttggtttcactaccggtgcctcctacaaactttgatgcgacaaaagatgaagccccttattcatcaaaaactgtacctgactacttagatcataaaagaatacaaaagcttcttattcttggatctcctggagctggaacaagcaccatatttaagcaggctaagttgttatacggcaatagatttactgatgaggaacttgagaatatcaaactaatgatccaaagcaacatgtttaagtacctggggattctgcttgagggccgggagcgctttgaggaagaggctttggctgtaccaaatcacccaagctcagtgggcgatgatcctcagcaagatgaaagtaaatcttcaagttccaattcttgcatctactcgataaatgcaaaactgaagaagttttccgattggctcctggacatcatagcgacaggagacctagatacattcttccctgcagctacccgtgaatatgctccagttgttgatgagttgtggaaagatcctgccattcaagcaacatacaaaagaaaggatgaattgcattttctccctgatgctgctgagtacttcttgagcagggctgttgaagtatcaagtaacgaatacgaaccgtcagagaaagacgtgatatacgctgagggagtaacacaagggaacggattggccttcattgacttcaccttggatgaccggagccctatgtcagaatcctttggcgacaaccacgatgcgtaccctcaacaaccagtaaacaagtaccagctgattagagtgagcgccaagggcatgaacgagggctgcaagtgggtggagatgtttgaggatgttagcatggtgatcttctctgtagcgctcagcgactacgaccagctcggagccccagcgagcggcagtagcaggacactcgtgaataagatgatccaaagcagggacctgtttgaggctacaatcaggcagccgtgcttccgtgacacgccgttcctgcttttgctgaacaagtacgacgcgttcgaggagaagatcgggcggtccccgctgtcgtcgtgcgagtggttcggcgacttctgcccgctgcggacgcaccacaacagccagtcgctggcgcagcaggcgttctactacgtggccatcaagttcaaggacctgtacgcggcgagcacggggcggaagctgttcgtgtggcagacgcgcgcccgcgaccggcccaccgttgacgaggccttccgctacgtccgggaggtcctccggtgggaggacgagcgtggcgtcgccgggtactgccccgacgagtccttctacagcaccacggagctcagctcgtcccgcctcatcgccgctgcacagtgactgtcgcagcgttgttttgtgtataatgatcgtatgcttgcttgtttcccgaacaaatcaaatgctatcaaatatagtgatctgagtgatgagcagaaaactcgtactgtccttttggtgtccatgctgccgatgttcccttctcttctgattcggagcatatccggtgagcatgggcttacggtgttgtgcacatcaaatccgag

SEQ ID NO: 57727 - DNA, 2387 bp, Zea Mays
gaatatgccaaatcgatcccatagacttgctatcaatgatttcaagttgcttggtcgcctgttcaaaccatgggaccgactaggcgactagtcgtgattaggcgatgactagggcatttagtcgacccctagtcggtccctggtcgtcctagaccatttagattatgttctaatacacacacattatataaattagaacaaatagctaggataaacaaaataacatattgctttaaactctgtagattgcaaacatagacataggagcaaggcactacctagcaatggcttaggagtagagaagtaagccaaaaactatccactagttcggcactggtcactggcacagatacagagaagggggagcaggaggaacctttagatgaccaactcaactcatcaatggtgcttgtatgcaggagagtggagaagccagtagtctgtcatagtcgccgccggtgctctgtcatatgtcacagccaccaccggtgctggtcttctatactgcagtaggccaggtctgaaggctggaggtcaagcaagagaggaggtgtaccctggttttggtggctgggcgactaggtattggcagaggagaggagaggccagactaaatgatactgtagatgggctaaaaatgacccaataacgaaaccctagccgggtgaaaatggcacaataccaaaaccctagccgggcaaccaggaaacactaagcggatgattagtcgccctaatcggcgattagtaggacaactagattgaccagcctatctagttgagtcatctacctaatcgaacacaaacaggcgactagcccgataatcatgattaatcggacgacttgaaatcattgcttgctattgctggtcagcttgctattgctggtcagctggtgtttctggcatagccattgttctgaccaaccatatataaatgcaaagctccagcctaaaaaagttatagatttttagagctaaaagtagtttaactgatatttggttatttgtctttctttattcttgacaaaaaggacagttcatcacatcaaagacaaatggaatagagcagaagatccaaaatgtcattagttcaaatgagactcttgtgttacagttcacaacaggaagtaaaagaaaataaaaaaaggaacatttcaacagtatggctttcttcttttctcgatgcttggaatgcatgaggtttttctttctatctatccctacgtttgttctaaaagactagactgattcatatcaaatttctatataatttcaagtggctgctttctagagcgatggtgatggcagctaggcaggacactgaggagggaggggcaagtggtgttcttagctcaacggatcagatcgatcatgtgctgagcaacactttttgaggtatctcaggtgtgtaattcttgcagggacaatggcgatgggatagcagagcggggtggcatgcttgcagtacctcctcgacgccgcctacgatgccagcttcaacttcttttgactccacagaattgtaggctcatttgctccctcatcttcctacctcggtttgtgagtaatgaaaggtgaatggatgcacatttgcaaacctgtttccttgtcaggtacccgaactgccaatacacttcagtgtgggtaagaagtacattttgatctaatcagtcgtactgtaaccgctctctatattgtttcacctttgatataaccttttgtgtcatattttattacttggtcactgtgttataatacaaaatgctagagccctggtgaggcaagcaacacacgcctactgttctagttagatgcagactaccccatttctctgcctcttcaagggttacacatatatcttggttttgctgcattctaaatgtgatttgatggttacttgcttattttataccatttttctttactaattgaggaaacataatcatacaaatcattagggttttggttactagttagtattcccataatgaatattctatgatgttatgactgtttttgttccttactttttcaaagacagcggtgatcagctacacctattcacattgctaactcaattcaaaatagaattatgctgcaagctacacaaggtcttgacatccaaaatgtgaagtgtgtaattgtttgtatattagagataactttatgcattctggtatgctaatgtttgttttggtttcgttttatccatatctcttgtcttatttttatacattcttgttgataggatacaatggaagcacttgtgactgagactagaatagaagggaaagaatctaagacctctatagaagcaattgctcaagtattggcttcatcaagatatcttcaaaatgttcttgtagctgcaataaagagaagcggg

SEQ ID NO: 57728 - DNA, 1589 bp, Zea Mays
gaggaaatccggcccatcaacaggcccattggggagtggaagtggccggagaacattgcagggcggagcgcaacccccacgcccgaccggcccgggatgtccaccggactttcgcagctctctggcggcgtcggcggcgaccggggctcctcctcctccgccggcccccaccaccagcacagccaccacccacctcccccgccgccgcccaagatcctcctcgccaagccgccgctgccgcacgcctcgtcctcgggcgccgatgacgacggcgggaccggggtcgcgggtggccgcgcgcgccaggcgccgcagccgggttcgctcagcctcgtctccgacgcgtgggaggcccacaccgacaagatccttccgtatctgacggagaacaatgatttcatggtgattggggtaattgggccgcccggtgtaggcaagtcgaccatcatgaacgagctttatggatatgatgcgagctcacctggaatgcttcctccttttcctacacaaactgaggaaaccagattgatggggaaacactgtactactggtattgacatcaggatatctaatgagcgagttatactccttgacgctcagcctgtgtacagtccctctgttctaatcgatatgatgaggccagatggttcatccacaattcctgtccttaatggtgaacccttatcagcagacttagctcatgagctaatgggaatccagattggtgttttcttggcatctgtttgtaatatagtgttggtcgtgtcagaaggtatgaatgatttgtccatgtgggagctcatgcttacagttgatttattgaagcacgggatacctgatccgtccgtgttgacgtcatcagcttcccaagacaaggaaaacaaaaacgaagaccaaacgggctgcgaagactatatttccgatctctgtttcgtgcatactaggctgcaggggcaagatttttctccttcaaagttcatgcttctaaggagaactcttgagaagcacttcaactcatccacttttagagtcgggagctctaatgcaacgggtcatgcttctgattcgctggttccttcaagcacgaaagttgaagatttaacctccagtcggcaggacatatttcttcttcccctgagagggcacgacgactcgacaaagtttgagtatggaacgtactcgtgcatgctaggcatgatccgtgatcaggtacggttgctacgctgaggagttttgctcagtacaaaaggaatgttcagtagagagttacaaaccctagcccgctattcgaaaacgtggcagctacatgggctgggtttaggttctattaaaatctaaacatgggctgggtttaggttctattaaaatctaacacagcattttattatgtaaatgaaataagtatgagcaagtcatccctgcctaaacactagagtttcatccaaacattcttggcatctgtgctccagcaaatgatgggaagcattagttggtccggtgcttttagttctgagaagctaaaggttacatttgaaattcattcaatctgaactcattccgacgatagacatttgatgatgctgaacttt

SEQ ID NO: 57729 - DNA, 1673 bp, Zea Mays
gaggaaatccggcccatcaacaggcccattggggagtggaagtggccggagaacattgcagggcggagcgcaacccccacgcccgaccggcccgggatgtccaccggactttcgcagctctctggcggcgtcggcggcgaccggggctcctcctcctccgccggcccccaccaccagcacagccaccacccacctcccccgccgccgcccaagatcctcctcgccaagccgccgctgccgcacgcctcgtcctcgggcgccgatgacgacggcgggaccggggtcgcgggtggccgcgcgcgccaggcgccgcagccgggttcgctcagcctcgtctccgacgcgtgggaggcccacaccgacaagatccttccgtatctgacggagaacaatgatttcatggtgattggggtaattgggccgcccggtgtaggcaagtcgaccatcatgaacgagctttatggatatgatgcgagctcacctggaatgcttcctccttttcctacacaaactgaggaaaccagattgatggggaaacactgtactactggtattgacatcaggatatctaatgagcgagttatactccttgacgctcagcctgtgtacagtccctctgttctaatcgatatgatgaggccagatggttcatccacaattcctgtccttaatggtgaacccttatcagcagacttagctcatgagctaatgggaatccagattggtgttttcttggcatctgtttgtaatatagtgttggtcgtgtcagaaggttgatttattgaagcacgggatacctgatccgtccgtgttgacgtcatcagcttcccaagacaaggaaaacaaaaacgaagaccaaacgggctgcgaagactatatttccgatctctgtttcgtgcatactaggctgcaggggcaagatttttctccttcaaagttcatgcttctaaggagaactcttgagaagcacttcaactcatccacttttagagtcgggagctctaatgcaacgggtcatgcttctgattcgctggttccttcaagcacgaaagttgaagatttaacctccagtcggcaggacatatttcttcttcccctgagagggcacgacgactcgacaaagtttgagtatggaacgtactcgtgcatgctaggcatgatccgtgatcagatcctgtcatggccggcgaggtcattctcgaagaacctctcggagcgtgactggctgaggagctcagcgaggatctgggacatggtgaagaagtcccccgtcatctcggagtactgcaaggcgctccagagctcaggatggtttaggaagcaaccgtagtagtgtctagcagctacttgttgggatgcgcccgctttggccggcttggaaaaccagagaatcgccatcagatcaaatgaattcgcttgctctgttctgttcaatcagtcgactctgatgagataccgtgcatgtgtttgttagtttgttgggctttgtgtaatgagctcagagccagcgacagcaggtggcagtcagtcgtgtacggctcatgcttctctgcgtgtcctgtgctatgatttgaggctgtttcatgcgacgtctcataaatttcatcttctaaaaaatatatatttactgttctttacagcactttcaaaaaaattacatctctatatctttt

SEQ ID NO: 57730 - DNA, 2465 bp, Zea Mays
gaggaaatccggcccatcaacaggcccattggggagtggaagtggccggagaacattgcagggcggagcgcaacccccacgcccgaccggcccgggatgtccaccggactttcgcagctctctggcggcgtcggcggcgaccggggctcctcctcctccgccggcccccaccaccagcacagccaccacccacctcccccgccgccgcccaagatcctcctcgccaagccgccgctgccgcacgcctcgtcctcgggcgccgatgacgacggcgggaccggggtcgcgggtggccgcgcgcgccaggcgccgcagccgggttcgctcagcctcgtctccgacgcgtgggaggcccacaccgacaagatccttccgtatctgacggagaacaatgatttcatggtgattggggtaattgggccgcccggtgtaggcaagtcgaccatcatgaacgagctttatggatatgatgcgagctcacctggaatgcttcctccttttcctacacaaactgaggaaaccagattgatggggaaacactgtactactggtattgacatcaggatatctaatgagcgagttatactccttgacgctcagcctgtgtacagtccctctgttctaatcgatatgatgaggccagatggttcatccacaattcctgtccttaatggtgaacccttatcagcagacttagctcatgagctaatgggaatccagattggtgttttcttggcatctgtttgtaatatagtgttggtcgtgtcagaaggtatgaatgatttgtccatgtgggagctcatgcttacagtaagttttctcatctacaatttgtactttctgtctttctttcattagcccatctggaagaaccgaggaagttatgcctttaggtttttggttcaggatctgagttttcacctattgacctaatttcaaagaaaattgagatgcagttctagctttgtaatgattctatcacattctcatcatacttgtttctcccacccgtttttttttctgtatcccaaatagtttacaacttggcttttgggacctggcagtaatgcaataggctgaatggatgttccaatacatttcttatgcctgtaggttttttgactttttggttcaagatctgagttttcacctattgaccttatttcaaagaaaattgagctgcagttctagccttgtaatgattctatcacattctcatcatacctgtttctcccacccgtttttcccctgtatcccaaatagtttacaataacttggcttttgggacctggcagtaatgcaataggttgaatggatgttccgatacattgcttatgcctgtaggtttttggttcaggatctaagttttcacctattgacctaatttcaaagaaaaattgagctgcagttctagctttgtaatgattctatcccaatcccatcatacttgtttctcccaccacatttttctgtattttacagcaacttggctttcaggacatggcagtaatgcagaaggctgaatggcagaaggctgaatggatgttccaatacatttatgcaggttgatttattgaagcacgggatacctgatccgtccgtgttgacgtcatcagcttcccaagacaaggaaaacaaaaacgaagaccaaacgggctgcgaagactatatttccgatctctgtttcgtgcatactaggctgcaggggcaagatttttctccttcaaagttcatgcttctaaggagaactcttgagaagcacttcaactcatccacttttagagtcgggagctctaatgcaacgggtcatgcttctgattcgctggttccttcaagcacgaaagttgaagatttaacctccagtcggcaggacatatttcttcttcccctgagagggcacgacgactcgacaaagtttgagtatggaacgtactcgtgcatgctaggcatgatccgtgatcagatcctgtcatggccggcgaggtcattctcgaagaacctctcggagcgtgactggctgaggagctcagcgaggatctgggacatggtgaagaagtcccccgtcatctcggagtactgcaaggcgctccagagctcaggatggtttaggaagcaaccgtagtagtgtctagcagctacttgttgggatgcgcccgctttggccggcttggaaaaccagagaatcgccatcagatcaaatgaattcgcttgctctgttctgttcaatcagtcgactctgatgagataccgtgcatgtgtttgttagtttgttgggctttgtgtaatgagctcagagccagcgacagcaggtggcagtcagtcgtgtacggctcatgcttctctgcgtgtcctgtgctatgatttgaggctgtttcatgcgacgtctcataaatttcatcttctaaaaaatatatatttactgttctttacagcactttcaaaaaaattacatctctatatctttt

SEQ ID NO: 57731 - DNA, 1790 bp, Zea Mays
gaggaaatccggcccatcaacaggcccattggggagtggaagtggccggagaacattgcagggcggagcgcaacccccacgcccgaccggcccgggatgtccaccggactttcgcagctctctggcggcgtcggcggcgaccggggctcctcctcctccgccggcccccaccaccagcacagccaccacccacctcccccgccgccgcccaagatcctcctcgccaagccgccgctgccgcacgcctcgtcctcgggcgccgatgacgacggcgggaccggggtcgcgggtggccgcgcgcgccaggcgccgcagccgggttcgctcagcctcgtctccgacgcgtgggaggcccacaccgacaagatccttccgtatctgacggagaacaatgatttcatggtgattggggtaattgggccgcccggtgtaggcaagtcgaccatcatgaacgagctttatggatatgatgcgagctcacctggaatgcttcctccttttcctacacaaactgaggaaaccagattgatggggaaacactgtactactggtattgacatcaggatatctaatgagcgagttatactccttgacgctcagcctgtgtacagtccctctgttctaatcgatatgatgaggccagatggttcatccacaattcctgtccttaatggtgaacccttatcagcagacttagctcatgagctaatgggaatccaggaattgctgtagattggtgttttcttggcatctgtttgtaatatagtgttggtcgtgtcagaaggtatgaatgatttgtccatgtgggagctcatgcttacagacatggcagtaatgcagaaggctgaatggcagaaggctgaatggatgttccaatacatttatgcaggttgatttattgaagcacgggatacctgatccgtccgtgttgacgtcatcagcttcccaagacaaggaaaacaaaaacgaagaccaaacgggctgcgaagactatatttccgatctctgtttcgtgcatactaggctgcaggggcaagatttttctccttcaaagttcatgcttctaaggagaactcttgagaagcacttcaactcatccacttttagagtcgggagctctaatgcaacgggtcatgcttctgattcgctggttccttcaagcacgaaagttgaagatttaacctccagtcggcaggacatatttcttcttcccctgagagggcacgacgactcgacaaagtttgagtatggaacgtactcgtgcatgctaggcatgatccgtgatcagatcctgtcatggccggcgaggtcattctcgaagaacctctcggagcgtgactggctgaggagctcagcgaggatctgggacatggtgaagaagtcccccgtcatctcggagtactgcaaggcgctccagagctcaggatggtttaggaagcaaccgtagtagtgtctagcagctacttgttgggatgcgcccgctttggccggcttggaaaaccagagaatcgccatcagatcaaatgaattcgcttgctctgttctgttcaatcagtcgactctgatgagataccgtgcatgtgtttgttagtttgttgggctttgtgtaatgagctcagagccagcgacagcaggtggcagtcagtcgtgtacggctcatgcttctctgcgtgtcctgtgctatgatttgaggctgtttcatgcgacgtctcataaatttcatcttctaaaaaatatatatttactgttctttacagcactttcaaaaaaattacatctctatatctttt

SEQ ID NO: 57732 - DNA, 1638 bp, Zea Mays
ttcgttgctaggtcagcgttggtcgcctggattaatccattattttgggcacttgtttctgaatgtcgcatgtgttggttttagttctctagactagaaaaggcctcctctgatcgctgagttatttctaatttgttagcgcttcaccattccgtagatacacttcctcgcatgataatcgcgagatgttatatttggctttatactgatcatgcctatatatgcatctgtgatgtgaattgtgattcatcgagcaacacggggcttctgcagttggagattgggttttaaatagtgatgaatatctgacggagaacaatgatttcatggtgattggggtaattgggccgcccggtgtaggcaagtcgaccatcatgaacgagctttatggatatgatgcgagctcacctggaatgcttcctccttttcctacacaaactgaggaaaccagattgatggggaaacactgtactactggtattgacatcaggatatctaatgagcgagttatactccttgacgctcagcctgtgtacagtccctctgttctaatcgatatgatgaggccagatggttcatccacaattcctgtccttaatggtgaacccttatcagcagacttagctcatgagctaatgggaatccagattggtgttttcttggcatctgtttgtaatatagtgttggtcgtgtcagaaggtatgaatgatttgtccatgtgggagctcatgcttacagttgatttattgaagcacgggatacctgatccgtccgtgttgacgtcatcagcttcccaagacaaggaaaacaaaaacgaagaccaaacgggctgcgaagactatatttccgatctctgtttcgtgcatactaggctgcaggggcaagatttttctccttcaaagttcatgcttctaaggagaactcttgagaagcacttcaactcatccacttttagagtcgggagctctaatgcaacgggtcatgcttctgattcgctggttccttcaagcacgaaagttgaagatttaacctccagtcggcaggacatatttcttcttcccctgagagggcacgacgactcgacaaagtttgagtatggaacgtactcgtgcatgctaggcatgatccgtgatcagatcctgtcatggccggcgaggtcattctcgaagaacctctcggagcgtgactggctgaggagctcagcgaggatctgggacatggtgaagaagtcccccgtcatctcggagtactgcaaggcgctccagagctcaggatggtttaggaagcaaccgtagtagtgtctagcagctacttgttgggatgcgcccgctttggccggcttggaaaaccagagaatcgccatcagatcaaatgaattcgcttgctctgttctgttcaatcagtcgactctgatgagataccgtgcatgtgtttgttagtttgttgggctttgtgtaatgagctcagagccagcgacagcaggtggcagtcagtcgtgtacggctcatgcttctctgcgtgtcctgtgctatgatttgaggctgtttcatgcgacgtctcataaatttcatcttctaaaaaatatatatttactgttctttacagcactttcaaaaaaattacatctctatatctttt

SEQ ID NO: 57733 - DNA, 2295 bp, Zea Mays
ctgatcgctgagttatttctaatttgttagcgcttcaccattccgtagatacacttcctcgcatgataatcgcgagatgttatatttggctttatactgatcatgcctatatatgcatctgtgatgtgaattgtgattcatcgagcaacacggggcttctgcagttggagattgggttttaaatagtgatgaatatctgacggagaacaatgatttcatggtgattggggtaattgggccgcccggtgtaggcaagtcgaccatcatgaacgagctttatggatatgatgcgagctcacctggaatgcttcctccttttcctacacaaactgaggaaaccagattgatggggaaacactgtactactggtattgacatcaggatatctaatgagcgagttatactccttgacgctcagcctgtgtacagtccctctgttctaatcgatatgatgaggccagatggttcatccacaattcctgtccttaatggtgaacccttatcagcagacttagctcatgagctaatgggaatccaggaattgctgtagattggtgttttcttggcatctgtttgtaatatagtgttggtcgtgtcagaaggtatgaatgatttgtccatgtgggagctcatgcttacagtaagttttctcatctacaatttgtactttctgtctttctttcattagcccatctggaagaaccgaggaagttatgcctttaggtttttggttcaggatctgagttttcacctattgacctaatttcaaagaaaattgagatgcagttctagctttgtaatgattctatcacattctcatcatacttgtttctcccacccgtttttttttctgtatcccaaatagtttacaacttggcttttgggacctggcagtaatgcaataggctgaatggatgttccaatacatttcttatgcctgtaggttttttgactttttggttcaagatctgagttttcacctattgaccttatttcaaagaaaattgagctgcagttctagccttgtaatgattctatcacattctcatcatacctgtttctcccacccgtttttcccctgtatcccaaatagtttacaataacttggcttttgggacctggcagtaatgcaataggttgaatggatgttccgatacattgcttatgcctgtaggtttttggttcaggatctaagttttcacctattgacctaatttcaaagaaaaattgagctgcagttctagctttgtaatgattctatcccaatcccatcatacttgtttctcccaccacatttttctgtattttacagcaacttggctttcaggacatggcagtaatgcagaaggctgaatggcagaaggctgaatggatgttccaatacatttatgcaggttgatttattgaagcacgggatacctgatccgtccgtgttgacgtcatcagcttcccaagacaaggaaaacaaaaacgaagaccaaacgggctgcgaagactatatttccgatctctgtttcgtgcatactaggctgcaggggcaagatttttctccttcaaagttcatgcttctaaggagaactcttgagaagcacttcaactcatccacttttagagtcgggagctctaatgcaacgggtcatgcttctgattcgctggttccttcaagcacgaaagttgaagatttaacctccagtcggcaggacatatttcttcttcccctgagagggcacgacgactcgacaaagtttgagtatggaacgtactcgtgcatgctaggcatgatccgtgatcagatcctgtcatggccggcgaggtcattctcgaagaacctctcggagcgtgactggctgaggagctcagcgaggatctgggacatggtgaagaagtcccccgtcatctcggagtactgcaaggcgctccagagctcaggatggtttaggaagcaaccgtagtagtgtctagcagctacttgttgggatgcgcccgctttggccggcttggaaaaccagagaatcgccatcagatcaaatgaattcgcttgctctgttctgttcaatcagtcgactctgatgagataccgtgcatgtgtttgttagtttgttgggctttgtgtaatgagctcagagccagcgacagcaggtggcagtcagtcgtgtacggctcatgcttctctgcgtgtcctgtgctatgatttgaggctgtttcatgcgacgtctcataaatttcatcttctaaaaaatatatatttactgttctttacagcactttcaaaaaaattacatctctatatctttt

SEQ ID NO: 57734 - DNA, 1539 bp, Zea Mays
ctcgcatgataatcgcgagatgttatatttggctttatactgatcatgcctatatatgcatctgtgatgtgaattgtgattcatcgagcaacacggggcttctgcagttggagattgggttttaaatagtgatgaatatctgacggagaacaatgatttcatggtgattggggtaattgggccgcccggtgtaggcaagtcgaccatcatgaacgagctttatggatatgatgcgagctcacctggaatgcttcctccttttcctacacaaactgaggaaaccagattgatggggaaacactgtactactggtattgacatcaggatatctaatgagcgagttatactccttgacgctcagcctgtgtacagtccctctgttctaatcgatatgatgaggccagatggttcatccacaattcctgtccttaatggtgaacccttatcagcagacttagctcatgagctaatgggaatccagattggtgttttcttggcatctgtttgtaatatagtgttggtcgtgtcagaaggtatgaatgatttgtccatgtgggagctcatgcttacagacatggcagtaatgcagaaggctgaatggcagaaggctgaatggatgttccaatacatttatgcaggttgatttattgaagcacgggatacctgatccgtccgtgttgacgtcatcagcttcccaagacaaggaaaacaaaaacgaagaccaaacgggctgcgaagactatatttccgatctctgtttcgtgcatactaggctgcaggggcaagatttttctccttcaaagttcatgcttctaaggagaactcttgagaagcacttcaactcatccacttttagagtcgggagctctaatgcaacgggtcatgcttctgattcgctggttccttcaagcacgaaagttgaagatttaacctccagtcggcaggacatatttcttcttcccctgagagggcacgacgactcgacaaagtttgagtatggaacgtactcgtgcatgctaggcatgatccgtgatcagatcctgtcatggccggcgaggtcattctcgaagaacctctcggagcgtgactggctgaggagctcagcgaggatctgggacatggtgaagaagtcccccgtcatctcggagtactgcaaggcgctccagagctcaggatggtttaggaagcaaccgtagtagtgtctagcagctacttgttgggatgcgcccgctttggccggcttggaaaaccagagaatcgccatcagatcaaatgaattcgcttgctctgttctgttcaatcagtcgactctgatgagataccgtgcatgtgtttgttagtttgttgggctttgtgtaatgagctcagagccagcgacagcaggtggcagtcagtcgtgtacggctcatgcttctctgcgtgtcctgtgctatgatttgaggctgtttcatgcgacgtctcataaatttcatcttctaaaaaatatatatttactgttctttacagcactttcaaaaaaattacatctctatatctttt

SEQ ID NO: 57735 - DNA, 1455 bp, Zea Mays
tggctttatactgatcatgcctatatatgcatctgtgatgtgaattgtgattcatcgagcaacacggggcttctgcagttggagattgggttttaaatagtgatgaatatctgacggagaacaatgatttcatggtgattggggtaattgggccgcccggtgtaggcaagtcgaccatcatgaacgagctttatggatatgatgcgagctcacctggaatgcttcctccttttcctacacaaactgaggaaaccagattgatggggaaacactgtactactggtattgacatcaggatatctaatgagcgagttatactccttgacgctcagcctgtgtacagtccctctgttctaatcgatatgatgaggccagatggttcatccacaattcctgtccttaatggtgaacccttatcagcagacttagctcatgagctaatgggaatccaggaattgctgtagattggtgttttcttggcatctgtttgtaatatagtgttggtcgtgtcagaaggtatgaatgatttgtccatgtgggagctcatgcttacagttgatttattgaagcacgggatacctgatccgtccgtgttgacgtcatcagcttcccaagacaaggaaaacaaaaacgaagaccaaacgggctgcgaagactatatttccgatctctgtttcgtgcatactaggctgcaggggcaagatttttctccttcaaagttcatgcttctaaggagaactcttgagaagcacttcaactcatccacttttagagtcgggagctctaatgcaacgggtcatgcttctgattcgctggttccttcaagcacgaaagttgaagatttaacctccagtcggcaggacatatttcttcttcccctgagagggcacgacgactcgacaaagtttgagtatggaacgtactcgtgcatgctaggcatgatccgtgatcagatcctgtcatggccggcgaggtcattctcgaagaacctctcggagcgtgactggctgaggagctcagcgaggatctgggacatggtgaagaagtcccccgtcatctcggagtactgcaaggcgctccagagctcaggatggtttaggaagcaaccgtagtagtgtctagcagctacttgttgggatgcgcccgctttggccggcttggaaaaccagagaatcgccatcagatcaaatgaattcgcttgctctgttctgttcaatcagtcgactctgatgagataccgtgcatgtgtttgttagtttgttgggctttgtgtaatgagctcagagccagcgacagcaggtggcagtcagtcgtgtacggctcatgcttctctgcgtgtcctgtgctatgatttgaggctgtttcatgcgacgtctcataaatttcatcttctaaaaaatatatatttactgttctttacagcactttcaaaaaaattacatctctatatctttt

SEQ ID NO: 57736 - DNA, 1033 bp, Zea Mays
acccatcgcacacccctgctcacgaaaccgtaggcatcgccgcctccccatacctacgaaactagcatcccgcggcggcgatggccaccggcgacaacgacaagcccccgtcgcttgacgcagacgtcgacatggccgacctagcttccctcgacgccacggccgctacatccgccgccgcgggcggcgcgccttccacccgcttccgtcccaaggccaaggggaagcccaggccgaaggctgagcctcccagacccgtaccagttgccgtacccaagcccttcgaagacgacacccagctgtacattatgcagtaccccctgaggccatgttggcgcccatatgagttacatgagatatgtgaagaggttcgtgtgaagccattgagttcagaagttgaagttgatttgagtatcaatacacagagtgaaaattatgaccaagaggcacctttgaggctgacaaaacagacactatcgtcatccaaggcagttgatgttactaattacgcggttggagttcttaatggcaacttggtccatttgaatcatattgatgcagtggtgcaaatgcgaccatcaatgtcacatattatttctggccgagcacatactaggcaggcttcacaaccccgggaaatgaatgggggagctagtacctcgatggattcatctcataagggaaatgagcgccctgaagattccaaggaccgagcagaagattctgagccatggatttctctcatctaccaaccagcaggaagcaatactgcaactaagtaccatgataagatgatagcaaatgagggtgtgcctattgatttcacaatgagctcctcttgttatttgacgtccttgtgtcctggggcctctactagcagaaagcgtatcaacaaattccaagcaataagggcgccacaagctgctgaacctgaaggcgcgggagccaaactggacaatgtgggccgttcaaaggagaaagaggagccagctgagccaaggagaggtacacgtgagcgtaagttgaaccagag

SEQ ID NO: 57737 - DNA, 970 bp, Zea Mays
acccatcgcacacccctgctcacgaaaccgtaggcatcgccgcctccccatacctacgaaactagcatcccgcggcggcgatggccaccggcgacaacgacaagcccccgtcgcttgacgcagacgtcgacatggccgacctagcttccctcgacgccacggccgctacatccgccgccgcgggcggcgcgccttccacccgcttccgtcccaaggccaaggggaagcccaggccgaaggctgagcctcccagacccgtaccagttgccgtacccaagcccttcgaagacgacacccagctgtacattatgcagtaccccctgaggccatgttggcgcccatatgagttacatgagatatgtgaagaggttcgtgtgaagccattgagttcagaagttgaagttgatttgagtatcaatacacagagtgaaaattatgaccaagaggcacctttgaggctgacaaaacagacactatcgtcatccaaggcagttgatgttactaattacgcggttggagttcttaatggcaacttggtccatttgaatcatattgatgcagtggtgcaaatgcgaccatcaatgtcacatattatttctggccgagcacatactaggcaggcttcacaaccccgggaaatgaatgggggagctagtacctcgatggattcatctcataagggaaatgagcgccctgaagattccaaggaccgagcagaagattctgagccatggatttctctcatctaccaaccagcaggaagcaatactgcaactaagtaccatgataagatgatagcaaatgagggtgtgcctattgatttcacaatgagctcctcttgttatttgacgtccttgtgtcctggggcctctactagcagaaagcgtatcaacaaattccaagcaataagggcgccacaagctgctgaacctgaaggcgcgggagccaaactggacaatgtgggccgttc

SEQ ID NO: 57738 - DNA, 2486 bp, Zea Mays
acccatcgcacacccctgctcacgaaaccgtaggcatcgccgcctccccatacctacgaaactagcatcccgcggcggcgatggccaccggcgacaacgacaagcccccgtcgcttgacgcagacgtcgacatggccgacctagcttccctcgacgccacggccgctacatccgccgccgcgggcggcgcgccttccacccgcttccgtcccaaggccaaggggaagcccaggccgaaggctgagcctcccagacccgtaccagttgccgtacccaagcccttcgaagacgacacccagctgtacattatgcagtaccccctgaggccatgttggcgcccatatgagttacatgagatatgtgaagaggttcgtgtgaagccattgagttcagaagttgaagttgatttgagtatcaatacacagagtgaaaattatgaccaagaggcacctttgaggctgacaaaacagacactatcgtcatccaaggcagttgatgttactaattacgcggttggagttcttaatggcaacttggtccatttgaatcatattgatgcagtggtgcaaatgcgaccatcaatgtcacatattatttctggccgagcacatactaggcaggcttcacaaccccgggaaatgaatgggggagctagtacctcgatggattcatctcataagggaaatgagcgccctgaagattccaaggaccgagcagaagattctgagccatggatttctctcatctaccaaccagcaggaagcaatactgcaactaagtaccatgataagatgatagcaaatgagggtgtgcctattgatttcacaatgagctcggagatgcttttgctaccactggaagaacgcctcaagaaatggtttactgaggtttcaggagtaaatcgatttgatgctctgaaggaccttgctccaacctgttcagaggttgaaattttgaaaatgcttccagagtgtgcatatttggtgcgtggattgtgggtctgcaaaagttctttgttgtttgatggtgtatattctggtcccatggatagaattcttcttgagtttacaaaaagggatcccgtcccatcaaatattctggaaccatttatcaatctgattggcaatcgtgctatgagagactggatactgtctccattgtgtaaaagacgtcaaattctgaaggaccataaatttatatcggcagatttgtctttcataaaacgctatccgcatatagtcaatgaacaagagtgtgcttggtctgctcgggagaccactctccgtgagtccctagaaatgagcactactttggcaaagaagaccatgaattcaaccagacctaatgttgcttctaaagggcctcattcaaatatgagcaagggcagggatggcccatctcaaggaagtgatgaccttgcgcgatctgttttgggcactgttttcactgccaataaagttcgcagcatgcaggcagttgttagagacttgcgccagttggctgcaaaatatgcttccaatagaaaggatggatccaaactgcaagctctgtgcaatgctgcaaaaaattgtgcatcgctgcctcatgatgagctgaatcgaaaaatacatctagttgctgttcctgttcatagtgtttttgttgcaaagcatgaggataagcgagctctacgaaacatatttattttgctcttccgtcacaaagaacccaatggaacattgactaagcaggaagttgttgctgctgctgcgaaacatataaaaagagagattactgacagagagtaccatcagaagatgggcacttgctgttgaaaaatggtgatgagccctgagttcgctatgatatgccctgtgaaggtccaccaaggtggaatcgtctctgatgcgtagaatagggtcattcggagtttgggatttggccggtgagaatgagtattgatcaggcagttcaagatagctacagcaaactgttctaggtggctttgtcagccatttttggctcagcagtttttgctgggtgctaattgagcggtgtttttcggttagtcgtctttatttgtgtccattgaatccttgctggtctagcttggcgtaattcagttagggatgttattttgtcttttaagtgctgatattgtctgccttaagtaaagtaaagtggaaaccatgaaccaattcctcttttcttctgtctttggtttagagttcgataaattttttgctaccatttcctctcgggtaaactcgtttttggcatcttttcattttatggaagaagagggtagaaattggtggtttacgggagtttattgtggaccgcaagatgatgaatacaagctactgttcattcaagaatcaagagctcagggatgtgaaggccttgtgtcctggtatgtggcttttggttggatacttcaatctaatataacaggtcgagaacaacaccattgctaacctcaacagacctatgatggggaggttttg

SEQ ID NO: 57739 - DNA, 2561 bp, Zea Mays
acccatcgcacacccctgctcacgaaaccgtaggcatcgccgcctccccatacctacgaaactagcatcccgcggcggcgatggccaccggcgacaacgacaagcccccgtcgcttgacgcagacgtcgacatggccgacctagcttccctcgacgccacggccgctacatccgccgccgcgggcggcgcgccttccacccgcttccgtcccaaggccaaggggaagcccaggccgaaggctgagcctcccagacccgtaccagttgccgtacccaagcccttcgaagacgacacccagctgtacattatgcagtaccccctgaggccatgttggcgcccatatgagttacatgagatatgtgaagaggttcgtgtgaagccattgagttcagaagttgaagttgatttgagtatcaatacacagagtgaaaattatgaccaagaggcacctttgaggctgacaaaacagacactatcgtcatccaaggcagttgatgttactaattacgcggttggagttcttaatggcaacttggtccatttgaatcatattgatgcagtggtgcaaatgcgaccatcaatgtcacatattatttctggccgagcacatactaggcaggcttcacaaccccgggaaatgaatgggggagctagtacctcgatggattcatctcataagggaaatgagcgccctgaagattccaaggaccgagcagaagattctgagccatggatttctctcatctaccaaccagcaggaagcaatactgcaactaagtaccatgataagatgatagcaaatgagggtgtgcctattgatttcacaatgagctcctcttgttatttgacgtccttgtgtcctggggcctctactagcagaaagcgtatcaacaaattccaagcaataagggagatgcttttgctaccactggaagaacgcctcaagaaatggtttactgaggtttcaggagtaaatcgatttgatgctctgaaggaccttgctccaacctgttcagaggttgaaattttgaaaatgcttccagagtgtgcatatttggtgcgtggattgtgggtctgcaaaagttctttgttgtttgatggtgtatattctggtcccatggatagaattcttcttgagtttacaaaaagggatcccgtcccatcaaatattctggaaccatttatcaatctgattggcaatcgtgctatgagagactggatactgtctccattgtgtaaaagacgtcaaattctgaaggaccataaatttatatcggcagatttgtctttcataaaacgctatccgcatatagtcaatgaacaagagtgtgcttggtctgctcgggagaccactctccgtgagtccctagaaatgagcactactttggcaaagaagaccatgaattcaaccagacctaatgttgcttctaaagggcctcattcaaatatgagcaagggcagggatggcccatctcaaggaagtgatgaccttgcgcgatctgttttgggcactgttttcactgccaataaagttcgcagcatgcaggcagttgttagagacttgcgccagttggctgcaaaatatgcttccaatagaaaggatggatccaaactgcaagctctgtgcaatgctgcaaaaaattgtgcatcgctgcctcatgatgagctgaatcgaaaaatacatctagttgctgttcctgttcatagtgtttttgttgcaaagcatgaggataagcgagctctacgaaacatatttattttgctcttccgtcacaaagaacccaatggaacattgactaagcaggaagttgttgctgctgctgcgaaacatataaaaagagagattactgacagagagtaccatcagaagatgggcacttgctgttgaaaaatggtgatgagccctgagttcgctatgatatgccctgtgaaggtccaccaaggtggaatcgtctctgatgcgtagaatagggtcattcggagtttgggatttggccggtgagaatgagtattgatcaggcagttcaagatagctacagcaaactgttctaggtggctttgtcagccatttttggctcagcagtttttgctgggtgctaattgagcggtgtttttcggttagtcgtctttatttgtgtccattgaatccttgctggtctagcttggcgtaattcagttagggatgttattttgtcttttaagtgctgatattgtctgccttaagtaaagtaaagtggaaaccatgaaccaattcctcttttcttctgtctttggtttagagttcgataaattttttgctaccatttcctctcgggtaaactcgtttttggcatcttttcattttatggaagaagagggtagaaattggtggtttacgggagtttattgtggaccgcaagatgatgaatacaagctactgttcattcaagaatcaagagctcagggatgtgaaggccttgtgtcctggtatgtggcttttggttggatacttcaatctaatataacaggtcgagaacaacaccattgctaacctcaacagacctatgatggggaggttttg

SEQ ID NO: 57740 - DNA, 1712 bp, Zea Mays
gctgattttcctgcgcggtgtgctcatcttgtcgccagatctttttcctttcctgtatgagcgctcactccctcatctccctcctcagccagcactcgcctctggccatggacatcagcgcagcagcgcgtggtagaggccctccgacctccgagttgacctccggtcggcgtcgtttctctagtccccaactcgacgtcctcctctgccgcggcctcccactcctcctgacgcgcgttcctcccctacgcttggccatggtcaccgcgagccgtgaatttccctgcgcgcgtgcacccatgccaagctcccagcgtcgccccccctccctctgctcgctcagcgcccttatcttacggcgcctggccggagctccctcaagctcgtcgtgcccctacttttcacaaccgtcgctcttccagcccggatctcgttcctgttcgccggtcctccccgtcctagttcgatcacatgcctgggcactgtgttatgcaccctcgccggtctcctcgcctccatcacccacggcaacgtgctcttgcttgggccccttgtcgcaactcgagttgtcctttctggctagccaccagtgtgtcgtccagggccgaccggggacgattcttcactattgcttctccacggccgtcaccttccatgcccggcgttcccctctcttcctttgccgcgatgctccctcgctcctgctgctcgccgtggctgactccctgtcgcgctcgcccaggtcgccaccgtcgagttctctcgccgagtcctctccctgctcgctcgtcctcggttccggccagatcttatgcgcgtgattttgaagctctgcgcattcatcgtgttgcgttgtgtgccgatattatctctcggcagacctcgccgtcgaccatgttcaagtgcttgcttggctcctcacctcctttgcatcctcctcggtagaccgcttgctctgcttcagctcgcgtccatggatgtcgtgccgcgctatcatcacctccttttatgaattcaatccccactgtcgtcgctgctacgtgcctcgttgcgtgcttaccgggtgtcgtctgttgtaccccagcactcgtgcttgcccctagcttgcgttagcgctcgcgcgcctgcttgttgtcattgcggcacactcgctcttcgtccatcgggcttcgcgcaggctcgcctttgctgtcgagctgttgaacccgtcctcccttgctcgtgactttgtcgtcgccagctcactccagactcgatctcgtcgtcgttccgtgcgtcatcaagaaatcccaagaatcgggtgaagacgaagctagcagcgtgatgttcaccaagtactcgacgtaagggctgaaccagaatccttgtcgtgttcgcggatagcgcgtcagagttagtatggtaaaccaattcatatttttgttagcttaattattggcttgatgaatagattgtgtacataagtataaagtggtcgtgtcaagcgaaactcaagtttaaaatgattagtgtgcaaggagaattaatagcgtgaagaattgatttagtaatccaaatgattatccgataaggctgtcatcattgattttgtaggatattttggtagtcaaacctgaaatgtttgattaatcgttgacatgtaaaatatgtgaggtgtgaaataaaattaaaatagttctttgtgagcgatgtggtataatttataaagcgag

SEQ ID NO: 57741 - DNA, 1502 bp, Zea Mays
gctgattttcctgcgcggtgtgctcatcttgtcgccagatctttttcctttcctgtatgagcgctcactccctcatctccctcctcagccagcactcgcctctggccatggacatcagcgcagcagcgcgtggtagaggccctccgacctccgagttgacctccggtcggcgtcgtttctctagtccccaactcgacgtcctcctctgccgcggcctcccactcctcctgacgcgcgttcctcccctacgcttggccatggtcaccgcgagccgtgaatttccctgcgcgcgtgcacccatgccaagctcccagcgtcgccccccctccctctgctcgctcagcgcccttatcttacggcgcctggccggagctccctcaagctcgtcgtgcccctacttttcacaaccgtcgctcttccagcccggatctcgttcctgttcgccggtcctccccgtcctagttcgatcacatgcctgggcactgtgttatgcaccctcgccggtctcctcgcctccatcacccacggcaacgtgctcttgcttgggccccttgtcgcaactcgagttgtcctttctggctagccaccagtgtgtcgtccagggccgaccggggacgattcttcactattgcttctccacggccgtcaccttccatgcccggcgttcccctctcttcctttgccgcgatgctccctcgctcctgctgctcgccgtggctgactccctgtcgcgctcgcccaggtcgccaccgtcgagttctctcgccgagtcctctccctgctcgctcgtcctcggttccggccagatcttatgcgcgtgattttgaagctctgcgcattcatcgtgttgcgttgtgtgccgatattatctctcggcagacctcgccgtcgaccatgttcaagtgcttgcttggctcctcacctcctttgcatcctcctcggtagaccgcttgctctgcttcagctcgcgtccatggatgtcgtgccgcgctatcatcacctccttttatgaattcaatccccactgtcgtcgctgctacgtgcctcgttgcgtgcttaccgggtgtcgtctgttgtaccccagcactcgtgcttgcccctagcttgcgttagcgctcgcgcgcctgcttgttgtcattgcggcacactcgctcttcgtccatcgggcttcgcgcaggctcgcctttgctgtcgagctgttgaacccgtcctcccttgctcgtgactttgtcgtcgccagctcactccagactcgatctcgtcgtcgttccgtgcgtcatcaagaaatcccaagaatcgggtgaagacgaagctagcagcgtgatgttcaccaagtactcgacgtacgtgaattaaccacatgatgtggaagacgagccaagtagaccccaagcgagaactactccgcatggtgatgctaatggacgaacctgcctgatcaagtgctaggacaaaggatggtcgcgagctaacaaacactaacctagtgttatccaggcaag

SEQ ID NO: 57742 - DNA, 1211 bp, Zea Mays
atatatgccttcgttcctcgatcgtcagccgccgccagttcctttgccggttcgcgcaccacgcaacgcaagtgctcttcccttcttctctctcggttctcgccttctcggccctcctcctctattcttccctctcgtccacggccacaggctagccggccttgagcgcctgtgacggcgcaggttctggggttgcaacacgcccctccgcccttccggcgcatctgctgaattccactctcctcttgcccgccggcgtcgcctcttttctttgctatcgtcggcctcggaccccaaagacgacaacagcaggagggcagcgcacctgtgaaagcggcgcctctcttgccgttaaatttccgcgtcgcctggcttctcttccgcactctgctttcaagcccctctgccatgaccgtgcccaccaaagacgacagccaaagcggcacggtggccgacacagtgccattaccgacataccgttcgttagcagcgccggtgaggaagcctgtcgacaagttcgcgctcctcccggccttcctcaaggttagagggcttgtgaaggagcacatcgactcatttaactactttgtcaacaaaggaatcaagaagatcgttgaggcaaacaaccgaattgaagcgcgcaacgatccatccatttaccttaggtatgcttgtcaatttgtgtaatatgtattctaactattgttaaatatctattttgttgtcacattgcaggtaccttggtgtgcatgttggcatgccctcggtacatgtagagtataacattgaaaatatcacaccacatttttgccgccttactgaccgcacttactctgctcccataaaagttcatatcgaatacactgtcggaaagcagcatgaagtgagaagaaagaataactttatcattggctacatgcctattatgctaagaagccatgcctgtattctgtatgaaaaggatgaagctgaactagcaaaatatggtgagtgccctcttgatcctggcggctactttgttgtcaaaggaacagagaaggtcattctaattcaagaacagctagcaaagaatcgtattattgttgacactgatagcaaaggaagattcctattatagtggtgatgaaagcgatgggaatggaaagtgatcaggagactgtacaaatggttggcagggacccaagatacggagatctcttatttccatctat

SEQ ID NO: 57743 - DNA, 4242 bp, Zea Mays
atatatgccttcgttcctcgatcgtcagccgccgccagttcctttgccggttcgcgcaccacgcaacgcaagtgctcttcccttcttctctctcggttctcgccttctcggccctcctcctctattcttccctctcgtccacggccacaggctagccggccttgagcgcctgtgacggcgcaggttctggggttgcaacacgcccctccgcccttccggcgcatctgctgaattccactctcctcttgcccgccggcgtcgcctcttttctttgctatcgtcggcctcggaccccaaagacgacaacagcaggagggcagcgcacctgtgaaagcggcgcctctcttgccgttaaatttccgcgtcgcctggcttctcttccgcactctgctttcaagcccctctgccatgaccgtgcccaccaaagacgacagccaaagcggcacggtggccgacacagtgccattaccgacataccgttcgttagcagcgccggtgaggaagcctgtcgacaagttcgcgctcctcccggccttcctcaaggttagagggcttgtgaaggagcacatcgactcatttaactactttgtcaacaaaggaatcaagaagatcgttgaggcaaacaaccgaattgaagcgcgcaacgatccatccatttaccttaggtaccttggtgtgcatgttggcatgccctcggtacatgtagagtataacattgaaaatatcacaccacatttttgccgccttactgaccgcacttactctgctcccataaaagttcatatcgaatacactgtcggaaagcagcatgaagtgagaagaaagaataactttatcattggctacatgcctattatgctaagaagccatgcctgtattctgtatgaaaaggatgaagctgaactagcaaaatatggtgagtgccctcttgatcctggcggctactttgttgtcaaaggaacagagaaggtcattctaattcaagaacagctagcaaagaatcgtattattgttgacactgatagcaaaggaagggtgatcgcatctgttaccagtagcacgcatgcaataaaaagcaagacggtgatttttatggataaggggaagatttatttacagctgaatcagttcaacaagccaattcctattatagtggtgatgaaagcgatgggaatggaaagtgatcaggagactgtacaaatggttggcagggacccaagatacggagatctcttatttccatctattcaggaatgtgcttcagagagaatatatacacgccagcgagccctgcagtacatggatgagaaggtgacgtatcctggtgccacaaatcagaaggaaggtcggtcatactcaatcctccgtgatgtgtttattgcccatgtgccggttaaaaatgggaacctacgaccaaagtgtatatacactgccttaatgttaaggcgcatgatggacgcaatcgtaaattctgacacctttgatgataaggacctattcaaaacaatgaattcccaagctgttgagcgcatgaataaaaatagtgacaagactcactctagtcctttggattttagccagttgataatgcaagattccattacctttggtctggaaagggctatttccacaggaaattgggatattaaacgttttaggatgcataggaaaggtgtatctcaggttctttcgaggctatcctacatggcatctttaggctatatgacgcggataacaccccaatttgagaagactcgtaaaacaagtggtccacgtgctttgcagcctagtcagtggggtatgctctgcccatgtgatactcctgaaggagaagcttgtggattgacaaaaaatttagctttgctttctcatgtcacaacagaccaagaggaaggcccactgatatatctgtgttatagtctaggcgtggaggatttattgtctctctcatctgaagaaattcatacgccgggttcatttctggtcatgttcaatggattaatactggggaaacacaaagatcctcagaggcttgttattgatttgaggaatttacgtcgatctaatgtaattggagagtttgtaagcatttttattaatgagaaacagcattgcgttcacattgcctctgatggtggccgtgtttgtcgcccacttataattgctgatatggggatatcaaggatcgatgagactcacatggaaaaactgaggcatggaacttgtggttttgatgatttcctgcgtgatgggttgattgaatatcttgatgttaatgaagaaaacaatgcactgattgcattgtatgagcacatggatcaagatgatgttgaaagaagcagcatcacacacattgaaatagagccattgagtatcttaggggttgtatctggacttattccatatccacaccataaccaatctccacgtaatacttaccagtgtgcaatgggtaagcaagcgatgggaaatattgcatataatcagttgttcagagcagattcactactgtacttactagtgtatgcacaacggccactgctaacgacgaaaactattgagttggtggggtatgataaacttggcgctgggcagaacgccactgttgctgtcatgggatatagtggttatgatattgaagatgcaattgtgatgaacaagtcatcccttgatcgaggatttggccgttgcatagcattgaaaaagtacacagttttaaaggataactatggagatggtgtatccgatatgattgttgaaccccaaagagataatggtgttttgattaaacagaatatgagagcgttggatgaagatggaattgccggacctggtcaaattattcgcaatcatgatatctatgtaaacaagcgaactcccaaaaacacttcaaaaggtattggtagggcattgagagaaagtgactacaaggactcacctgccttgtacaaaggtgttgatggtgagactactgtggtagatcgtgtaatgctgtgctcagatacaaatgataagttatccattaagtgtattattcgtcacactagaaggccagaggttggtgacaaattcagtagcagacatgggcagaaaggtgtctgtggtacgattgttcagcaagaagacttccccttctctgagagaggaatctgtcctgatttaatcatgaatccacatggtttcccaagtcgtatgacaataggtaaaatgattgaacttcttggtggaaaggctggtgtttcttgtggacggtttcactatggcagtgcatttggtgagccaagtggtaatgctgacaaggttgcagacataagctctactctaatcaagcatggtttcagctataatggaaaagatttcttgtactcaggcattcttggtcagcctcttgaggcatacatcttcatgggaccaatctactatcagaaactaaagcacatggttcttgataagatgcatgctcgagctagtggaccgcgggtgttactgacgaggcaaccaactgaggggcgaagccgtgatggaggcttgcgtcttggtgagatggaacgtgattgtctaattgcatatggcgcgagcatgctaatatttgaacgtctactgttatcaagtgatccttatcaagtccaggtttgcagaaaatgtggcttgttaggctactacaatcacaaactgaagacttcatactgttcaatgtgcaagaatggggaaaacatggccaagatgaggctgccatacgcttgcaagcttctattccaggagttgcatgcaatgaatgtagtaccacgcttgaagttaaccgaagtatgacagatgctgggactgtacaatgagagagatgctggattcgaaatgtgtttagagctatatgataaattaaagccctctttgataggggcatagggcttttttttttttgttaactggttcgagagaaaccacgtttaggtgtgtggtttcagccgtctagctagtctcttcgcgggcttctcttctcccgcggaggtatacaagctatcgccgggcaattgttgtatatatagttttttcccgatgtcatatatgaaggaatctggacctctttgtttagatgatcgctgaacgccctgcagggctagattacgatctttgaatgctgaatcattggcatgtgccattattattctagagtcactcgataacccaccctctatccagataattgcactgacgccccctttgataattacattctaatgatag

SEQ ID NO: 57744 - DNA, 4303 bp, Zea Mays
atatatgccttcgttcctcgatcgtcagccgccgccagttcctttgccggttcgcgcaccacgcaacgcaagtgctcttcccttcttctctctcggttctcgccttctcggccctcctcctctattcttccctctcgtccacggccacaggctagccggccttgagcgcctgtgacggcgcaggttctggggttgcaacacgcccctccgcccttccggcgcatctgctgaattccactctcctcttgcccgccggcgtcgcctcttttctttgctatcgtcggcctcggaccccaaagacgacaacagcaggagggcagcgcacctgtgaaagcggcgcctctcttgccgttaaatttccgcgtcgcctggcttctcttccgcactctgctttcaagcccctctgccatgaccgtgcccaccaaagacgacagccaaagcggcacggtggccgacacagtgccattaccgacataccgttcgttagcagcgccggtgaggaagcctgtcgacaagttcgcgctcctcccggccttcctcaaggttagagggcttgtgaaggagcacatcgactcatttaactactttgtcaacaaaggaatcaagaagatcgttgaggcaaacaaccgaattgaagcgcgcaacgatccatccatttaccttaggtaccttggtgtgcatgttggcatgccctcggtacatgtagagtataacattgaaaatatcacaccacatttttgccgccttactgaccgcacttactctgctcccataaaagttcatatcgaatacactgtcggaaagcagcatgaagtgagaagaaagaataactttatcattggctacatgcctattatgctaagaagccatgcctgtattctgtatgaaaaggatgaagctgaactagcaaaatatggtgagtgccctcttgatcctggcggctactttgttgtcaaaggaacagagaaggtcattctaattcaagaacagctagcaaagaatcgtattattgttgacactgatagcaaaggaagggtgatcgcatctgttaccagtagcacgcatgcaataaaaagcaagacggtgatttttatggataaggggaagatttatttacagctgaatcagttcaacaagccaattcctattatagtggtgatgaaagcgatgggaatggaaagtgatcaggagactgtacaaatggttggcagggacccaagatacggagatctcttatttccatctattcaggaatgtgcttcagagagaatatatacacgccagcgagccctgcagtacatggatgagaaggtgacgtatcctggtgccacaaatcagaagggaaggtcggtcatactcaatcctccgtgatgtgtttattgcccatgtgccggttaaaaatgggaacctacgaccaaagtgtatatacactgccttaatgttaaggcgcatgatggacgcaatcgtaaattctgacacctttgatgataaggattatgttggaaacaagagatttgagttgtctggccaactaatatcccttctttttgaggacctattcaaaacaatgaattcccaagctgttgagcgcatgaataaaaatagtgacaagactcactctagtcctttggattttagccagttgataatgcaagattccattacctttggtctggaaagggctatttccacaggaaattgggatattaaacgttttaggatgcataggaaaggtgtatctcaggttctttcgaggctatcctacatggcatctttaggctatatgacgcggataacaccccaatttgagaagactcgtaaaacaagtggtccacgtgctttgcagcctagtcagtggggtatgctctgcccatgtgatactcctgaaggagaagcttgtggattgacaaaaaatttagctttgctttctcatgtcacaacagaccaagaggaaggcccactgatatatctgtgttatagtctaggcgtggaggatttattgtctctctcatctgaagaaattcatacgccgggttcatttctggtcatgttcaatggattaatactggggaaacacaaagatcctcagaggcttgttattgatttgaggaatttacgtcgatctaatgtaattggagagtttgtaagcatttttattaatgagaaacagcattgcgttcacattgcctctgatggtggccgtgtttgtcgcccacttataattgctgatatggggatatcaaggatcgatgagactcacatggaaaaactgaggcatggaacttgtggttttgatgatttcctgcgtgatgggttgattgaatatcttgatgttaatgaagaaaacaatgcactgattgcattgtatgagcacatggatcaagatgatgttgaaagaagcagcatcacacacattgaaatagagccattgagtatcttaggggttgtatctggacttattccatatccacaccataaccaatctccacgtaatacttaccagtgtgcaatgggtaagcaagcgatgggaaatattgcatataatcagttgttcagagcagattcactactgtacttactagtgtatgcacaacggccactgctaacgacgaaaactattgagttggtggggtatgataaacttggcgctgggcagaacgccactgttgctgtcatgggatatagtggttatgatattgaagatgcaattgtgatgaacaagtcatcccttgatcgaggatttggccgttgcatagcattgaaaaagtacacagttttaaaggataactatggagatggtgtatccgatatgattgttgaaccccaaagagataatggtgttttgattaaacagaatatgagagcgttggatgaagatggaattgccggacctggtcaaattattcgcaatcatgatatctatgtaaacaagcgaactcccaaaaacacttcaaaaggtattggtagggcattgagagaaagtgactacaaggactcacctgccttgtacaaaggtgttgatggtgagactactgtggtagatcgtgtaatgctgtgctcagatacaaatgataagttatccattaagtgtattattcgtcacactagaaggccagaggttggtgacaaattcagtagcagacatgggcagaaaggtgtctgtggtacgattgttcagcaagaagacttccccttctctgagagaggaatctgtcctgatttaatcatgaatccacatggtttcccaagtcgtatgacaataggtaaaatgattgaacttcttggtggaaaggctggtgtttcttgtggacggtttcactatggcagtgcatttggtgagccaagtggtaatgctgacaaggttgcagacataagctctactctaatcaagcatggtttcagctataatggaaaagatttcttgtactcaggcattcttggtcagcctcttgaggcatacatcttcatgggaccaatctactatcagaaactaaagcacatggttcttgataagatgcatgctcgagctagtggaccgcgggtgttactgacgaggcaaccaactgaggggcgaagccgtgatggaggcttgcgtcttggtgagatggaacgtgattgtctaattgcatatggcgcgagcatgctaatatttgaacgtctactgttatcaagtgatccttatcaagtccaggtttgcagaaaatgtggcttgttaggctactacaatcacaaactgaagacttcatactgttcaatgtgcaagaatggggaaaacatggccaagatgaggctgccatacgcttgcaagcttctattccaggagttgcatgcaatgaatgtagtaccacgcttgaagttaaccgaagtatgacagatgctgggactgtacaatgagagagatgctggattcgaaatgtgtttagagctatatgataaattaaagccctctttgataggggcatagggcttttttttttttgttaactggttcgagagaaaccacgtttaggtgtgtggtttcagccgtctagctagtctcttcgcgggcttctcttctcccgcggaggtatacaagctatcgccgggcaattgttgtatatatagttttttcccgatgtcatatatgaaggaatctggacctctttgtttagatgatcgctgaacgccctgcagggctagattacgatctttgaatgctgaatcattggcatgtgccattattattctagagtcactcgataacccaccctctatccagataattgcactgacgccccctttgataattacattctaatgatag

SEQ ID NO: 57745 - DNA, 4278 bp, Zea Mays
atatatgccttcgttcctcgatcgtcagccgccgccagttcctttgccggttcgcgcaccacgcaacgcaagtgctcttcccttcttctctctcggttctcgccttctcggccctcctcctctattcttccctctcgtccacggccacaggctagccggccttgagcgcctgtgacggcgcaggttctggggttgcaacacgcccctccgcccttccggcgcatctgctgaattccactctcctcttgcccgccggcgtcgcctcttttctttgctatcgtcggcctcggaccccaaagacgacaacagcaggagggcagcgcacctgtgaaagcggcgcctctcttgccgttaaatttccgcgtcgcctggcttctcttccgcactctgctttcaagcccctctgccatgaccgtgcccaccaaagacgacagccaaagcggcacggtggccgacacagtgccattaccgacataccgttcgttagcagcgccggtgaggaagcctgtcgacaagttcgcgctcctcccggccttcctcaaggttagagggcttgtgaaggagcacatcgactcatttaactactttgtcaacaaaggaatcaagaagatcgttgaggcaaacaaccgaattgaagcgcgcaacgatccatccatttaccttaggtaccttggtgtgcatgttggcatgccctcggtacatgtagagtataacattgaaaatatcacaccacatttttgccgccttactgaccgcacttactctgctcccataaaagttcatatcgaatacactgtcggaaagcagcatgaagtgagaagaaagaataactttatcattggctacatgcctattatgctaagaagccatgcctgtattctgtatgaaaaggatgaagctgaactagcaaaatatggtgagtgccctcttgatcctggcggctactttgttgtcaaaggaacagagaaggtcattctaattcaagaacagctagcaaagaatcgtattattgttgacactgatagcaaaggaagggtgatcgcatctgttaccagtagcacgcatgcaataaaaagcaagacggtgatttttatggataaggggaagatttatttacagctgaatcagttcaacaagccaattcctattatagtggtgatgaaagcgatgggaatggaaagtgatcaggagactgtacaaatggttggcagggacccaagatacggagatctcttatttccatctattcaggaatgtgcttcagagagaatatatacacgccagcgagccctgcagtacatggatgagaaggtgacgtatcctggtgccacaaatcagaagggaaggtcggtcatactcaatcctccgtgatgtgtttattgcccatgtgccggttaaaaatgggaacctacgaccaaagtgtatatacactgccttaatgttaaggcgcatgatggacgcaatcgtaaattctgacacctttgatgataaggattatgttggaaacaagagatttgagttgtctggccaactaatatcccttctttttgaggacctattcaaaacaatgaattcccaagctgttgagcgcatgaataaaaatagtgacaagactcactctagtcctttggattttagccagttgataatgcaagattccattacctttggtctggaaagggctatttccacaggaaattgggatattaaacgttttaggatgcataggaaaggtgtatctcaggttctttcgaggctatcctacatggcatctttaggctatatgacgcggataacaccccaatttgagaagactcgtaaaacaagtggtccacgtgctttgcagcctagtcagtggggtatgctctgcccatgtgatactcctgaaggagaagcttgtggattgacaaaaaatttagctttgctttctcatgtcacaacagaccaagaggaaggcccactgatatatctgtgttatagtctaggcgtggaggatttattgtctctctcatctgaagaaattcatacgccgggttcatttctggtcatgttcaatggattaatactggggaaacacaaagatcctcagaggcttgttattgatttgaggaatttacgtcgatctaatgtaattggagagtttgtaagcatttttattaatgagaaacagcattgcgttcacattgcctctgatggtggccgtgtttgtcgcccacttataattgctgatatggggatatcaaggatcgatgagactcacatggaaaaactgaggcatggaacttgtggttttgatgatttcctgcgtgatgggttgattgaatatcttgatgttaatgaagaaaacaatgcactgattgcattgtatgagcacatggatcaagatgatgttgaaagaagcagcatcacacacattgaaatagagccattgagtatcttaggggttgtatctggacttattccatatccacaccataaccaatctccacgtaatacttaccagtgtgcaatgggtaagcaagcgatgggaaatattgcatataatcagttgttcagagcagattcactactgtacttactagtgtatgcacaacggccactgctaacgacgaaaactattgagttggtggggtatgataaacttggcgctgggcagaacgccactgttgctgtcatgggatatagtggttatgatattgaagatgcaattgtgatgaacaagtcatcccttgatcgaggatttggccgttgcatagcattgaaaaagtacacagttttaaaggataactatggagatggtgtatccgatatgattgttgaaccccaaagagataatggtgttttgattaaacagaatatgagagcgttggatgaagatggaattgccggacctggtcaaattattcgcaatcatgatatctatgtaaacaagcgaactcccaaaaacacttcaaaagtgactacaaggactcacctgccttgtacaaaggtgttgatggtgagactactgtggtagatcgtgtaatgctgtgctcagatacaaatgataagttatccattaagtgtattattcgtcacactagaaggccagaggttggtgacaaattcagtagcagacatgggcagaaaggtgtctgtggtacgattgttcagcaagaagacttccccttctctgagagaggaatctgtcctgatttaatcatgaatccacatggtttcccaagtcgtatgacaataggtaaaatgattgaacttcttggtggaaaggctggtgtttcttgtggacggtttcactatggcagtgcatttggtgagccaagtggtaatgctgacaaggttgcagacataagctctactctaatcaagcatggtttcagctataatggaaaagatttcttgtactcaggcattcttggtcagcctcttgaggcatacatcttcatgggaccaatctactatcagaaactaaagcacatggttcttgataagatgcatgctcgagctagtggaccgcgggtgttactgacgaggcaaccaactgaggggcgaagccgtgatggaggcttgcgtcttggtgagatggaacgtgattgtctaattgcatatggcgcgagcatgctaatatttgaacgtctactgttatcaagtgatccttatcaagtccaggtttgcagaaaatgtggcttgttaggctactacaatcacaaactgaagacttcatactgttcaatgtgcaagaatggggaaaacatggccaagatgaggctgccatacgcttgcaagcttctattccaggagttgcatgcaatgaatgtagtaccacgcttgaagttaaccgaagtatgacagatgctgggactgtacaatgagagagatgctggattcgaaatgtgtttagagctatatgataaattaaagccctctttgataggggcatagggcttttttttttttgttaactggttcgagagaaaccacgtttaggtgtgtggtttcagccgtctagctagtctcttcgcgggcttctcttctcccgcggaggtatacaagctatcgccgggcaattgttgtatatatagttttttcccgatgtcatatatgaaggaatctggacctctttgtttagatgatcgctgaacgccctgcagggctagattacgatctttgaatgctgaatcattggcatgtgccattattattctagagtcactcgataacccaccctctatccagataattgcactgacgccccctttgataattacattctaatgatag

SEQ ID NO: 57746 - DNA, 4294 bp, Zea Mays
atatatgccttcgttcctcgatcgtcagccgccgccagttcctttgccggttcgcgcaccacgcaacgcaagtgctcttcccttcttctctctcggttctcgccttctcggccctcctcctctattcttccctctcgtccacggccacaggctagccggccttgagcgcctgtgacggcgcaggttctggggttgcaacacgcccctccgcccttccggcgcatctgctgaattccactctcctcttgcccgccggcgtcgcctcttttctttgctatcgtcggcctcggaccccaaagacgacaacagcaggagggcagcgcacctgtgaaagcggcgcctctcttgccgttaaatttccgcgtcgcctggcttctcttccgcactctgctttcaagcccctctgccatgaccgtgcccaccaaagacgacagccaaagcggcacggtggccgacacagtgccattaccgacataccgttcgttagcagcgccggtgaggaagcctgtcgacaagttcgcgctcctcccggccttcctcaaggttagagggcttgtgaaggagcacatcgactcatttaactactttgtcaacaaaggaatcaagaagatcgttgaggcaaacaaccgaattgaagcgcgcaacgatccatccatttaccttaggtaccttggtgtgcatgttggcatgccctcggtacatgtagagtataacattgaaaatatcacaccacatttttgccgccttactgaccgcacttactctgctcccataaaagttcatatcgaatacactgtcggaaagcagcatgaagtgagaagaaagaataactttatcattggctacatgcctattatgctaagaagccatgcctgtattctgtatgaaaaggatgaagctgaactagcaaaatatggtgagtgccctcttgatcctggcggctactttgttgtcaaaggaacagagaaggtcattctaattcaagaacagctagcaaagaatcgtattattgttgacactgatagcaaaggaagggtgatcgcatctgttaccagtagcacgcatgcaataaaaagcaagacggtgatttttatggataaggggaagatttatttacagctgaatcagttcaacaagccaattcctattatagtggtgatgaaagcgatgggaatggaaagtgatcaggagactgtacaaatggttggcagggacccaagatacggagatctcttatttccatctattcaggaatgtgcttcagagagaatatatacacgccagcgagccctgcagtacatggatgagaaggtgacgtatcctggtgccacaaatcagaaggaaggtcggtcatactcaatcctccgtgatgtgtttattgcccatgtgccggttaaaaatgggaacctacgaccaaagtgtatatacactgccttaatgttaaggcgcatgatggacgcaatcgtaaattctgacacctttgatgataaggattatgttggaaacaagagatttgagttgtctggccaactaatatcccttctttttgaggacctattcaaaacaatgaattcccaagctgttgagcgcatgaataaaaatagtgacaagactcactctagtcctttggattttagccagttgataatgcaagattccattacctttggtctggaaagggctatttccacaggaaattgggatattaaacgttttaggatgcataggaaaggtgtatctcaggttctttcgaggctatcctacatggcatctttaggctatatgacgcggataacaccccaatttgagaagactcgtaaaacaagtggtccacgtgctttgcagcctagtcagtggggtatgctctgcccatgtgatactcctgaaggagaagcttgtggattgacaaaaaatttagctttgctttctcatgtcacaacagaccaagaggaaggcccactgatatatctgtgttatagtctaggcgtggaggatttattgtctctctcatctgaagaaattcatacgccgggttcatttctggtcatgttcaatggattaatactggggaaacacaaagatcctcagaggcttgttattgatttgaggaatttacgtcgatctaatgtaattggagagtttgtaagcatttttattaatgagaaacagcattgcgttcacattgcctctgatggtggccgtgtttgtcgcccacttataattgctgatatggggatatcaaggatcgatgagactcacatggaaaaactgaggcatggaacttgtggttttgatgatttcctgcgtgatgggttgattgaatatcttgatgttaatgaagaaaacaatgcactgattgcattgtatgagcacatggatcaagatgatgttgaaagaagcagcatcacacacattgaaatagagccattgagtatcttaggggttgtatctggacttattccatatccacaccataaccaatctccacgtaatacttaccagtgtgcaatgggtaagcaagcgatgggaaatattgcatataatcagttgttcagagcagattcactactgtacttactagtgtatgcacaacggccactgctaacgacgaaaactattgagttggtggggtatgataaacttggcgctgggcagaacgccactgttgctgtcatgggatatagtggttatgatattgaagatgcaattgtgatgaacaagtcatcccttgatcgaggatttggccgttgcatagcattgaaaaagtacacagttttaaaggataactatggagatggtgtatccgatatgattgttgaaccccaaagagataatggtgttttgattaaacagaatatgagagcgttggatgaagatggaattgccggacctggtcaaattattcgcaatcatgatatctatgtaaacaagcgaactcccaaaaacacttcaaaaggtattggtagggcattgagagaaagtgactacaaggactcacctgccttgtacaaaggtgttgatggtgagactactgtggtagatcgtgtaatgctgtgctcagatacaaatgataagttatccattaagtgtattattcgtcacactagaaggccagaggttggtgacaaattcagtagcagacatgggcagaaaggtgtctgtggtacgattgttcagcaagaagacttccccttctctgagagaggaatctgtcctgatttaatcatgaatccacatggtttcccaagtcgtatgacaataggtaaaatgattgaacttcttggtggaaaggctggtgtttcttgtggacggtttcactatggcagtgcatttggtgagccaagtggtaatgctgacaaggttgcagacataagctctactctaatcaagcatggtttcagctataatggaaaagatttcttgtactcaggcattcttggtcagcctcttgaggcatacatcttcatgggaccaatctactatcagaaactaaagcacatggttcttgataagatgcatgctcgagctagtggaccgcgggtgttactgacgaggcaaccaactgaggggcgaagccgtgatggaggcttgcgtcttggtgagatggaacgtgattgtctaattgcatatggcgcgagcatgctaatatttgaacgtctactgttatcaagtgatccttatcaagtccagaaaatgtggcttgttaggctactacaatcacaaactgaagacttcatactgttcaatgtgcaagaatggggaaaacatggccaagatgaggctgccatacgcttgcaagcttctattccaggagttgcatgcaatgaatgtagtaccacgcttgaagttaaccgaagtatgacagatgctgggactgtacaatgagagagatgctggattcgaaatgtgtttagagctatatgataaattaaagccctctttgataggggcatagggcttttttttttttgttaactggttcgagagaaaccacgtttaggtgtgtggtttcagccgtctagctagtctcttcgcgggcttctcttctcccgcggaggtatacaagctatcgccgggcaattgttgtatatatagttttttcccgatgtcatatatgaaggaatctggacctctttgtttagatgatcgctgaacgccctgcagggctagattacgatctttgaatgctgaatcattggcatgtgccattattattctagagtcactcgataacccaccctctatccagataattgcactgacgccccctttgataattacattctaatgatag

SEQ ID NO: 57747 - DNA, 4302 bp, Zea Mays
atatatgccttcgttcctcgatcgtcagccgccgccagttcctttgccggttcgcgcaccacgcaacgcaagtgctcttcccttcttctctctcggttctcgccttctcggccctcctcctctattcttccctctcgtccacggccacaggctagccggccttgagcgcctgtgacggcgcaggttctggggttgcaacacgcccctccgcccttccggcgcatctgctgaattccactctcctcttgcccgccggcgtcgcctcttttctttgctatcgtcggcctcggaccccaaagacgacaacagcaggagggcagcgcacctgtgaaagcggcgcctctcttgccgttaaatttccgcgtcgcctggcttctcttccgcactctgctttcaagcccctctgccatgaccgtgcccaccaaagacgacagccaaagcggcacggtggccgacacagtgccattaccgacataccgttcgttagcagcgccggtgaggaagcctgtcgacaagttcgcgctcctcccggccttcctcaaggttagagggcttgtgaaggagcacatcgactcatttaactactttgtcaacaaaggaatcaagaagatcgttgaggcaaacaaccgaattgaagcgcgcaacgatccatccatttaccttaggtaccttggtgtgcatgttggcatgccctcggtacatgtagagtataacattgaaaatatcacaccacatttttgccgccttactgaccgcacttactctgctcccataaaagttcatatcgaatacactgtcggaaagcagcatgaagtgagaagaaagaataactttatcattggctacatgcctattatgctaagaagccatgcctgtattctgtatgaaaaggatgaagctgaactagcaaaatatggtgagtgccctcttgatcctggcggctactttgttgtcaaaggaacagagaaggtcattctaattcaagaacagctagcaaagaatcgtattattgttgacactgatagcaaaggaagggtgatcgcatctgttaccagtagcacgcatgcaataaaaagcaagacggtgatttttatggataaggggaagatttatttacagctgaatcagttcaacaagccaattcctattatagtggtgatgaaagcgatgggaatggaaagtgatcaggagactgtacaaatggttggcagggacccaagatacggagatctcttatttccatctattcaggaatgtgcttcagagagaatatatacacgccagcgagccctgcagtacatggatgagaaggtgacgtatcctggtgccacaaatcagaaggaaggtcggtcatactcaatcctccgtgatgtgtttattgcccatgtgccggttaaaaatgggaacctacgaccaaagtgtatatacactgccttaatgttaaggcgcatgatggacgcaatcgtaaattctgacacctttgatgataaggattatgttggaaacaagagatttgagttgtctggccaactaatatcccttctttttgaggacctattcaaaacaatgaattcccaagctgttgagcgcatgaataaaaatagtgacaagactcactctagtcctttggattttagccagttgataatgcaagattccattacctttggtctggaaagggctatttccacaggaaattgggatattaaacgttttaggatgcataggaaaggtgtatctcaggttctttcgaggctatcctacatggcatctttaggctatatgacgcggataacaccccaatttgagaagactcgtaaaacaagtggtccacgtgctttgcagcctagtcagtggggtatgctctgcccatgtgatactcctgaaggagaagcttgtggattgacaaaaaatttagctttgctttctcatgtcacaacagaccaagaggaaggcccactgatatatctgtgttatagtctaggcgtggaggatttattgtctctctcatctgaagaaattcatacgccgggttcatttctggtcatgttcaatggattaatactggggaaacacaaagatcctcagaggcttgttattgatttgaggaatttacgtcgatctaatgtaattggagagtttgtaagcatttttattaatgagaaacagcattgcgttcacattgcctctgatggtggccgtgtttgtcgcccacttataattgctgatatggggatatcaaggatcgatgagactcacatggaaaaactgaggcatggaacttgtggttttgatgatttcctgcgtgatgggttgattgaatatcttgatgttaatgaagaaaacaatgcactgattgcattgtatgagcacatggatcaagatgatgttgaaagaagcagcatcacacacattgaaatagagccattgagtatcttaggggttgtatctggacttattccatatccacaccataaccaatctccacgtaatacttaccagtgtgcaatgggtaagcaagcgatgggaaatattgcatataatcagttgttcagagcagattcactactgtacttactagtgtatgcacaacggccactgctaacgacgaaaactattgagttggtggggtatgataaacttggcgctgggcagaacgccactgttgctgtcatgggatatagtggttatgatattgaagatgcaattgtgatgaacaagtcatcccttgatcgaggatttggccgttgcatagcattgaaaaagtacacagttttaaaggataactatggagatggtgtatccgatatgattgttgaaccccaaagagataatggtgttttgattaaacagaatatgagagcgttggatgaagatggaattgccggacctggtcaaattattcgcaatcatgatatctatgtaaacaagcgaactcccaaaaacacttcaaaaggtattggtagggcattgagagaaagtgactacaaggactcacctgccttgtacaaaggtgttgatggtgagactactgtggtagatcgtgtaatgctgtgctcagatacaaatgataagttatccattaagtgtattattcgtcacactagaaggccagaggttggtgacaaattcagtagcagacatgggcagaaaggtgtctgtggtacgattgttcagcaagaagacttccccttctctgagagaggaatctgtcctgatttaatcatgaatccacatggtttcccaagtcgtatgacaataggtaaaatgattgaacttcttggtggaaaggctggtgtttcttgtggacggtttcactatggcagtgcatttggtgagccaagtggtaatgctgacaaggttgcagacataagctctactctaatcaagcatggtttcagctataatggaaaagatttcttgtactcaggcattcttggtcagcctcttgaggcatacatcttcatgggaccaatctactatcagaaactaaagcacatggttcttgataagatgcatgctcgagctagtggaccgcgggtgttactgacgaggcaaccaactgaggggcgaagccgtgatggaggcttgcgtcttggtgagatggaacgtgattgtctaattgcatatggcgcgagcatgctaatatttgaacgtctactgttatcaagtgatccttatcaagtccaggtttgcagaaaatgtggcttgttaggctactacaatcacaaactgaagacttcatactgttcaatgtgcaagaatggggaaaacatggccaagatgaggctgccatacgcttgcaagcttctattccaggagttgcatgcaatgaatgtagtaccacgcttgaagttaaccgaagtatgacagatgctgggactgtacaatgagagagatgctggattcgaaatgtgtttagagctatatgataaattaaagccctctttgataggggcatagggcttttttttttttgttaactggttcgagagaaaccacgtttaggtgtgtggtttcagccgtctagctagtctcttcgcgggcttctcttctcccgcggaggtatacaagctatcgccgggcaattgttgtatatatagttttttcccgatgtcatatatgaaggaatctggacctctttgtttagatgatcgctgaacgccctgcagggctagattacgatctttgaatgctgaatcattggcatgtgccattattattctagagtcactcgataacccaccctctatccagataattgcactgacgccccctttgataattacattctaatgatag

SEQ ID NO: 57748 - DNA, 1652 bp, Zea Mays
ctcagatcgtattacccattttttctgaagagaaaagctctgactttaagaaaacatataaaggttgtcatcagaagctgtaggccttccaaatcaacagcatgacatttctcaacaaaattttctcactgacaacttggttccacagaatctagcaattccttcagtcgaatatccaaataatcacaagcaccaatcactcaaaaatgcagcagagaagggaatgcaagccagtgacttacttctagcaaaagcctggttccacagcactcaaccaatgactagaagtcgttcgtcagagttaaggaggaggtatgctgcaatgcaaactaatatgacaccaataactataggaagcattgaagcaattaaccagttaaaacaagattttacaaccacgacaaacagcatacctatgagcaacacacctgttcagacaccaaattttgcatctccttcaagttcatcaacatcccatctggataatccacatatggcagcacaagatactgttacctcagtggtgagcatgctcaaggacacgctcgagcgcaagaagcttggtagccatgctaacaaagacacctcagtaggccatccttttggattctatgatactcagcagtttcaacagaacattcttggaggaacggatttctttcccatcatgacaactgcccaggctcaggattccctgatgcttcccaaggtcgagaggcccatggaaccaaacaatggtagcttcgttccttctacaaaccaagtttggttcggtgcagcttctcgagagccttcgcacagtggatcttctactgctatgaccacttattcagctgggttcgaaatgtgcgatgagctaccacctgcagggcaagcgatgtctatttgtgagagctccagaaaaaacgctgcaaatggaacaaccatcggcagatcgaaaggcaaagaatacagagagagggtacaacaggataatttgaaagatgagagaaagatgagctcaactaatacttctggagcatcgaaagctgataatggagatcctatgaaaaagcgcagggttgagcgctcccgcaaaatggcagaagcgaaggaaagaagctctacaccagtaataccgtccgacatgcaggccgttcttaagcgctgcgaaaccctagagaaggaggttcggtcgctaaagcttaatctgtccttcatgaacaggaaagattcagagcagaccaagcagatcgaggagcttcaacagaagaacgaggacttggccgaagagaaggagcggttgctggaagagatcgagagaattgtctccgaccccaacacttgagcacccaatctcctttttttttgggtaacttatttttgtgtactaatagagttaggcttgaaatggtccttgatacaaatacgtacagtccagcagggcagcaagaattaagtgctggcctaaatgtatcaccattctttccttgttatcacaagtttaatgtatattaataccaacaagcaaagggatcagggattacagtttacttcctttgacttgtatcttgaactaattacagtatgaaatggagcccaaaaagggtggtagcatcttggcctcttgggtattagaacatgaactacattatggttgacccaagtttcag

SEQ ID NO: 57749 - DNA, 2926 bp, Zea Mays
gggcagataaaattaaggcgaggccgcgagggcggcagaaaaatcctcgaagcaacccaccctgtcgtccgcgtcctccacgccctcgtcggctcgtcctcgccgtcctcctccacaccgcgcgcgcggcggtgttgacccacccacccgttcctcccccaccccatcagcgctggaggcggcggtgcgtaagtcccccggacccttcggcggcggcggcggcgcgcggttatgccgagaggctcccaggtttcatcaccgtgctctgctggagttatagcattttcagcaaggatatggagtacaccccctgcacagcaagttcctttgtatcccacatctcgctgctcgaggaagttcttggctggaggttttgtctttacggagacttcctggtcatctcttttgtcaactgcacttgaggatcaacccacacttagtgactgccttgcctggtcccatgctgtcagacattagagttgcccagtgattacactattacagtgcagctgtagcacatttatttgagcatggtggatctgtttctctggcaacattccagtaatctttgtcttggtgctaatcagccagcagaagttaccatcaagacatctttggacacttggatctaacgcttagagctttgccttcgcatataggctctaggtttgggttttcgttttctgctagctttcttctactctaccactgtaagttttcagtctgatcggtccaaagtttggtgtgtattggttacgctgtccttcaccagccttcactttgcatggcgtgaccttagagaagacgtgttcaagattttgttgtcgcaaaagcatgggaatagcatacatagctttgagaggagtctccagtgactttggtgttgtaacatccaaagacactcctgttatacatatatgagtcctgttttttactatacaactgttctgaaataagggcagttctgtgcaccaccagcgaataaaatggagagatatacaattatcaacgaagttggtgatggaacatttgggagtgtttggcgtgcaaccaataaggaaagcggtgaagtggttgcgatcaagaagatgaagaaaaagtattattcttgggaagagtgcataaacctccgtgaagtgaagtccctgcgaaggatgaaccatccaaacattgtaaagctcaaagaagtcataagagagagtgatacgctgttctttgtttttgagtacatgtctttatcagctgatgaagagcagagggaagcccttttcagagactgaaatccgaaactggtgctttcaaatatttcaagctctgagtcacatgcaccagcgtggatattttcaccgtgaccttaagcctgaaaatttgcttgttacaaaggaactcatcaagatagcggattttgggcttgctcgtgaaatttcttctgagccaccttatacggaatatgtgtccactcgttggtatcgtgcccctgaagttcttcttcaagctactgtttataatgctgcagttgacatgtgggcaatgggtgccattatcgcggagctattttcactgcgacctctttttcctggatcaagtgagccagatgaactttacaaaatctgtagcattattggcactccaaatcagcgtacttggcctgaaggactgcagctagcagcatctatgggttttcagttccctcagtgtgaaagtgtacatctttcggaagtggttcctttagcaagcaaagatgcaatcaatcttatctcgtggctttgctcatgggacccacgaagaaggccaacagcagtggaggttttgcagcatcccttctttcagccatgcttctatgtcccaccttcacttcgcttcaaatctactggatatgcatcaacgccaccatcagctggggctaaaggagctgttgatcagaagaacattaggagatactacatgggtactgtacccaatgcgaggccaacagttaattactcgtacttgagaaacaatgctcctgcaagagcagttggtgcacaaaggaaattggagttggattatcagctcccagagactaataaccataataaggtgacaaaggcagaagcgatgaaccagtcttggtccagaccagcagcagtaaggagcaatgcaggaaatcatcttgccaacgacctgaacccccgtgtacctgaccttgccgagaagctgtctcagttgtcaatgggccccaacagggtgtcgggtttgggttccgagaggtttgttagaacccatgagaacgctgccaagcgccccttgcccgtgggatccagggcgtggcatggtccagctgaccccttccggcgcccatacgagatgccaggtgatagaactctccttccaaggaatctcgttcgctgaggctgtgaagctcttcgcaagaaacatatccaacgctcgctgtcttcggagctactcttccccggctatttacctcgcaacaataaataaacaaccaaacttcgtttccagcagtgggtgttgctcagcattgtctgttaccgtgcttgtgcgtgacgaggataagaggcgtccgggtttgtgcaccccccccccccccccgggtcctcgagggctccagggctggttggttgcagcatggcccgatgtgcctccatgtgatatcgtttttttaattatgctgtgcgatgtgtgattggtaacactgcttcagttgttaccgctgcttgttcagtgggtttgtatgaactgtgacatgctccgctaaacgttattctaaatactggtatgcaaacatgtcgaaggtgaacaatcaatggtgtatgtagagtagacttaaatggtaactgccttgtttcattctttacaagcctactctagtcccaattcgcatggtaactgccctattttgatcatacagattgttctttaatcc

SEQ ID NO: 57750 - DNA, 1067 bp, Zea Mays
aaaaatcctcgaagcaacccaccctgtcgtccgcgtcctccacgccctcgtcggctcgtcctcgccgtcctcctccacaccgcgcgcgcggcggtgttgacccacccacccgttcctcccccaccccatcagcgctggaggcggcggtgcgtaagtcccccggacccttcggcggcggcggcggcgcgcggttatgccgagaggctcccaggtttcatcaccgtgctctgctggagttatagcattttcagcaaggatatggagtacaccccctgcacagcaagttcctttgtatcccacatctcgctgctcgaggaagttcttggctggaggttttgtctttacggagacttcctggtcatctcttttgtcaactgcacttgaggatcaacccacacttagtgactgccttgcctggtcccatgctgtcagacattagagttgcccagtgattacactattacagtgcagctgtagcacatttatttgagcatggtggatctgtttctctggcaacattccagtaatctttgtcttggtgctaatcagccagcagaagttaccatcaagacatctttggacacttggatctaacgcttagagctttgccttcgcatataggctctaggtttgggttttcgttttctgctagctttcttctactctaccactgtaagttttcagtctgatcggtccaaagtttggtgtgtattggttacgctgtccttcaccagccttcactttgcatggcgtgaccttagagaagacgtgttcaagattttgttgtcgcaaaagcatgggaatagcatacatagctttgagaggagtctccagtgactttggtgttgtaacatccaaagacactcctgttatacatatatgagtcctgttttttactatacaactgttctgaaataagggcagttctgtgcaccaccagcgaataaaatggagagatatacaattatcaacgaagttggtgatggaacatttgggagtgtttggcgtgcaaccaataaggaaagcggtgaagtgccttttcaccttattaagatacctgggctgat

SEQ ID NO: 57751 - DNA, 1818 bp, Zea Mays
attaaattgctgtaggtgaataagtattcatgttgtggttgttctctgtggttattttcaaatttgttggagtgattcacttacagcaccagaaaatttatacatgatagtgggtaatggatctagttcttctctattttgcaattccattatttatttaacttacatgtaccgtttccatctggggatgtgttcagtgttgttagcaaacaacaacaaccataattgatcttggtataacttgtgcaatttcagaaaatttgcttgttacaaaggaactcatcaagatagcggattttgggcttgctcgtgaaatttcttctgagccaccttatacggaatatgtgtccactcgttggtatcgtgcccctgaagttcttcttcaagctactgtttataatgctgcagttgacatgtgggcaatgggtgccattatcgcggagctattttcactgcgacctctttttcctggatcaagtgagccagatgaactttacaaaatctgtagcattattggcactccaaatcagcgtacttggcctgaaggactgcagctagcagcatctatgggttttcagttccctcagtgtgaaagtgtacatctttcggaagtggttcctttagcaagcaaagatgcaatcaatcttatctcgtggctttgctcatgggacccacgaagaaggccaacagcagtggaggttttgcagcatcccttctttcagccatgcttctatgtcccaccttcacttcgcttcaaatctactggatatgcatcaacgccaccatcagctggggctaaaggagctgttgatcagaagaacattaggagatactacatgggtactgtacccaatgcgaggccaacagttaattactcgtacttgagaaacaatgctcctgcaagagcagttggtgcacaaaggaaattggagttggattatcagctcccagagactaataaccataataaggtgacaaaggcagaagcgatgaaccagtcttggtccagaccagcagcagtaaggagcaatgcaggaaatcatcttgccaacgacctgaacccccgtgtacctgaccttgccgagaagctgtctcagttgtcaatgggccccaacagggtgtcgggtttgggttccgagaggtttgttagaacccatgagaacgctgccaagcgccccttgcccgtgggatccagggcgtggcatggtccagctgaccccttccggcgcccatacgagatgccaggtgatagaactctccttccaaggaatctcgttcgctgaggctgtgaagctcttcgcaagaaacatatccaacgctcgctgtcttcggagctactcttccccggctatttacctcgcaacaataaataaacaaccaaacttcgtttccagcagtgggtgttgctcagcattgtctgttaccgtgcttgtgcgtgacgaggataagaggcgtccgggtttgtgcaccccccccccccccccgggtcctcgagggctccagggctggttggttgcagcatggcccgatgtgcctccatgtgatatcgtttttttaattatgctgtgcgatgtgtgattggtaacactgcttcagttgttaccgctgcttgttcagtgggtttgtatgaactgtgacatgctccgctaaacgttattctaaatactggtatgcaaacatgtcgaaggtgaacaatcaatggtgtatgtagagtagacttaaatggtaactgccttgtttcattctttacaagcctactctagtcccaattcgcatggtaactgccctattttgatcatacagattgttctttaatcc

SEQ ID NO: 57752 - DNA, 1788 bp, Zea Mays
attaaattgctgtaggtgaataagtattcatgttgtggttgttctctgtggttattttcaaatttgttggagtgattcacttacagcaccagaaaatttatacatgatagtgggtaatggatctagttcttctctattttgcaattccattatttatttaacttacatgtaccgtttccatctggggatgtgttcagtgttgttagcaaacaacaacaaccataattgatcttggtataacttgtgcaatttcagaaaatttgcttgttacaaaggaactcatcaagatagcggattttgggcttgctcgtgaaatttcttctgagccaccttatacggaatatgtgtccactcgttggtatcgtgcccctgaagttcttcttcaagctactgtttataatgctgcagttgacatgtgggcaatgggtgccattatcgcggagctattttcactgcgacctctttttcctggatcaagcattattggcactccaaatcagcgtacttggcctgaaggactgcagctagcagcatctatgggttttcagttccctcagtgtgaaagtgtacatctttcggaagtggttcctttagcaagcaaagatgcaatcaatcttatctcgtggctttgctcatgggacccacgaagaaggccaacagcagtggaggttttgcagcatcccttctttcagccatgcttctatgtcccaccttcacttcgcttcaaatctactggatatgcatcaacgccaccatcagctggggctaaaggagctgttgatcagaagaacattaggagatactacatgggtactgtacccaatgcgaggccaacagttaattactcgtacttgagaaacaatgctcctgcaagagcagttggtgcacaaaggaaattggagttggattatcagctcccagagactaataaccataataaggtgacaaaggcagaagcgatgaaccagtcttggtccagaccagcagcagtaaggagcaatgcaggaaatcatcttgccaacgacctgaacccccgtgtacctgaccttgccgagaagctgtctcagttgtcaatgggccccaacagggtgtcgggtttgggttccgagaggtttgttagaacccatgagaacgctgccaagcgccccttgcccgtgggatccagggcgtggcatggtccagctgaccccttccggcgcccatacgagatgccaggtgatagaactctccttccaaggaatctcgttcgctgaggctgtgaagctcttcgcaagaaacatatccaacgctcgctgtcttcggagctactcttccccggctatttacctcgcaacaataaataaacaaccaaacttcgtttccagcagtgggtgttgctcagcattgtctgttaccgtgcttgtgcgtgacgaggataagaggcgtccgggtttgtgcaccccccccccccccccgggtcctcgagggctccagggctggttggttgcagcatggcccgatgtgcctccatgtgatatcgtttttttaattatgctgtgcgatgtgtgattggtaacactgcttcagttgttaccgctgcttgttcagtgggtttgtatgaactgtgacatgctccgctaaacgttattctaaatactggtatgcaaacatgtcgaaggtgaacaatcaatggtgtatgtagagtagacttaaatggtaactgccttgtttcattctttacaagcctactctagtcccaattcgcatggtaactgccctattttgatcatacagattgttctttaatcc

SEQ ID NO: 57753 - DNA, 2814 bp, Zea Mays
caaatcacaatagctgctagcctgttactgcaggcctctctctctctgtcctctccccagcccgcctccgcttctcgccggactccggccgccgcccgcaacctgtgcctagggctcccgcttccgccacacctgcgcactcggccccggagacggctccttgacgagaggcctgtgggaggagttgcagctgggacgcccggtcggacttgcgtctccgcagctgggagatgctcagctcgtcggcgtccaggagggacgccgcgaggagcggcgcggagctccctcggccgcacgcggtggcagggatggcgcggagcggggagctgcccaagggcgccccctccgcgacggcccctgatgcggtgcggtgcgagggatggatggtgcgccacggccggaggaagatcgggaggtccttcttccacacgcgctacttcgtcctcgacaacggcgtgctcgcgtactacaagaagaagccgagggaccacatgatcccactcaagtcaattattattgatggaaattgcagagtggaggatagagggcttaaaacacatcatggtcaaatgatttatttgctatgcatttacaacaagaaagaaaaggagaaccaaatcacgatgggtggatacgatattgaagatgccctagcctggaagaggaagatagagcttctgattgatcagcaacaggatactacgacagctaaaaaccataaagcttttgcttcgttggactttgatatagatcttggaggaccattttcgttctctgaccatgacagcggacccgaagatgaagaagagccccgacccaccttgcttcgcaggacaactatagggaatggccctcctgattctgtacttgattggaccaaagaggctgacagtgggctgtcaaatcagaatgccaccagtcaggcttactccagaaagaactggaggcttcttagatgccagaatggattgcgcatctttgaagaacttgtggaggttgaataccttgcaagaagctatagtcgagcaatgagggctgtaggagtggtggaagcctcatgcgaggccatttttgggcttgtaatgagcatggatgcatcacgatatgaatgggattgtagcttccaatatgggagtttagttgaagaggtcgatggtcatactgcaatactgtaccatcgtctacaactgaactggttttcaatgttggtctggccacgagatctttgttatgtacgctattggcggcgcaacgatgatggaagctatgttgtgctgtttcgatctaccgaaaatcagaactgtgggcctcaaccaggatttgtgagagcttctatcgaaagtggaggtttcaagatttcccctctcaaaagcctcaatgggaggccccgcactcaagttcaacaccttatgcagattgatgttaggggatggggcgtgaactatttaccatcattccagtactactctttgctgcagatgctgaactgtgttgctggtacaaagaacacacaactatttaacctgattgcgtgaatatttttcgcaaacagatgaaattcatacagttccaaggattccggtgatgcataccatggttaatgcggcctcaatgaaaaaggaccaaaaccttcaagaaccagactcgaagaccaaacaagctgataacaaacatttggatatggtagatgaagagtcggaagatgatgatgactatcaagttcctgatgctgatgtggaggaagaacctaccaaatctgacagtgatgctaagaactcagacccaatagatttgtcttggttttcgggcattattcgtcaggatacaaatgagaaaagtcgtaactgttgggcagtgcctgatagcaagatctttaaagttcgtagcaagaactttccacatgacaaatcaaaggtaccagcaggtaagtatctaatggagctcgtagcagttgactggtttaaggacgccaagcgcatggatcatgtcgctaggcggaaaggatctgcggttcaggttgccgctgagaagggaatgttcactttcctggtaaacatacaaattcctggaccaagtcattacagcttggtcctttattttgtctcaaactccttgaagaaaggatcgctgttgcagcgttttgccgatggtgatgatgattttagaaacagcagactgaagcttatcccatctgttccaaaggggtcttggatagtgcggcaaagtgttggaagcacaccttgcttgctggggaaagccgtggactgcagctatttgcgtggtcctgactacttagaagtggatgtagatatcggttcgtccgcggtagccaacggggtcctgggcttggtgtttggcgttgttaccaccttggtagtcgacatggcgtttcttatacaggcaaacacgtacgacgagctcccagagcagctcctaggcgctgcgcggctgtcacacatcgaaccttctgcggccgtgtatcctgtccttgacaacatttcctgaacgggacggacaaatcaacctgtgcagattctttcgttctttccgtccgccccgccacaaaaaggctctcccaatttgttcagccactgcagcattgtgcagctcgatacatttgaggttcagacagacagactgcagcagtccacaagtgccttgtacccttcatacagttttgccatttttttaggtcttttcttttacattttactttactcggtgtagtttgagcttcctacagatattgtaatgcaatagacacatcaaagtgagatatacagatacagcatggttcagaaacaagttcgtgta

SEQ ID NO: 57754 - DNA, 2767 bp, Zea Mays
caaatcacaatagctgctagcctgttactgcaggcctctctctctctgtcctctccccagcccgcctccgcttctcgccggactccggccgccgcccgcaacctgtgcctagggctcccgcttccgccacacctgcgcactcggccccggagacggctccttgacgagaggcctgtgggaggagttgcagctgggacgcccggtcggacttgcgtctccgcagctgggagatgctcagctcgtcggcgtccaggagggacgccgcgaggagcggcgcggagctccctcggccgcacgcggtggcagggatggcgcggagcggggagctgcccaagggcgccccctccgcgacggcccctgatgcggtgcggtgcgagggatggatggtgcgccacggccggaggaagatcgggaggtccttcttccacacgcgctacttcgtcctcgacaacggcgtgctcgcgtactacaagaagaagccgagggaccacatgatcccactcaagtcaattattattgatggaaattgcagagtggaggatagagggcttaaaacacatcatggtcaaatgatttatttgctatgcatttacaacaagaaagaaaaggagaaccaaatcacgatgggtggatacgatattgaagatgccctagcctggaagaggaagatagagcttctgattgatcagcaacaggatactacgacagctaaaaaccataaagcttttgcttcgttggactttgatatagatcttggaggaccattttcgttctctgaccatgacagcggacccgaagatgaagaagagccccgacccaccttgcttcgcaggacaactatagggaatggccctcctgattctgtacttgattggaccaaagaggctgacagtgggctgtcaaatcagaatgccaccagtcaggcttactccagaaagaactggaggcttcttagatgccagaatggattgcgcatctttgaagaacttgtggaggttgaataccttgcaagaagctatagtcgagcaatgagggctgtaggagtggtggaagcctcatgcgaggccatttttgggcttgtaatgagcatggatgcatcacgatatgaatgggattgtagcttccaatatgggagtttagttgaagaggtcgatggtcatactgcaatactgtaccatcgtctacaactgaactggttttcaatgttggtctggccacgagatctttgttatgtacgctattggcggcgcaacgatgatggaagctatgttgtgctgtttcgatctaccgaaaatcagaactgtgggcctcaaccaggatttgtggaggtttcaagatttcccctctcaaaagcctcaatgggaggccccgcactcaagttcaacaccttatgcagattgatgttaggggatggggcgtgaactatttaccatcattccagtactactctttgctgcagatgctgaactgtgttgctggattgcgtgaatatttttcgcaaacagatgaaattcatacagttccaaggattccggtgatgcataccatggttaatgcggcctcaatgaaaaaggaccaaaaccttcaagaaccagactcgaagaccaaacaagctgataacaaacatttggatatggtagatgaagagtcggaagatgatgatgactatcaagttcctgatgctgatgtggaggaagaacctaccaaatctgacagtgatgctaagaactcagacccaatagatttgtcttggttttcgggcattattcgtcaggatacaaatgagaaaagtcgtaactgttgggcagtgcctgatagcaagatctttaaagttcgtagcaagaactttccacatgacaaatcaaaggtaccagcaggtaagtatctaatggagctcgtagcagttgactggtttaaggacgccaagcgcatggatcatgtcgctaggcggaaaggatctgcggttcaggttgccgctgagaagggaatgttcactttcctggtaaacatacaaattcctggaccaagtcattacagcttggtcctttattttgtctcaaactccttgaagaaaggatcgctgttgcagcgttttgccgatggtgatgatgattttagaaacagcagactgaagcttatcccatctgttccaaaggggtcttggatagtgcggcaaagtgttggaagcacaccttgcttgctggggaaagccgtggactgcagctatttgcgtggtcctgactacttagaagtggatgtagatatcggttcgtccgcggtagccaacggggtcctgggcttggtgtttggcgttgttaccaccttggtagtcgacatggcgtttcttatacaggcaaacacgtacgacgagctcccagagcagctcctaggcgctgcgcggctgtcacacatcgaaccttctgcggccgtgtatcctgtccttgacaacatttcctgaacgggacggacaaatcaacctgtgcagattctttcgttctttccgtccgccccgccacaaaaaggctctcccaatttgttcagccactgcagcattgtgcagctcgatacatttgaggttcagacagacagactgcagcagtccacaagtgccttgtacccttcatacagttttgccatttttttaggtcttttcttttacattttactttactcggtgtagtttgagcttcctacagatattgtaatgcaatagacacatcaaagtgagatatacagatacagcatggttcagaaacaagttcgtgta

SEQ ID NO: 57755 - DNA, 4063 bp, Zea Mays
caaatcacaatagctgctagcctgttactgcaggcctctctctctctgtcctctccccagcccgcctccgcttctcgccggactccggccgccgcccgcaacctgtgcctagggctcccgcttccgccacacctgcgcactcggccccggagacggctccttgacgagaggcctgtgggaggagttgcagctgggacgcccggtcggacttgcgtctccgcagctgggagatgctcagctcgtcggcgtccaggagggacgccgcgaggagcggcgcggagctccctcggccgcacgcggtggcagggatggcgcggagcggggagctgcccaagggcgccccctccgcgacggcccctgatgcggtgcggtgcgagggatggatggtgcgccacggccggaggaagatcgggaggtccttcttccacacgcgctacttcgtcctcgacaacggcgtgctcgcgtactacaagaagaagccgagggaccacatgatcccactcaagtcaattattattgatggaaattgcagagtggaggatagagggcttaaaacacatcatggtcaaatgatttatttgctatgcatttacaacaagaaagaaaaggagaaccaaatcacgatgggtggatacgatattgaagatgccctagcctggaagaggaagatagagcttctgattgatcagcaacaggatactacgacagctaaaaaccataaagcttttgcttcgttggactttgatatagatcttggaggaccattttcgttctctgaccatgacagcggacccgaagatgaagaagagccccgacccaccttgcttcgcaggacaactatagggaatggccctcctgattctgtacttgattggaccaaagaggctgacagtgggctgtcaaatcagaatgccaccagtcaggcttactccagaaagaactggaggcttcttagatgccagaatggattgcgcatctttgaagaacttgtggaggttgaataccttgcaagaagctatagtcgagcaatgagggctgtaggagtggtggaagcctcatgcgaggccatttttgggcttgtaatgagcatggatgcatcacgatatgaatgggattgtagcttccaatatgggagtttagttgaagaggtcgatggtcatactgcaatactgtaccatcgtctacaactgaactggttttcaatgttggtctggccacgagatctttgttatgtacgctattggcggcgcaacgatgatggaagctatgttgtgctgtttcgatctaccgaaaatcagaactgtgggcctcaaccaggatttgtgagagcttctatcgaaagtggaggtttcaagatttcccctctcaaaagcctcaatgggaggccccgcactcaagttcaacaccttatgcagattgatgttaggggatggggcgtgaactatttaccatcattccagtactactctttgctgcagatgctgaactgtgttgctggattgcgtgaatatttttcgcaaacagatgaaattcatacagttccaaggattccggtgatgcataccatggttaatgcggcctcaatgaaaaaggaccaaaaccttcaagaaccagactcgaagaccaaacaagctgataacaaacatttggatatggtagatgaagagtcggaagatgatgatgactatcaagttcctgatgctgatgtggaggaagaacctaccaaatctgacagtgatgctaagaactcagacccaatagatttgtcttggttttcgggcattattcgtcaggatacaaatgagaaaagtcgtaactgttgggcagtgcctgatagcaagatctttaaagttcgtagcaagaactttccacatgacaaatcaaaggtaccagcaggtaagtatctaatggagctcgtagcagttgactggtttaaggacgccaagcgcatggatcatgtcgctaggcggaaaggatctgcggttcaggttgccgctgagaagggaatgttcactttcctggtaaacatacaagtaagctcatgttctaacaatcctaccatgttaccatgtccatttatttctgtcctgcttcgatcttttctcacagaaaggtgaccgcacagagtacaagaaaaattacattgattcctggaccaagtcattacagcttggtcctttattttgtctcaaactccttgaagaaaggatcgctgttgcagcgttttgccgatggtgatgatgattttagaaacagcagactgaagcttatcccatctgttccaaaggggtcttggatagtgcggcaaagtgttggaagcacaccttgcttgctggggaaagccgtggactgcagctatttgcgtggtcctgactacttagaagtggatgtagatatcggttcgtccgcggtagccaacggggtcctgggcttggtgtttggcgttgttaccaccttggtagtcgacatggcgtttcttatacaggcaaacacgtacgacgagctcccagagcagctcctaggcgctgcgcggctgtcacacatcgaaccttctgcggccgtgtatcctgtccttgacaacatttcctgaacgggacggacaaatcaacctgtgcagattctttcgttctttccgtccgccccgccacaaaaaggctctcccaatttgttcagccactgcagcattgtgcagctcgatacatttgaggttcagacagacagactgcagcagtccacaagtgccttgtacccttcatacagttttgccatttttttaggtcttttcttttacattttactttactcggtgtagtttgagcttcctacagatattgtaatgcaatagacacatcaaagtgagatatacagatacagcatggttcagaaacaagttcgtgtactttccgattcccgacccactgaaactcgccttttgtgcattcaccagtttgggcttgcttcattgctcatcagatctggtccatgaatgcccattcgaggcccatcacagcccaaacccccactggtcctaaacctctcgccgtcacgcagctttaagttccgatacccacaagcacttggcatcaaccctaaaccacccactatacccgcccgcccggctagggttttgccaccatggccgccgccgcggccgccgcccggaggctcctctcccgccgcgcctcctcgaactcgctctccgcgttcctccgccgcggcgctgccccggagcagtcgctgctgcgcccggccgtcgtcgcggcggcctcccgcctcggcttcccgcgcgggatggcgcggcgacctggcggggacggctacggcgcgggccgggaccgcgcgcccacggagatggcgccgctgttccccggctgcgactacgagcactggctcatcgtgatggacaagcccggcggggagggcgccaccaagcagcagatgatcgactgctacatccagaccctcgccaaggtcctcggaagtgaggaggaggcgaagaagaagatctacaacgtctcgtgcgagcgctatttcgggttcgggtgcgagatcgatgaggagacatctaacaagctcgaggggctccctggtgttctctttgtgctaccggattcgtatgttgaccctgagtacaaggactacggagctgaactgcttgtcaacggtgagattgttcagaggcctcctgagaggcagagaagggtcgagcccgtgccacagagggctgcagacaggcctaggtacaatgacaggacccgctacgcacgcaggagggagaaccagcgatgagatgaaaaaagtccacaataacaagttcaggtggtttgagctctgtaattcaaggatagtgtgctttggatgtattgtactctgtaactacagttactcagattgctcaaaggacctggtttggaatgcatgcactgttactagcgcccgtttgcacatgtaaaatttctttatggaagctgcttaattgactatgaaggcctaacattaggtatttcattcattgccaacagcttatccatccctatctctatttgaagttcaatttacgagc

SEQ ID NO: 57756 - DNA, 1092 bp, Zea Mays
ccgcccctttctcctctctctctcttacctgcgggcccaccccacaggcgtctcttctgcctcccctctctatcttcccacgccgtcgccaggaaaccagggtgcgcgcgccgcgcagcatgcacccctggccgtccagctcgacagcagccaagccgccacgcccaggcacgcaccgaccggcgcccaggccgatgccctgcccctgcgcgcccgcacaaccgaccgcctgacccgcgacaccgacgcgccaggagcagctgatgccgctttgtttaggtaattgagtttgttctttttaaagaccacttgcatcgctccatgcaatatctttctgcaaaatcagattctattatgctacatctgaagtagaagatgaactctcttgatgaagtagaggtgaggccacccttgtcgatttgaaagcattgctttggcccaaatttttattttgctatatggatgcacgtgttgatgtatatataagcaaatgtatcattttttgtgttctgcctctaaccattctgaacatgtaattttggattcttaatttatgtattggtgctacctggttatgttatcaattgctattatgagaggatatattgatgcttgacaattcaaatatttgttgctaacttgaagattgttattttacttctcattgcagtctattctagaaagtgtgagccatggaacaaagctggttgaaaaaagaactacatgcatttaccccgtttttgtttggtttcatcttattctttctttcagacgctttattgtaggtggttcggagttctgtgtatcacaagagacatctaggttgacctcactcttcttagtgttcatgcccactatgcaggacaacaccgcaacactgatggagttggacgatttcatcaggctggactgtatctggatgggatggactctactcgtaagtagagagagtgcttgtcttgtgtaatacccaaaagtgtaaacagtgaaaatagagatgagctcaatattttgtgacctatatttatcatctcatgtgaacacttcatttaaaagtaaataatcaataaaggacatatcactaaattgtgc

SEQ ID NO: 57757 - DNA, 505 bp, Zea Mays
cccctttctcctctctctctcttacctgcgggcccaccccacaggcgtctcttctgcctcccctctctatcttcccacgccgtcgccaggaaaccagggtgcgcgcgccgcgcagcatgcacccctggccgtccagctcgacagcagccaagccgccacgcccaggcacgcaccgaccggcgcccaggccgatgccctgcccctgcgcgcccgcacaaccgaccgcctgacccgcgacaccgacgcgccaggagcagctgatgccgctttgtttaggacaacaccgcaacactgatggagttggacgatttcatcaggctggactgtatctggatgggatggactctactcgtaagtagagagagtgcttgtcttgtgtaatacccaaaagtgtaaacagtgaaaatagagatgagctcaatattttgtgacctatatttatcatctcatgtgaacacttcatttaaaagtaaataatcaataaaggacatatcactaaattgtg

SEQ ID NO: 57758 - DNA, 419 bp, Zea Mays
cagccctcttccccctcaatagcgcgcgagtctggcgggcgcactgatttctccgggatgggatcgtggccggaattctctcctcctcacagtataatgcgtgtgtgccccgcgctagccccaatccatccacgccctgaattgtaggctcgtgcgctcacggccagagaggagcaccaccagatatcgtcgtgaacgcgcagcggatgtagcctcgaatttgttcatcttgggcgtggaatctcgtcgcagagcttcccttgggcttgccgaaacgatttggggcatctccgtgcgggattggcgaccggagcgacggggatttctcgccggggtcgctgcatcgctgttgagccgcgccaatgcgtgggcagagccaccgcctgcccgaattgagaagaacctgtgacttaggatcc

SEQ ID NO: 57759 - DNA, 2622 bp, Zea Mays
ccgtgttcctggcgacaagccaactcgccaccgcaacaacgcgtcccgggaagcgccgactccaactccatgctcagggcgggcagcacgcaccggtggagccccggcgcccgcgccttctccacggcgccggctacgcggaccaccgtgccgctcgcgcacctggctgatctcccggcgtctctgccagaatcgggctacaccgtcacgccgcctgtccaaccctggccgcgccgcctcacggcgcggtcgctgtcccgtctcctcctcggcgcggccacgcccgagctcgcggtcctcgccctccgccacgcgctcttccacgccgcgcatcctctgccgccctcgctccccgtcttcgccgcggccctctcccgcctctcccacgccgacgctggcgccgcggcccgccacctgccccccgtcctctccctgctccgcgcctcccgcctcccggccttctccgaccgcccgttcctgccgctcctccgcgcgctgcggccgctcccgtccctccgccttttcctctccctcccgtccttcaactcccgtccttccacccgctcctttaacgcgctcctccactctctcgtctccgcgcgccgcctccgcctcgccgccgcgctcttccgcgccgcgccaaccaagttgtacatcacgccgaaccttgtgtcctgcaacatcctgctcaagggccttgttggcatcggtgacctcaactctgcgctgaaggtgctcgacgaaatgattggctgggggatcgtcccagatgtcgtcacttacaccacggttctcactgcctactgtgccaaaggggatctcgagggtgcacagcagctctttgacgatattattgccagcgggcgtaggccagatgctactatgtacacagtgctcatagatgggtactgccaccataggaagttgcaagatgcagcaaggatcatggatgagatgggagctgctggggtgcagccaaatgaggttacatactctgtggtgattgaagcgtgctgcaaggagagaaaatccacagaggcgcgtgatttgacaagggagatgctaggggcaggatatgtaccggacacaccactgtgtgctaaggtggttgatgtgctatgccaggatggaaaggcaggagaggcgaatgagatgtggagacagatggtgaagaagagcgtccctccagataacactgtcgtcagcacattgatctactggttatgtaagaaaggaatggttcaggaggcgaggaagctatttgatgagctcgagagggggttcttgcctagcttgctgacgtataactcgcttattataggattatgtgagaatggagagttacaggaggctggtagggtgtgggatgacatggtcgaacggcggtatgaaccaaatgcaatgacttatgaggccttgatcaagggtttctgcaaaataggcaaatcaaatgaaggttatgcgctatttaaggagatgatgtccagagggtgcactccaagcaagtttctttatcaagcgttggttgatagcctttctaagccaagtcatgatgatactgtttgcactattgttgaagctgcagctttacgtggtcaggatttcttggatggccattcatgggaaatatttatcaaaaaaatggtagatacaaatgaaacttggaaaaagtatctggatttggtgctaaatatgtagtgtagccacaaagaatacagactatagctgtcatgtggggccggtcctacacaaggcggcggcgggcgggcgcacgacatgcacagagctgtggagcgcgcatagatcaggaaggagtaggtattagtggataaattacaaagataagatctaattggttagtttctatatttagtccttaagtgtaggactcaggggcggatctacgagaggggctgtcgggactgcagctccggttgtctcccataacacctatgttatgacgtgttctaataatatatacttcatctatcttaaaatagtagtcgtcgttttagggaattagtaggtttatacaatttttgattgatgcatgtgttttgtatatatctttagattcatcatccatttgaatatagacataaaaaccaagagctaaaataacaactattttggaacctgagagtatattataacataaatacagcctataatggttaactaagataggtcataaccttctttctgatcgtgtcattcagcacatgtatttggcctccattcgtgccaccagcacgctaggtggaagcgcgcgcatccacgttggatcttgtccatgcttcagcagtgcaaatccacgccaccacacaggacgcagtcatgagccagtacgcacggccaatgcacatctaacagttagcagcgcacatgtgcctaacgcaaggggcaggctgcaagcagcaccatggcaggcctgctacaacacgctagtacatcaggccaggcctgcgaggacgttgtcgtggcactcaccctcaagatagccgctggtggctccgccaaacatactttaacttatagcctctcctttgatccaatcctggatccaccactggtaggactgattggttggccaagggggcatatatactccctgtatcgcac

SEQ ID NO: 57760 - DNA, 1256 bp, Zea Mays
aacgtaaaacacatcgacaggaccatttattatgtaacaaccaaaaggcaacacatggttcagatctcaaaaataagaaacctgtcatttcatatccgtgaacccataaatgatatacaaaatacgataatgagcgacacaatgatggtcaggatgttaaaaagatccatcattcatgtcgcacacatcaatcaagaacgatgtcataaatataacaaagatggcagatgccatgccataaatcatgtcaatatatgtgcatgttgaaccaataacagaaaacacaattgaaaaaacaaaatcatcagaacacttggcttctgctataaaaatgcttcttatgcttctttgtagcctatacatagttcctccatatgcttttatgattcccgaaagaaataggataagtgagatgaaaatgaaagaatacagtccaaaactttagtaacttacttctttatcctctaacatttctttagaacaattattatacatttctagtaccacaatcgagccatacaaaaattttaaagcccaatgttttcctgtttaccccatgaaaaaggaagaacacgatgccaaataagtgcacacacacacaatggatagaaacttgactgagttcagctacatgcatctccatggataccctcaattccatttctgctataaattgtaaagtaagtaccaaatgccacaccaggaaatacatagaggaaataaaagtgcatagtagctgcttaagtatataataaaccattatgttgctagcattttagacagaagataaaagaaaatatctaataccatgataatgcaaaccattacaatatgttatataatgcatgatgagcaatgaaaaagactattccagctagaacatatataacaaacaaacaaaaataatatatgtcgtacctagcagaaaacacaattcaaaaactatattctttgatactgagtatactaccattgtcagccatataaaaaaaagataatcacctattcctacagctggcagaactgaatttgaagcagcagaacttattatctggaggcaatcatttttatgaccagtacgccaatgcagtgcctgagaaacagcaatcaagagccatcaatctaaaatataagtttgtatcagctgtcagaaacgaaatgatggacactaaagtttggcatacatacctgatgtttctaagggcctgtttgtttaccccaatggattatataatctggattatttttggaggatt

SEQ ID NO: 57761 - DNA, 1293 bp, Zea Mays
cgaaaacagaaagtgtgatgggaaggagataaagaaagctgatgaaaataggctgccgcctggtgtatagtaataggatacggcctccattatttataaagaggagagagaataaaaaaagagacgtccttggcgtggtgtcctcgtcctcgtgcccatctctgtcccaatcaaactgattgatccgtcgcccgcagggccacagcagccgcggcgaggtcgtccgtcggattcggaggctcagttattactgaaaagataatacagtacctatggcttctctggacgccgtgcgaggagacctcgccctgctgattctgtacctgaacaaggccgaggcgcgggacaagatctgccgagcgatccagtacgggtccaagttcatcagcaacggggagccagggcctgcgcagaacgtcgacaagtccaccagcctggcccggaaagtgttccggctctgtaagttcgtcaacgacctgcacgctttgatcagccctcctgccaaggggactccgctcccgctgatcctactcgggaagtccaagaacgcgatgctgtcgactttcctcttcctggaccagatcgtgtgggcggggaggacaggaatatacaagaacaaggagcgggcggagtttctcgggaggatagcgttctactgcttcctcggctccaacacctgcacggccatcatcgagctagccgagctgcaacggctgtccacgtcgatgaagaagctggagaaggagctgaagcaccaagagctgtacaagaacgagcagtaccgcatgaagctgcacaagtcgaacgagcggctgctggcgctcgtcaagtcgagcctggacatcgtggtggccgtggggctcctgcagctggccccgaagaagctgcttccaagcccaccagcaaagcagagcaagtgaggactcccactccaagcactgtttaccaggaaaataatcccccccggataggtttgatttggttgccacatccccttgtatggcagactagactaatatatgtaatcatcatcataataattgataaaccatcccactatggataggtttggtcactccaaacactgttttttttattcatcgctaggagcaactccaaaagtgtgctaaggcccgtttgatttgagggactaaaaattagttcctctattttaatctcatttagtccttaaattgacaaacggtgagactaaaacaaagattaaactgttttagtctctagtcctttaagggagactaaaagtgactaaaccatattaattctatttttgcc

SEQ ID NO: 57762 - DNA, 1343 bp, Zea Mays
gaaaacagaaagtgtgatgggaaggagataaagaaagctgatgaaaataggctgccgcctggtgtatagtaataggatacggcctccattatttataaagaggagagagaataaaaaaagagacgtccttggcgtggtgtcctcgtcctcgtgcccatctctgtcccaatcaaactgattgatccgtcgcccgcagggccacagcagccgcggcgaggtcgtccgtcggattcggaggctcagttattactgaaaagataatacagtacctatggcttctctggacgccgtgcgaggagacctcgccctgctgattctgtacctgaacaaggccgaggcgcgggacaagatctgccgagcgatccagtacgggtccaagttcatcagcaacggggagccagggcctgcgcagaacgtcgacaagtccaccagcctggcccggaaagtgttccggctctgtaagttcgtcaacgacctgcacgctttgatcagccctcctgccaaggggactccgctcccgctgatcctactcgggaagtccaagaacgcgatgctgtcgactttcctcttcctggaccagatcgtgtgggcggggaggacaggaatatacaagaacaaggagcgggcggagtttctcgggaggatagcgttctactgcttcctcggctccaacacctgcacggccatcatcgagctagccgagctgcaacggctgtccacgtcgatgaagaagctggagaaggagctgaagcaccaagagctgtacaagtaccgcatgaagctgcacaagtcgaacgagcggctgctggcgctcgtcaagtcgagcctggacatcgtggtggccgtggggctcctgcagctggccccgaagaaggtgaccccccgcgtcacgggcgcgtttggcttcgccagctccctcatcgcttgctaccagctgcttccaagcccaccagcaaagcagagcaagtgaggactcccactccaagcactgtttaccaggaaaataatcccccccggataggtttgatttggttgccacatccccttgtatggcagactagactaatatatgtaatcatcatcataataattgataaaccatcccactatggataggtttggtcactccaaacactgttttttttattcatcgctaggagcaactccaaaagtgtgctaaggcccgtttgatttgagggactaaaaattagttcctctattttaatctcatttagtccttaaattgacaaacggtgagactaaaacaaagattaaactgttttagtctctagtcctttaagggagactaaaagtgactaaaccatattaattctatttttgcc

SEQ ID NO: 57763 - DNA, 1606 bp, Zea Mays
ctcccaagtcccgccacgcgcccgcccaactgactgactcccgccttcaaacttctcccgctcctcctgatccacgtaccaccaaatcctatatatataaaccagaccacaactcccgactccatccatcgccagccacgccatcagccatcgcgttccgcatcgaaccagcacatcgcaagacaagcagcagcagccaccactgccatcacatggagtacgccgccgtcggctacggctacgggtacgggtacgacgagcgccaggagccggcggagtccgcggacggcggcggcggcggcgacgacgagtacgcgacggtgctgtcggcgccacccaagcggccggcggggcggaccaagttccgggagacgcggcaccccgtgtaccgcggcgtgcggcggcgcgggcccgcggggcgctgggtgtgcgaggtccgcgagcccaacaagaagtcgcgcatctggctcggcaccttcgccacccccgaggccgccgcgcgcgcgcacgacgtggccgcgctggccctgcggggccgcgccgcgtgcctcaacttcgccgactcggcgcgcctgctccaggtcgaccccgccacgctcgccacccccgacgacatccgccgcgccgccatccagctcgccgacgccgcctcgcagcaggatgagactgccgccgttgccgctgacgtggtcgcgccctcgcaggcggacgacgtcgccgccgccgccgccgccgcggcggcgatgtacggcggcggcatggagttcgaccactcgtattgctacgacgacgggatggtgagcgggagcagcgactgctggcaaagcggcgccggcgccggcggatggcatagcatcgtggacggcgacgacgacgacggcgccagcgacatgacgctctggagctactgagctgtagagtctgtctccagcgcaggaggttgggagaggagagaccacgctatggagctactactggactgggaagaaagtgggggtgccgggagcgagttcgaatttgaattcagaaactctgtactggcactggcacacgcggggaacgcgccacgcaagggcgagcgctatttccctccctttttgggtgctgggagaataataaaaagaccaacaatgaaggcattagtactacactttgtgcgaacttgaattaggccttgttcgtttgtgccggtttggtgggtcggaacgatttctagtctgattaatttaggtcttattcgtttgtgtcggattggtgggtcggaacgatttctaaccggattacttctctaatttatataaactttgattaactggaacgactccgggtgcaacccaacacaaacgaataagcccttatataaactttgattagctttaacgatttcgggtgtaatccgacgtaactaacctgattgtttttctaatttatataaattttgattagctgtaacaatttcgggtgcaatccaacgtaaacgaacaagttctttggtttttttaaggaaatctaattactttccccttttggccgccggggactgggtgggagggagtatgtgccagcagcacccagcagtgacggtgatccatccagtcagactcag

SEQ ID NO: 57764 - DNA, 1015 bp, Zea Mays
gaccagaacactcccctttcccctcctctcctagggtttcacagtgacgcttcctcaccaccgccgtcgcagagatgcagtccctcgtgcccttcagtacggcttcgtccgcaaggcctatggcgtccggaccggcgagacgctgtgcccggggatctcgtgcgaggagagcgccatccacaaggttgtgcaattctctatagctgtatgagcatttggagcctcgttgctggacaagggggtgatttattcattggagtttactgcatttaggttgctcaagattcagttttgcttagaccatcagataaactctactagcacatactctgacttcagattggacatgagagagagactgcaaatttgtctgatgcaaaaaaatcatcgataagtcaaaccttcagataaagtcagtcatggcattggatcatctaaaaattatatttatgttcaagctaagaaggaggctcatgtcaaagaggcacttcctatatttcttgacataatgtttcatcatgttcttggtgtaatattgtcattgtcatttgttcttgtctttggagagggatcatgtctgggctcacactggggctcatgtcgctcggcctcgtcgagctggtgatcctccaatgtagcgacataggcatctcaagagaccattaatattatgaagaggtcgatggaagaaaataacaacctccaactattaaacttcaatcgagaacaagtgcctccagcttatgtctgcttgaccactatatgatctacaaccttatggctactatagaagatagttatagtagctctgaatgtgaagttatacgatcattttcaattatccttaatatttatcactttgagtttaagttataagattggctttggattttaagttaaaggatttgaagatatatgtattgaagttatatgcttctttaatgaatgaaatatttgtgttcaacagattcatacaatattattgttggtgtaacattccatgatgatatgaatt

SEQ ID NO: 57765 - DNA, 1445 bp, Zea Mays
ccagaacactcccctttcccctcctctcctagggtttcacagtgacgcttcctcaccaccgccgtcgcagagatgcagtccctcgtgcccttcagtacggcttcgtccgcaaggcctatggcgtccggaccggcgagacgctgtgcccggggatctcgtgcgaggagagcgccatccacaaggtatacgacatcctcgccgcgtagctgctcctcaccaccgtcgtatcctccctcactgtagtgtctcaagcctacgaagcagcctcgctccacctgccgccgttgactggtccaccccttctgtaatccttactgtttcacgctcgctccgcaggctcgctccacccaccaccggtggtcgggggtgatttattcattggagtttactgcatttaggttgctcaagattcagttttgcttagaccatcagataaactctactagcacatactctgacttcagattggacatgagagagagactgcaaatttgtctgatgcaaaaaaatcatcgataagtcaaaccttcagataaagtcagtcatggcattggatcatctaaaaattatatttatgttcaagctaagaaggaggctcatgtcaaagaggtacgtacattctattccttttcgacaaaagttgttgtaggagggacaatctaaaagtattgtgcaagatatagagcatgcactcatcatatctaagtgatcggagtgatattgattagcttattagatggatattggcccagtttatctttcatttttttctatagctgttagaattttactttgctcagttcatactataaataatatgagactcttgttttgtggtccaagtgtttagcgcttagggtgccttggaagtacgctagcttgttgtcatgaagaagtcattcaagttccttccagcacttcctatatttcttgacataatgtttcatcatgttcttggtgtaatattgtcattgtcatttgttcttgtctttggagagggatcatgtctgggctcacactggggctcatgtcgctcggcctcgtcgagctggtgatcctccaatgtagcgacataggcatctcaagagaccattaatattatgaagaggtcgatggaagaaaataacaacctccaactattaaacttcaatcgagaacaagtgcctccagcttatgtctgcttgaccactatatgatctacaaccttatggctactatagaagatagttatagtagctctgaatgtgaagttatacgatcattttcaattatccttaatatttatcactttgagtttaagttataagattggctttggattttaagttaaaggatttgaagatatatgtattgaagttatatgcttctttaatgaatgaaatatttgtgttcaacagattcatacaatattattgttggtgtaacattccatgatgatatgaatt

SEQ ID NO: 57766 - DNA, 1593 bp, Zea Mays
ccagaacactcccctttcccctcctctcctagggtttcacagtgacgcttcctcaccaccgccgtcgcagagatgcagtccctcgtgcccttcagtacggcttcgtccgcaaggcctatggcgtccggaccggcgagacgctgtgcccggggatctcgtgcgaggagagcgccatccacaaggtatacgacatcctcgccgcgtagctgctcctcaccaccgtcgtatcctccctcactgtagtgtctcaagcctacgaagcagcctcgctccacctgccgccgttgactggtccaccccttctgtaatccttactgtttcacgctcgctccgcaggctcgctccacccaccaccggtggtcgggggtgatttattcattggagtttactgcatttaggttgctcaagattcagttttgcttagaccatcagataaactctactagcacatactctgacttcagattggacatgagagagagactgcaaatttgtctgatgcaaaaaaatcatcgataagtcaaaccttcagataaagtcagtcatggcattggatcatctaaaaattatatttatgttcaagctaagaaggaggctcatgtcaaagaggagggacaatctaaaagtattgtgcaagatatagagcatgcactcatcatatctaagtgatcggagtgatattgattagcttattagatggatattggcccagtttatctttcatttttttctatagctgttagaattttactttgctcagttcatactataaataatatgagactcttgttttgtggtccaagtgtttagcgcttagggtgccttggaagtacgctagcttgttgtcatgaagaagtcattcaagttccttccagtgagttattagttcttatgtatatttctgtaacatgtaattttacaatctttatgcacattggaggtgtattttacgacataattaagcatcataaacaaatatattttagagtagaaagaaggacaatgcactccattatgttttaaacattgacttttatgtttacctcattgcaaccttttcaggcacttcctatatttcttgacataatgtttcatcatgttcttggtgtaatattgtcattgtcatttgttcttgtctttggagagggatcatgtctgggctcacactggggctcatgtcgctcggcctcgtcgagctggtgatcctccaatgtagcgacataggcatctcaagagaccattaatattatgaagaggtcgatggaagaaaataacaacctccaactattaaacttcaatcgagaacaagtgcctccagcttatgtctgcttgaccactatatgatctacaaccttatggctactatagaagatagttatagtagctctgaatgtgaagttatacgatcattttcaattatccttaatatttatcactttgagtttaagttataagattggctttggattttaagttaaaggatttgaagatatatgtattgaagttatatgcttctttaatgaatgaaatatttgtgttcaacagattcatacaatattattgttggtgtaacattccatgatgatatgaatt

SEQ ID NO: 57767 - DNA, 959 bp, Zea Mays
ccagaacactcccctttcccctcctctcctagggtttcacagtgacgcttcctcaccaccgccgtcgcagagatgcagtccctcgtgcccttcagtacggcttcgtccgcaaggcctatggcgtccggaccggcgagacgctgtgcccggggatctcgtgcgaggagagcgccatccacaagggggtgatttattcattggagtttactgcatttaggttgctcaagattcagttttgcttagaccatcagataaactctactagcacatactctgacttcagattggacatgagagagagactgcaaatttgtctgatgcaaaaaaatcatcgataagtcaaaccttcagataaagtcagtcatggcattggatcatctaaaaattatatttatgttcaagctaagaaggaggctcatgtcaaagaggcacttcctatatttcttgacataatgtttcatcatgttcttggtgtaatattgtcattgtcatttgttcttgtctttggagagggatcatgtctgggctcacactggggctcatgtcgctcggcctcgtcgagctggtgatcctccaatgtagcgacataggcatctcaagagaccattaatattatgaagaggtcgatggaagaaaataacaacctccaactattaaacttcaatcgagaacaagtgcctccagcttatgtctgcttgaccactatatgatctacaaccttatggctactatagaagatagttatagtagctctgaatgtgaagttatacgatcattttcaattatccttaatatttatcactttgagtttaagttataagattggctttggattttaagttaaaggatttgaagatatatgtattgaagttatatgcttctttaatgaatgaaatatttgtgttcaacagattcatacaatattattgttggtgtaacattccatgatgatatgaatt

SEQ ID NO: 57768 - DNA, 1377 bp, Zea Mays
ccagaacactcccctttcccctcctctcctagggtttcacagtgacgcttcctcaccaccgccgtcgcagagatgcagtccctcgtgcccttcagtacggcttcgtccgcaaggcctatggcgtccggaccggcgagacgctgtgcccggggatctcgtgcgaggagagcgccatccacaagggggtgatttattcattggagtttactgcatttaggttgctcaagattcagttttgcttagaccatcagataaagttagtcgtggcattggatcatctaaaaattatatttatatggatggtcaaatgtgatgtatgctcaagatttatcttattacatttcttggatgtttattggcctacttcagctctactagcacatactctgacttcagattggacatgagagagagactgcaaatttgtctgatgcaaaaaaatcatcgataagtcaaaccttcagataaagtcagtcatggcattggatcatctaaaaattatatttatgttcaagctaagaaggaggctcatgtcaaagaggtacgtacattctattccttttcgacaaaagttgttgtaggagggacaatctaaaagtattgtgcaagatatagagcatgcactcatcatatctaagtgatcggagtgatattgattagcttattagatggatattggcccagtttatctttcatttttttctatagctgttagaattttactttgctcagttcatactataaataatatgagactcttgttttgtggtccaagtgtttagcgcttagggtgccttggaagtacgctagcttgttgtcatgaagaagtcattcaagttccttccagcacttcctatatttcttgacataatgtttcatcatgttcttggtgtaatattgtcattgtcatttgttcttgtctttggagagggatcatgtctgggctcacactggggctcatgtcgctcggcctcgtcgagctggtgatcctccaatgtagcgacataggcatctcaagagaccattaatattatgaagaggtcgatggaagaaaataacaacctccaactattaaacttcaatcgagaacaagtgcctccagcttatgtctgcttgaccactatatgatctacaaccttatggctactatagaagatagttatagtagctctgaatgtgaagttatacgatcattttcaattatccttaatatttatcactttgagtttaagttataagattggctttggattttaagttaaaggatttgaagatatatgtattgaagttatatgcttctttaatgaatgaaatatttgtgttcaacagattcatacaatattattgttggtgtaacattccatgatgatatgaatt

SEQ ID NO: 57769 - DNA, 2778 bp, Zea Mays
gttcaagttttattggtgaggtagggagaaactagtggcctttggtatatgatagctattgtagtagtggccagtggggagagggggcccatcgagcacgatctgtagtgtaataaatgccagagcagacgagtcagctgaaaggagcccagcacggcaacacctgcagctgctattgccactgtcagccggccaagtcccagtcataactcccaagtcccaacccaatcatggcgtcgtccgtccaccaactggaggagcacgacgaggcgggagaggagcacgatcgccatggcatccagctgatcacctctccgctgctgcaaccgtcgtcgcggcgcccgcatggctcggcggaggaaaaggaggctgaagcgggggacgacaacggctctccgatcgagcaggtcgccgtgctccccgtcggccgcctcatggccgcggcgctgccggagcgcgccttcttccgcggccgcccgtgcgagttcaccctcaacccggggcccttcagcgtgaaggagcatgtcctcatcaccatcttcgccaacgccggcgccggcaccgtgttcgccaagaatcttgtgacctctgtccgcgtcttctacggccagcacatgtccttcctcatcgccctcctcctcatcctcaccagccaggtgatggggttcggttgggcgggagttttccggcggtatctggtggagccggcggcgatgtggtggccctccaacctcgtgcaggtctccctcttcagggcacttcatgagaaggagcgaaggagaaaaggtagcatgacacgcaaccagttcttcacggtggcattcatctgcagtttcgcctactacatcttcccgggctacctgttccagatgctcacctccctctcctggatctgctgggtgtttcccagctctgtgattgcccagcagctcggctcaggcctccatggccttggcatcggtgcagttggactcgactggtcgtccatctcctcctacctcggaagcccccttgctagcccctggtttgccaccgccaacatcgcggctgccttcttcattgtcgtgtacataatcacaccgatcaactactggttcaatgtttacaaggcacgcaacttccccatctactcagatggcctctacacggtggctgggcagaagtacaacatctctagcatcatggactcccatttctacttcgatacagacgcctatgagaagagtgggccactgtacatcagcacgttcttcgcttccagctacggtcttagttttgcatgccttaccgcgacggtttcccacgttctccttttccatggaagtgaaatatggcagctaagcaaatcagctttcgaggataagaagatggacatacataccaagcttatgaggagatacaggcaggtccccgagtggtggttcatctgcatccttgtggctagtgtttcagccaccatgcttacctgcgagtactacattgagcaactgcagcttccttggtggggagtactgcttgcatgtgcccttgccattttctacacccttcctattggaattctcaaagcaacaaccaaccagagtacatcatggggtacctatatcccggacgacccatggcgaacatgtgcttcaaagtatacggctacgttggcccacatcaagcactagagtttttgcaagattttaagttgggccactacatgaagatacccccaagggccatgttcacggctcaggttgtgggcactttgattgcgggctccgtataccttggaacaatatggtggctcctggacacaatacctgatgtgtgcaacacagagcttctcccagcaggcagcccttggacatgcccttacgatcatgtgttctacgatgcatccgtattatggggccttatcggcccacgcagaatatttggtgatttaggcacttactccgctgtgaactggttcttcctgggcggtgccattgctcccctccttgtctggtgtacacacaaggcattcccagctcagaaatggatccggcatgtcaatgcgcctgtactgattggcgcaaccaccttcatgccacctgccactgcagccaactataccacgtggatactcgttgcgtttctgtcaggttacgtggtctataagtaccggcgtaactggtgggagcgacacaattatctgctgtcaggtgcccttgacgccggtttggcgttcatggctgtgttgctctatctatgcctgggactggagaataaaagtttgaactggtggggcaatgatctggacggatgccctcttgcttcatgccccactgcaaagggtataactgtggatggatgtccagtgcataactgagagaggtcaccattcagtatttgagggtagaattacattatctctaaagggacatatgcacagatcactgaaccatacagataattgagaggttcccttattgctgcatccatgcctaggagtggagaacaaaagtttttgctaggacaatggtttggatggatggcttcatgccacgctgcaaagcacattgaacttcacatagatgtctggtgcataattgagagtattctaatcattgccagtactgggggataaaactagattatatcttgatgacaccatcaaagatcaatgtagtctttgccaaattataaaagatctcaactacatgatgaagacacagtcagaagtgtgagtgtatttcagataagaactaaccagattcagattagaactaatcagcaggaatagcagccatt

SEQ ID NO: 57770 - DNA, 2637 bp, Zea Mays
gttcaagttttattggtgaggtagggagaaactagtggcctttggtatatgatagctattgtagtagtggccagtggggagagggggcccatcgagcacgatctgtagtgtaataaatgccagagcagacgagtcagctgaaaggagcccagcacggcaacacctgcagctgctattgccactgtcagccggccaagtcccagtcataactcccaagtcccaacccaatcatggcgtcgtccgtccaccaactggaggagcacgacgaggcgggagaggagcacgatcgccatggcatccagctgatcacctctccgctgctgcaaccgtcgtcgcggcgcccgcatggctcggcggaggaaaaggaggctgaagcgggggacgacaacggctctccgatcgagcaggtggcgctgacggtgccggcgtgggacgacccggcgacgccggcgctgacgttccggacgtgggtgctgggcacggcgtcctgcgccgcgctctccttcctcaacgccttcttcgggtaccgcaaggagccgctcaccgtcaccgccgtgtcggcgcaggtcgccgtgctccccgtcggccgcctcatggccgcggcgctgccggagcgcgccttcttccgcggccgcccgtgcgagttcaccctcaacccggggcccttcagcgtgaaggagcatgtcctcatcaccatcttcgccaacgccggcgccggcaccgtgttcgccaagaatcttgtgacctctgtccgcgtcttctacggccagcacatgtccttcctcatcgccctcctcctcatcctcaccagccaggtgatggggttcggttgggcgggagttttccggcggtatctggtggagccggcggcgatgtggtggccctccaacctcgtgcaggtctccctcttcagggcacttcatgagaaggagcgaaggagaaaagctctgtgattgcccagcagctcggctcaggcctccatggccttggcatcggtgcagttggactcgactggtcgtccatctcctcctacctcggaagcccccttgctagcccctgatggcctctacacggtggctgggcagaagtacaacatctctagcatcatggactcccatttctacttcgatacagacgcctatgagaagagtgggccactgtacatcagcacgttcttcgcttccagctacggtcttagttttgcatgccttaccgcgacggtttcccacgttctccttttccatggaagtgaaatatggcagctaagcaaatcagctttcgaggataagaagatggacatacataccaagcttatgaggagatacagcttccttggtggggagtactgcttgcatgtgcccttgccattttctacacccttcctattggaattctcaaagcaacaaccaaccaggctccaggcttgaatgtcatcacagagtacatcatggggtacctatatcccggacgacccatggcgaacatgtgcttcaaagtatacggctacgttggcccacatcaagcactagagtttttgcaagattttaagttgggccactacatgaagatacccccaagggccatgttcacggctcaggttgtgggcactttgattgcgggctccgtataccttggaacaatatggtggctcctggacacaatacctgatgtgtgcaacacagagcttctcccagcaggcagcccttggacatgcccttacgatcatgtgttctacgatgcatccgtattatggggccttatcggcccacgcagaatatttggtgatttaggcacttactccgctgtgaactggttcttcctgggcggtgccattgctcccctccttgtctggtgtacacacaaggcattcccagctcagaaatggatccggcatgtcaatgcgcctgtactgattggcgcaaccaccttcatgccacctgccactgcagccaactataccacgtggatactcgttgcgtttctgtcaggttacgtggtctataagtaccggcgtaactggtgggagcgacacaattatctgctgtcaggtgcccttgacgccggtttggcgttcatggctgtgttgctctatctatgcctgggactggagaataaaagtttgaactggtggggcaatgatctggacggatgccctcttgcttcatgccccactgcaaagggtataactgtggatggatgtccagtgcataactgagagaggtcaccattcagtatttgagggtagaattacattatctctaaagggacatatgcacagatcactgaaccatacagataattgagaggttcccttattgctgcatccatgcctaggagtggagaacaaaagtttttgctaggacaatggtttggatggatggcttcatgccacgctgcaaagcacattgaacttcacatagatgtctggtgcataattgagagtattctaatcattgccagtactgggggataaaactagattatatcttgatgacaccatcaaagatcaatgtagtctttgccaaattataaaagatctcaactacatgatgaagacacagtcagaagtgtgagtgtatttcagataagaactaaccagattcagattagaactaatcagcaggaatagcagccatt

SEQ ID NO: 57771 - DNA, 2890 bp, Zea Mays
agcggatctggtttcgactaatttcggtcgaaccacgcagaacaaattatcagtgccgaaatcagtttaattcggtctgttgtttcgcgtcccgatccaaatcctcggatataaataacgggtaaaaatttatctaaccctcgagaatttaccaaatcaaatcctatccaaatattgtggtcaatcacattttggttcgactctttgatacatcttttagaccataattctagaacctatgtttatccatacgtgatgttgttaaagaaaagaagaaaacctttatttacttttctctcccacgctagctcttggaaatttcgcgagtgctcatgcttctcattttttttaatcccataccgcttgctcctctatactacgatcacattcattttatctggaattatcacgttggtttatgtggcattcttatccagcgttcactacttggaaagttgtacgtaatatccattcccaaccgtctaaatgcttctagccgtattccataatctcagctcgttgttatctcttgccgtgtctcatctctaaaaaaatcttcatcgccaatatctcaccgcccttctgctgcgttgatttttgttggtctacattcttatccctaccgcccttgccttggctctatctttccatgtcgagtcacgtacacgtcccctgcttgcttgtatcttcatcacgacgctcacatctgccttatctcctatcgctgccacgacctcaagccgccgaacaccattgcacctgcctgctcgagtcgctttcaactcatggccatggagtccgcctcagcctctgtcttccactcggttgctcctctgctggctacgcagagccttcactagccatggccgcgccctctctggtaccgagctcgcccataccgagctccctcagcgtcccgtccatggtcctcctccactcgccctggccatgcttgcctgccgcgccacactgagtttctggagtctggcacggtgaactggggagagaagcagccaagcagctccctcacgccgcggcttcctccttcagctcggcgctcatctccctctctgctcggaccgtgcccagctccgcgcgtcgcagttcgccccagctcgttgtcctgcctcccttgctcactgcgtcggccactcgctgatgctccaactcatcagtcgttgttgtcccatccgcgtcagcacgcgactctggtcgtgttcatcgaattcgccaacgttttgttgccgattcgactgtcgtcgcttcgcgtgttgtcgagcccgtcgagcctcgttcttctctgctcgctctcgtcgaacaccgaattccggatattagacaaaaataagcgagacccctgtgtatcgcttatcaagtactcggttgaagacttcaatctaagatcatcgtcattctgtgcgtcgtcaagaaatcccaagagtcgggtgaagacggagccaacagcatggtgttcaccaagtgcgcgacaaaaagctcgaaccagtcgtcaattatctcgacaacaaccacatccaagactccaccgtccaataattttgtctcatcgcccttcaaatccgagtcctcgtccataggatcgtcgttgacctcgcaacttcagctcgagttaattatggtaagttgatttattattcccgtcaactaaataaatgataggattaaatagaagaattgattgcgatgattctcttgttcattactcgatgtagagattaagttgaattttagggttgtgcgataagtatattggtagatatatatataatacacaggttaaccggtaaattagtttagaaagttaataaaagttcttctatcaaattttataagtattagatgtccaaaaattgtgaagttaaaagttataagtcgtttagtgtgttctctagactaggtctgataatttatgtgttggtcgatctcatgcttggaatggatgttgattgctacctcgactgtttagctaggttgtaagaacatgattgtcgtaagtaacaatatatcgataactagtgtacgtaatgtctcgtcattaaataggttatttctcttttgcgtagcatcgtaatatctagtgttattgttctttatatgcattcatatgcataatgcatttcattcaggacgataaataatcacgtgatgtggaagaaaaaccaagttgactccaaacgcgggctaatctgtaagctgaagctgaagaatcaacctgaagatggttaaatcaagcaagtgctcggtcgacgaatactcgtcaagcggatgtcacctaacaacactaacctagtgttactcaggcaagccccggtgcatttgccaccttccttgaggtttttaaaatctttctcacttgattgctgcattaggtgataggagttgattgataaaacaattcatgcattaccttccttgaatttgattaccttccttgatcacccgttttacaaaagattttgatgcttagccttgctttagaaaacaaaatgttttgtttttacaaactatgatgtggcaaaggtgggtgggatgttttcgaaaataaaacttgatggtggatctgtcaaaggccttgatggattcaacatcggaaaagatgtacctctgccaggtaccaaactttgggtttgaaataattaagctgagaccgggcgggtgacttgcacgggaaaggagtctcggtgtagtgtctccgtctgagtcgattaaggaccttgtcgatgtaggcctgctgaccgaggaccctttaactggtcacatgcctcgtcatgggtaagctttgcctcgggcggactaaggccagaataagataacacgaaatgggcgtggagcggtggcgagagtagcgtgtaccctccgtggcaagaggctg

SEQ ID NO: 57772 - DNA, 7286 bp, Zea Mays
ctcagctgagtataatcgattcggatcgccgtaccttcgcggttatgaagacttggtcactgacttacacgtagcaatccactaaagatgatggttttgttaagaaattggctagtgcaggacaagtgattgaactagggtagaaagaactctagctgcaggtaattttacttaacctgacaataaaattggattttaaggatccactcgtagtaagcttttctgcaaaacagagtctttgattcttgataagccataccttgactcccatataaccagcatacccttgagagtcttttctttagtcgggtaagacttgctgagtaattccatactcagggttttattccctgttgtttttcaggttctaactttgtgctgttgttgatggtgttaagtgccggtgggctcggccttcttataagtctaagtaacccttctatacttcttattgaggatgatcccttaagctagcatatatttcaaacttatacttttgtaatcactccgataaaataatataaaatttttgtaacttgtaaaatttggtagtaagatttccgctgcaaaaatgttggtgtgtgtgatttgtattacttaatcccgcggttctggttgaaagtggtttatccgatgtccttggcgcaatcggacagatcctgttgagttatctggtgcacatgcatggctgtctgaggtctttgggacaaggacaggtgcatgtgggcccaataacttggaggttctgccacaggctggtatcggagctggattaagtatatacggtcacatacttatttttaaaacaaaagttttggttttagaaaacctattttcaactaaacacattgtttggttttgaaaaaccgtttaaaaaaaactataatgctagcgacatcctctcttaagccctaatttaaggattatcaggtggcttagttgaaaaccacaaccgggggtattgcatacatgtgtattgttatttttgaggccattcagttttgaatggatcgacgctcaaggtaaggtgagatgtgagagcatgaccgaacaaacgtcggtctaggggagtgcttaattgtggcgcttgattatatacatgttccacatagtatatatgaaggctgtgatgtggagtatttacttttccgggaattcagtaccccatggatgtgtatgggtatacagacatgggaatactgagaagtgtattgtacttgtaacgacgcacctacgctcaggtgagaaagtaagttaccataatgagttgccctatggttaaagtgtggcaacggcgcctatgcgtggctcggcgcttaatgatgagctggcctccatatagaaatatatggagtataaactgtgataactgtcatgtgtgaattgcatcattgggaattgggctgtgatggaattttctgcaggtacactaacctcgaaaacgtatgtgtagctgacgactagcaaaataccgtgagagtcgttagtatgccaccgatatagaacgttattgccacagtgtgttggcaaaaactcgtgaggacgtataagacgagcatgcatcatgattgttgcatcatgtttgtcacctatacacccaaaatgcttctctcatccttattccagtaaccattgattataaataatgtggtgtaatattgtattatgaacctcgatgaaataggtgtcctccattctttaggtgacctcttagggtgctttatatgtgctcttgtgcttaatgtgtcgatagaaggttagagacttgtttgcctaaacccaaaactaggttctgttcttatttagtgaaccatgaccccagagttgaatgctccattatcactccatgactaaacccatgcaaataaatgcgtagataatttctttgttggacataaattgtgcctaggcttaaacaagaatctcgagtcatgtttccttctaaaaccattcccttgtttattggtgcaagctgatgtaccttaactagttcgcctgttcttaaggatcgccatgttgaattatcaacccaacctaggaaaagtatgtccgaccattttcttgaattttatgcctttgatttcccccatacctatcgaaggcataccaacttaatcttatgattgtttcccctctatatctaatcagatactaatccttgacccttgtactctctgcgatgggcatagagatatgcttggggctgaattaacagtctcccatcgtactcctttcatcaagtttatgttatggccatatcttgctcatttccttgggccataatctatttggctctctacttgtaaccattcttacaggtggagtatctcttgtatattgtcacccttgctcaatctattggtgtggcgcaagatttcttattggttacgtctggtaatggtgttatgactaaaaccgatgatgccacgacgaaaccgagggcctcctgtgaatgtacacacatggttgtgctgcttggcacgcgttggtatcacgattagtagttgtaatccattatgagactatatcaatgtgttatcttgacccaatctatttttgctacgtgagattcattattggtgctagttcggtgatggtgtcatgactaaggacttatggtgccgcagcgaaactgagagccccttgtgaatgtacacgcaaggttatgctgcttggcgcatgctggtatcgatgtctctagtcatgatccattgtggaactacactgatgtgtgatctttcgtggagtcctcccttgaaacaatttctatgttgtttgtcaagtgatcaagcaacatctattatttctgttggatcaaagagcataccactttcatgtgtggtttcttttcttttgatcttggtagtgactacttatacaagttccctttacatcctttgtgtaaaggtgaagccttggagctttttagtgttgagaaacaactgattagctctcaaaatggtgatctgtttcccctgctgctgagatgcaggagtttgttcattcgctctcttatttaatccatgtacttctgaaccaagtcatttcatctcacatgaagaaacggatgaacaacatgaccaaatggatttctacccaagtgcataatctcctgttagccaatgtgaactctcaacccttggcttaccaatggtactgagaggatctgctcaatgtcaaaagtagttcaataagttggttttgactaacttgtaactgcccaatgaacgaaggttgagtttagagatcgttttgtcgagttgtctaaactcactttggttcaacccgtccaaagaaagttcttacaaggatcaagttaaaatcgactgataacacctagtcatcgctctagtcgtgtctcgatcgcctcacgtatggttttccgacgtgtgtgaccagtcgagccatgattagtgctgaataaaatggactggttacaaagtccacatttacagatccctccgttggtgattttctcgaatctatatcacctttcagggacttggattttctggctagccacgggtcaactgtgatgttattcgacattcacacccgtctcgtgtgctatgaactcactgtgaccacttgttggtaaacctctttctgtgtgttttacccaagatggtgcatctggttctgtttgggcaaaatcgcgtattcaccgcttgctcaacagactcagatagtacagtgtcatcaaagaaagcaaactgcacacatggaaccttatgtgttttcatggcagacatcgtctctattgatggacatctttaaattagcttgtggcgatacatgctatgtccactagagaaacgacatcctgaggcactcgccttcgctcagaactgtctcacgattatcgctgatatggatgtgggttacatgcttctctactcttagaagtctttcattccgaatctcgggacgagattcttttaagggggggctgtaacaccccaggtgtttatattccgctcgacaacgagtatgaacttaagcacgcaatatcagtggataaaacggattttaaattttaaacatcttcgcctatcgcgattttaatatcgcatatgtttcctctgtcgcgagtgcgacgtcgtttttgtttttaatcgtccgggctcttcctaaaattttcgtgatattcggaacatagctgtttcgaagatcggtgcgtccgatgattatttaaaattcgtcgctcgcgcaaatacgaattcggaagcctgaaccactcggatgatttttattccgagcaaattaatttgagctcgacgactaaaattattcggggcaaaataattaggatcgcgcgtcgtctgagtgaaatcgtgcgcgtgaatatgatctaatttatccttcagcgcggtattttgacgatgaaatcgcgtatacattagcggatctggtttcgactaatttcggtcgaaccacgcagaacaaattatcagtgccgaaatcagtttaattcggtctgttgtttcgcgtcccgatccaaatcctcggatataaataacgggtaaaaattcatctaaccctcgagaatttaccaaatcaaatcctatccaaatattatggtcaatcacattttggttcgactctttgatacatcttttagaccataattctagaacctatgtttatccatacgtgatgttgttaaagaaaagaagaaaacctttatttacttttctctcccacgctagctcttggaaatttcgcgagtgctcatgcttctcattttttttaatcccataccgcttgctcctctatactacgatcacattcattttatctggaattatcacgttggtttatgtggcattcttatccagcgttcactacttggaaagttgtacgtaatatccattcccaaccgtctaaatgcttctagccgtattccataatctcagctcgttgttatctcttgccgtgtctcatctctaaaaaaatcttcatcgccaatatctcaccgcccttctgctgcgttgatttttgttggtctacattcttatccctaccgcccttgccttgctctatctttccatgtcgagtcacgtacacgtcccctgcttgcttgtatcttcatcacgacgctcacatctgccttatctcctatcgctgccacgacctcaagccgccgaacaccattgcacctgcctgctcgagtcgctttcaactcatggccatggagtccgcctcagcctctgtcttccactcggttgctcctctgctggctacggagagccttcactagccatggccgcgccctctctggtaccgagctcgcccataccgagctccctcagcgtcccgtccatggtcctcctccactcgccctggccatgcttgcctgccgcgccacactgagtttctggagtctggcacggtgaactggggagagaagcagccaagcagctccctcacgccgcggcttcctccttcagctcggcgctcatctccttctctgctcggaccgtgcccagctccgcgcgtcgcagttcgccccagctcgttgtcctgcctcccttgctcactgcgtcggtcactcgctgatgctccaactcatcagtcgttgttgtcccatccgcgtcagcacgcgactgtggtcgtgttcatcgaattcgccaacgctttgttgccgattcgactgtcgtcgcttcgcgtgttgtcgagcccatcgagcctcgttcttctctgctcgctctcgtcgaacaccgaattccggatattagacaaaaataagcgagacccctgtgtatcgcttatcaagtactcggttgaagacttcaatctaagatcatcgtcattctgtgcgtcgtcaagaaatcccaagagtcgggtgaagacggagccaacagcatagtgttcaccaagtgcgcgacaaaaagctcgaaccagtcgtcaatcatctcgacaacaaccacatccaagactccaccgtccaataattttgtctcatcgcccttcaaatccgagtcctcgtccataggatcgtcgttgacctcgcaacttcagctcgagttaattatggtaagttgatttattattctcgtcaactaaataaatgataggattaaatagaagaattgattgcgatgattctcttgttcattactcgatgtagagattaagttgaattttagggttgtgcgataagtatattggtagatatatatataatacacaggttaaccggtaaattagtttagaaagttaataaaagttattctatcaaattttataagtattagatgtccaaaaattgtgaagttaaaagttataagtcgtttagtgtgttctctagactaggtctgataatttatgtgttggtcgatctcatgcttggaatggatgttgattgctacctcgactgtttagctaggttgtaagaacatgattgtcgtaagtaacaatatatcgataactagtgtacgtaatgtctcgtcattaaataggttatttctcttttgcgtagcatcgtaatatctagtgttattgttctttatatgcattcatatgcataatgcatttcattcaggacgataaataatcgcgtgatgtggaagaaaaaccaagttgaccccaaacgcgggctaatctgcaagctgaagctgaagaatcaacctgaagatggttaaatcaagcaagtgctcggtcgacgaatactcgtcaggcggatgtcacctaacaacactaacctagtgttactcaggcaagccccggtgcatttgtcaccttccttgaggtttttaaaatctttctcacttgattgctgcattaggtgataggagttgattgataaaagaattcatgcattaccttccttgaatttgattaccttccttgatcacccgttttacaaaagattttgatgcttagccttgctttagaaaacaaaatgttttgtttttacaaactatgatgtggcaaaggtgggtgggatgttttggaaaataaaacttgatggtggatctgtcaaaggccttgatggattcaacatcggaaaagatgtacctctgccaggtaccaaactttgggtttgaaataattaagctgagaccgggcgggtgacttgcacgggaaaggagtctcggtgtagtgtctccgtctgagtcgattaaggaccttgtcgatgtaggcctgctgaccgaggaccctttaactggtcacatgcctcgtcatgggtaagctttgcctcgggcggactaaggccagaataagataacacgaaatgggcgtggagcggtggcgagagtagcgtgtaccctccgtggcaagag

SEQ ID NO: 57773 - DNA, 437 bp, Zea Mays
cagacgcctgctaccctagccaccacattcatcctaggtctcgatcaccttgcgccttcccagcgaccataaacaccatagccatagccatggtttccacagagctttaccaccccacagggctaggcactgagaagcccttgttgtccctctaatcacgaaaaggaaacaatcggagcaggcatgcgacaagatggtggagcacgccaaagtggaggaggagatggcgcaccggcaagaagcatccgctatcgccaccgccgccctcaacgcaaataaagaagagacgcatggtggcggagagtagcggcagcggttcaagacgcttgctgatgagggaaggtcgatgtcctctacggtggtgcggaagaatccgagtgagtgagacggaggcagggaaagagatggaaagttagtggtttatggcttaccttatt

SEQ ID NO: 57774 - DNA, 2091 bp, Zea Mays
gccgcgccaggccagcagctagctaggcaggtagctcttgccaacgccccggccggccggcacctcacattttgtagcgtgatcgcgcgccgccgccacgcctccccatgcaagctactccgatcctagctactggctagctagttgcaactactcgagctaccagctagctaactggccagcagcaggtagtctgctcagggtcggagggtcggccggcgcggcggcggggcgcgcgcgcgcgggaaggcgggaaggcgggaacgcatgggcaacgccctggggtgcgcggggctcggcgagcggctggcggccagcgcgaggaacggcgacgcggcggaggtgcgccgcctgctggaggaaaacccggggctcgcgcgctgcgccgccgtcggcagcagcctcaactcgccgctccacctcgccgccgccaaaggccaccacgaggtgagcaacgacgacgacgattggtaatcgtttatttgagtcacgcgtcatgcgttttcgtccttgcaaagctggtctgccgcctcgtctacagtggcacgcgcaattaatcacctggacagtgacacaaaatctactactaccggcttccggcacacgtattattttccgggggattttcagaggatcgccgcgttgctgctggagaacggagcagaggtgaatgctaggaacctttccggcgagacggcgttgatgcaggcgtgccggttcggccactgggaggtggttcagacgctgctggttttcggatgcaacgtgtccaaggtggacagcctgagcggccagacggcgctgcacctggcggcagcgggaggccacgccacgtgcgtgcgcctgctgctggccggcgccggcgccggcaggaacaagctcgtgaacagggcggccagcggcggcgtgacggcgctgcacctggcggcgctgcacgggcacgcggactgcgtgcacctgctggtggacgagcgcgccgacgtcgccgcgccgacgctgccctgcacggcggcccccatggcggccatcggcgccgggagcgcgccgctgcactacgccgccgcgggcggcgaggtcaggtgctgccagatcctcgtggcgcgcggggccgacagggccgccgccaactgcaacgggcaggtggatcccgttggacgtggccaggacgtggggctgccagtggctggagcacgtcctgtcccccgagtctcacctgcgcatccccaggttcccgccctccgcctacctctcgtcgccgctcgccagcgcgctcgccctcgcaagggactgccgcctgcttctcaacacggcgcagctggacagcggcggcgccgacgcctgcgcggtctgcctggaaagaccctgtgacgtcgcagccgaagtgtgcgggcacgagctgtgcgccaagtgcgcgctggacctgtgctctgtggtcaagtcctacgacgtgcccgggatcgccggcaccatcccctgcccgctgtgccggagcgccatcgcctcgttcaggatgcgggccgcggcggacgagcccgagcctgacgtgaacgacgccggcggtggccgccgcggtgccggcgaccgccaggcggcgccgtccagcccggagaagaaacggagcacggactcggaacaggatgtcgtcctccccttctactgcgcgcctctcgccgtcccgtcttgaccggccggcgatgcaggcaggctgcatttgcgggacgcagaggagctactgccgactgcatcatcagtggaaacgtcaaatgtgcatagacagaagaggcagacagattgtttgctgatgcttgccgacggcattgctggattttaatttgttttttattatggttctgcacatggcactagctggtgtaatgtaacatgttggtttattgtggaaagaaaggaggaacattcttttgctgtaaaaaataatgggggttggtttcggggtgttttggctcatgatcctttgcactctgtctcaagagcattattcacatgtacgtatcataagcattctgtctgaaaggaggaacattctttttgctgcaataaaagagaatggggttggtttcagccctttttttt

SEQ ID NO: 57775 - DNA, 690 bp, Zea Mays
aaaaaagctagctatttgttttcgtttctgactttttacactaagaagctgacgataagctcaaataatagccttgcacttgcaggtaaacgaatttacgatccagaagcacgcacgtgacgtggctgtcagcaagtagcagcttctgtcgcgtctccccctccctgaccgagcgatccagcgagagggagcgagtagcagccgcagccggaggagctcgccgaggccgccgaagacgaccatggggttctgggcgacgacgctcatcttcgtcctcgccggcgtcgccgcatccctcttcacgctcctctgctgcaaccgcgggccctccacaaacctgttccatttgaccttggtgactacagctgtaatttgttgctggatgatgtatgcaatcgtctaccttgctcagatgaagccattgatcaaccccattctgagcggagagtgagcgctgcatctgtattgaacagaacgaaagcgagacctgctgtaccattgttcagtccgtgaactttatattcattttggccccacctgatgaaataaataaataaactgccatgatttttttggtgccactcttcacccgtgattagtgtatgcaattgcatgatatacgcagtaataacatataaatatctatgtatcgatgatgtgcttgaattggggtgtctcgtgcgcgttccc

SEQ ID NO: 57776 - DNA, 670 bp, Zea Mays
gaatttacgatccagaagcacgcacgtgacgtggctgtcagcaagtagcagcttctgtcgcgtctccccctccctgaccgagcgatccagcgagagggagcgagtagcagccgcagccggaggagctcgccgaggccgccgaagacgaccatggggttctgggcgacgacgctcatcttcgtcctcgccggcgtcgccgcatccctcttcacgctcctctgctgcaaccgcgggccctccacaaacctgttccatttgaccttggtgactacagctgtaatttgttgctggatgatttgggcgcgttgtgaatatttaggccgccgcttgcataatatgatgtcatgaatagcaaaagcatatttaggtatgcaatcgtctaccttgctcagatgaagccattgatcaaccccattctgagcggagagtgagcgctgcatctgtattgaacagaacgaaagcgagacctgctgtaccattgttcagtccgtgaactttatattcattttggccccacctgatgaaataaataaataaactgccatgatttttttggtgccactcttcacccgtgattagtgtatgcaattgcatgatatacgcagtaataacatataaatatctatgtatcgatgatgtgcttgaattggggtgtctcgtgcgcgttccc

SEQ ID NO: 57777 - DNA, 393 bp, Zea Mays
cccagcgtcgcctcatccggcgcggggagggtggttactccttgagtcccgtaacaacccaggcggccagctggggccgattaagtttattgcatgggcctatttaacggagctctcatgcactttgcgaagacgtgatagccaccaggaaatacccgaccaagtaggtcgcgcccttgccctcgtgtcctcgtcgtttccgcggccttagggtcaagccgaggagctccactagttcgcaaggaagattgcggcgaccttgccgggcagaacaagcgaccttgggcccaggaattcttcgccggtggaagattgtcgccgtggctttgcttctggcgtggctggggacactccctctacaatccgcgtagtgaggacacgtgtcaatagaag

SEQ ID NO: 57778 - DNA, 2257 bp, Zea Mays
caagtgccaatttgattgaatttgagattagtattttaaactcaagatggttaacttcgggaagaaattgatggctgatcaaattccagaatggaaaggatattatatcaattacaagttgatgaagaagaaagttaaacagtatggccagcagctccagcagggcgagaaagatcgtcgccgggttctgaaggatttctcgaagatgcttgatgatcagatagagaagattgtgctgtttctgttggaacagcaaggaatgttggcaagcaggattgaggagttaggaaagcaaagggcaatactacaagaccagccagatatatctggtattgctgagttacgagaagcttatagggaagttggtattgacctcatcaaactccttaaattcgttgatcttaatgcaactggcattcggaaaattttgaagaagtttgacaagcgtttcggctatagatttactgattactatgtgacaagtagatcaaatcacccgtactctcagctgcaacaggtctttaagcatgtgggtgtaggagctgttgtaggagctttgtcacgtaaccttgctgaacttcaagaacgtcaaggaagctacttatctatttatgatcagccatcttctgctcttaaggaccccatcattgatatgataaactcctcagttgataagttgacaaggtcaactaattttcttcgctttttggggcaacatgccttgattgtggatgaggagtctcctagtactgcaggagaggaagaaatagaagatcagaaataccatttcatgtcccttatgctgaacctggtgaacacatttctttacatggtcaacacatacatcattgtgccaactgcagatgactattcacattgttttgttcttggggaatgtatgctatgcaatggcatatgatatgaagtccctaacagtccttattatcggccgtttactctgtgggatgggttctgcaagagctgtcaaccgtcggtacattagtgattgtgtccctgcaagaatacgcatgcaagcttcggcaggattcgttagcgcaagtgcacttggcatggcctgtgggccagcgctagctggtttacttcaatggaaattcaagatctacatggttactttcaatcaatcgactctacctggttgggtgatggcagttgcgtggctattgtatttgatttggctatgggtctcattcaaagaaccgaaccgtgctactgaggtgaatgaagccccacaaaatcctgcttctggacaaacggttgatattggacaagtagagaatggacttgctcagcctctgctcatggattccgtagataaacaaaatgaagatgaagatgaagaagttgatgaaagtgaagaagctgcagatgattcacgcaagcctgcaacatcaattggctcagcatacagactgcttactccatcagtaaaggtccagttgttgatatacttcatgctgaaatacgcaatggagattttgctttcagagtctagtgttatcactaatcactatttcagttggaacacaagcgcagtggcaatttttctagcaatccttgggttgacggtgcttcctgttaatgctgttgttggaacatacatcagcaatatgtttgaggacaggcaactcctcatggtctctcaaattacgttgctagtaggcattatcttcagcttcaaggttacgagtacatactctgttgtccagtatgttgtctcagcacttgtcacatttgtttctgcagaagttcttgaaggtgtgaacctttccctcctatcaagcgtgatgtcatctcgcctctcccgtggcacatacaacggtggcctcctctcgacggaggccgggaccctggcgagggtggtcgctgactgcaccatcactgcggcggggtacctgggcgtggggaagcttctcaacgtcaccctgctaccatccctggtgatatgtgttgcgtccattgcctgcaccttcctgacgtataactcgcttttctgatggagcttcacaatgtatttgtgtcatcatgattcgttccatattagcgcaaatcaaggcagctgggagaccgccattgccattgcccgaaggggctattgtattactattattatatgttcgtcgatttaattgctgtaaattgattgataaaatgatggtagctactgaacctggtcttgccgtgcaaaattttgaccgactctatccttgtcatgaatacatgctgtccatattatggc

SEQ ID NO: 57779 - DNA, 2260 bp, Zea Mays
caagtgccaatttgattgaatttgagattagtattttaaactcaagatggttaacttcgggaagaaattgatggctgatcaaattccagaatggaaaggatattatatcaattacaagttgatgaagaagaaagttaaacagtatggccagcagctccagcagggcgagaaagatcgtcgccgggttctgaaggatttctcgaagatgcttgatgatcagatagagaagattgtgctgtttctgttggaacagcaaggaatgttggcaagcaggattgaggagttaggaaagcaaagggcaatactacaagaccagccagatatatctggtattgctgagttacgagaagcttatagggaagttggtattgacctcatcaaactccttaaattcgttgatcttaatgcaactggcattcggaaaattttgaagaagtttgacaagcgtttcggctatagatttactgattactatgtgacaagtagatcaaatcacccgtactctcagctgcaacaggtctttaagcatgtgggtgtaggagctgttgtaggagctttgtcacgtaaccttgctgaacttcaagaacgtcaaggaagctacttatctatttatgatcagccatcttctgctcttaaggaccccatcattgatatgataaactcctcagttgataagttgacaaggtcaactaattttcttcgctttttggggcaacatgccttgattgtggatgaggagtctcctagtactgcaggagaggaagaaatagaagatcagaaataccatttcatgtcccttatgctgaacctggtgaacacatttctttacatggtcaacacatacatcattgtgccaactgcagatgactattcatagcattgttttgttcttggggaatgtatgctatgcaatggcatatgatatgaagtccctaacagtccttattatcggccgtttactctgtgggatgggttctgcaagagctgtcaaccgtcggtacattagtgattgtgtccctgcaagaatacgcatgcaagcttcggcaggattcgttagcgcaagtgcacttggcatggcctgtgggccagcgctagctggtttacttcaatggaaattcaagatctacatggttactttcaatcaatcgactctacctggttgggtgatggcagttgcgtggctattgtatttgatttggctatgggtctcattcaaagaaccgaaccgtgctactgaggtgaatgaagccccacaaaatcctgcttctggacaaacggttgatattggacaagtagagaatggacttgctcagcctctgctcatggattccgtagataaacaaaatgaagatgaagatgaagaagttgatgaaagtgaagaagctgcagatgattcacgcaagcctgcaacatcaattggctcagcatacagactgcttactccatcagtaaaggtccagttgttgatatacttcatgctgaaatacgcaatggagattttgctttcagagtctagtgttatcactaatcactatttcagttggaacacaagcgcagtggcaatttttctagcaatccttgggttgacggtgcttcctgttaatgctgttgttggaacatacatcagcaatatgtttgaggacaggcaactcctcatggtctctcaaattacgttgctagtaggcattatcttcagcttcaaggttacgagtacatactctgttgtccagtatgttgtctcagcacttgtcacatttgtttctgcagaagttcttgaaggtgtgaacctttccctcctatcaagcgtgatgtcatctcgcctctcccgtggcacatacaacggtggcctcctctcgacggaggccgggaccctggcgagggtggtcgctgactgcaccatcactgcggcggggtacctgggcgtggggaagcttctcaacgtcaccctgctaccatccctggtgatatgtgttgcgtccattgcctgcaccttcctgacgtataactcgcttttctgatggagcttcacaatgtatttgtgtcatcatgattcgttccatattagcgcaaatcaaggcagctgggagaccgccattgccattgcccgaaggggctattgtattactattattatatgttcgtcgatttaattgctgtaaattgattgataaaatgatggtagctactgaacctggtcttgccgtgcaaaattttgaccgactctatccttgtcatgaatacatgctgtccatattatggc

SEQ ID NO: 57780 - DNA, 2386 bp, Zea Mays
tatcttttttctttgtctgtttgtgctgctaagtgctaacacagtgctactttcattggcagattagtattttaaactcaagatggttaacttcgggaagaaattgatggctgatcaaattccagaatggaaaggatattatatcaattacaagttgatgaagaagaaagttaaacagtatggccagcagctccagcagggcgagaaagatcgtcgccgggttctgaaggatttctcgaagatgcttgatgatcagatagagaagattgtgctgtttctgttggaacagcaaggaatgttggcaagcaggattgaggagttaggaaagcaaagggcaatactacaagaccagccagatatatctggtattgctgagttacgagaagcttatagggaagttggtattgacctcatcaaactccttaaattcgttgatcttaatgcaactggcattcggaaaattttgaagaagtttgacaagcgtttcggctatagatttactgattactatgtgacaagtagatcaaatcacccgtactctcagctgcaacaggtctttaagcatgtgggtgtaggagctgttgtaggagctttgtcacgtaaccttgctgaacttcaagaacgtcaaggaagctacttatctatttatgatcagccatcttctgctcttaaggaccccatcattgatatgataaactcctcagttgataagttgacaaggtcaactaattttcttcgctttttggggcaacatgccttgattgtggatgaggagtctcctagtactgcaggagaggaagaaatagaagatcagaaataccatttcatgtcccttatgctgaacctggtgaacacatttctttacatggtcaacacatacatcattgtgccaactgcagatgactattcagtaagccttggggcagcttctactgtttgtggtgtggtcattggttcaatggctgttgcacaaatattttcctctgtttacttcagtgcatggtccaacaagtcatatttcaaaccgcttgttttcagtagcattgttttgttcttggggaatgtatgctatgcaatggcatatgatatgaagtccctaacagtccttattatcggccgtttactctgtgggatgggttctgcaagagctgtcaaccgtcggtacattagtgattgtgtccctgcaagaatacgcatgcaagcttcggcaggattcgttagcgcaagtgcacttggcatggcctgtgggccagcgctagctggtttacttcaatggaaattcaagatctacatggttactttcaatcaatcgactctacctggttgggtgatggcagttgcgtggctattgtatttgatttggctatgggtctcattcaaagaaccgaaccgtgctactgaggtgaatgaagccccacaaaatcctgcttctggacaaacggttgatattggacaagtagagaatggacttgctcagcctctgctcatggattccgtagataaacaaaatgaagatgaagatgaagaagttgatgaaagtgaagaagctgcagatgattcacgcaagcctgcaacatcaattggctcagcatacagactgcttactccatcagtaaaggtccagttgttgatatacttcatgctgaaatacgcaatggagattttgctttcagagtctagtgttatcactaatcactatttcagttggaacacaagcgcagtggcaatttttctagcaatccttgggttgacggtgcttcctgttaatgctgttgttggaacatacatcagcaatatgtttgaggacaggcattatcttcagcttcaaggttacgagtacatactctgttgtccagtatgttgtctcagcacttgtcacatttgtttctgcagaagttcttgaaggtgtgaacctttccctcctatcaagcgtgatgtcatctcgcctctcccgtggcacatacaacggtggcctcctctcgacggaggccgggaccctggcgagggtggtcgctgactgcaccatcactgcggcggggtacctgggcgtggggaagcttctcaacgtcaccctgctaccatccctggtgatatgtgttgcgtccattgcctgcaccttcctgacgtataactcgcttttctgatggagcttcacaatgtatttgtgtcatcatgattcgttccatattagcgcaaatcaaggcagctgggagaccgccattgccattgcccgaaggggctattgtattactattattatatgttcgtcgatttaattgctgtaaattgattgataaaatgatggtagctactgaacctggtcttgccgtgcaaaattttgaccgactctatccttgtcatgaatacatgctgtccatattatggc

SEQ ID NO: 57781 - DNA, 2187 bp, Zea Mays
tatcttttttctttgtctgtttgtgctgctaagtgctaacacagtgctactttcattggcagattagtattttaaactcaagatggttaacttcgggaagaaattgatggctgatcaaattccagaatggaaaggatattatatcaattacaagttgatgaagaagaaagttaaacagtatggccagcagctccagcagggcgagaaagatcgtcgccgggttctgaaggatttctcgaagatgcttgatgatcagatagagaagattgtgctgtttctgttggaacagcaaggaatgttggcaagcaggattgaggagttaggaaagcaaagggcaatactacaagaccagccagatatatctggtcttgctgaacttcaagaacgtcaaggaagctacttatctatttatgatcagccatcttctgctcttaaggaccccatcattgatatgataaactcctcagttgataagttgacaaggtcaactaattttcttcgctttttggggcaacatgccttgattgtggatgaggagtctcctagtactgcaggagaggaagaaatagaagatcagaaataccatttcatgtcccttatgctgaacctggtgaacacatttctttacatggtcaacacatacatcattgtgccaactgcagatgactattcagtaagccttggggcagcttctactgtttgtggtgtggtcattggttcaatggctgttgcacaaatattttcctctgtttacttcagtgcatggtccaacaagtcatatttcaaaccgcttgttttcagtagcattgttttgttcttggggaatgtatgctatgcaatggcatatgatatgaagtccctaacagtccttattatcggccgtttactctgtgggatgggttctgcaagagctgtcaaccgtcggtacattagtgattgtgtccctgcaagaatacgcatgcaagcttcggcaggattcgttagcgcaagtgcacttggcatggcctgtgggccagcgctagctggtttacttcaatggaaattcaagatctacatggttactttcaatcaatcgactctacctggttgggtgatggcagttgcgtggctattgtatttgatttggctatgggtctcattcaaagaaccgaaccgtgctactgaggtgaatgaagccccacaaaatcctgcttctggacaaacggttgatattggacaagtagagaatggacttgctcagcctctgctcatggattccgtagataaacaaaatgaagatgaagatgaagaagttgatgaaagtgaagaagctgcagatgattcacgcaagcctgcaacatcaattggctcagcatacagactgcttactccatcagtaaaggtccagttgttgatatacttcatgctgaaatacgcaatggagattttgctttcagagtctagtgttatcactaatcactatttcagttggaacacaagcgcagtggcaatttttctagcaatccttgggttgacggtgcttcctgttaatgctgttgttggaacatacatcagcaatatgtttgaggacaggcaactcctcatggtctctcaaattacgttgctagtaggcattatcttcagcttcaaggttacgagtacatactctgttgtccagtatgttgtctcagcacttgtcacatttgtttctgcagaagttcttgaaggtgtgaacctttccctcctatcaagcgtgatgtcatctcgcctctcccgtggcacatacaacggtggcctcctctcgacggaggccgggaccctggcgagggtggtcgctgactgcaccatcactgcggcggggtacctgggcgtggggaagcttctcaacgtcaccctgctaccatccctggtgatatgtgttgcgtccattgcctgcaccttcctgacgtataactcgcttttctgatggagcttcacaatgtatttgtgtcatcatgattcgttccatattagcgcaaatcaaggcagctgggagaccgccattgccattgcccgaaggggctattgtattactattattatatgttcgtcgatttaattgctgtaaattgattgataaaatgatggtagctactgaacctggtcttgccgtgcaaaattttgaccgactctatccttgtcatgaatacatgctgtccatattatggc

SEQ ID NO: 57782 - DNA, 2203 bp, Zea Mays
tatcttttttctttgtctgtttgtgctgctaagtgctaacacagtgctactttcattggcagattagtattttaaactcaagatggttaacttcgggaagaaattgatggctgatcaaattccagaatggaaaggatattatatcaattacaagttgatgaagaagaaagttaaacagtatggccagcagctccagcagggcgagaaagatcgtcgccgggttctgaaggatttctcgaagatgcttgatgatcagatagagaagattgtgctgtttctgttggaacagcaaggaatgttggcaagcaggattgaggagttaggaaagcaaagggcaatactacaagaccagccagatatatctggtattgctgagttacgagaagcttatagggaagttggtattgacctcatcaaactccttaaattcgttgatcttaatgcaactggcattcggaaaattttgaagaagtttgacaagcgtttcggctatagatttactgattactatgtgacaagtagatcaaatcacccgtactctcagctgcaacaggtctttaagcatgtgggtgtaggagctgttgtaggagctttgtcacgtaaccttgctgaacttcaagaacgtcaaggaagctacttatctatttatgatcagccatcttctgctcttaaggaccccatcattgatatgataaactcctcagttgataagttgacaaggtcaactaattttcttcgctttttggggcaacatgccttgattgtggatgaggagtctcctagtactgcaggagaggaagaaatagaagatcagaaataccatttcatgtcccttatgctgaacctggtgaacacatttctttacatggtcaacacatacatcattgtgccaactgcagatgactattcagatgggttctgcaagagctgtcaaccgtcggtacattagtgattgtgtccctgcaagaatacgcatgcaagcttcggcaggattcgttagcgcaagtgcacttggcatggcctgtgggccagcgctagctggtttacttcaatggaaattcaagatctacatggttactttcaatcaatcgactctacctggttgggtgatggcagttgcgtggctattgtatttgatttggctatgggtctcattcaaagaaccgaaccgtgctactgaggtgaatgaagccccacaaaatcctgcttctggacaaacggttgatattggacaagtagagaatggacttgctcagcctctgctcatggattccgtagataaacaaaatgaagatgaagatgaagaagttgatgaaagtgaagaagctgcagatgattcacgcaagcctgcaacatcaattggctcagcatacagactgcttactccatcagtaaaggtccagttgttgatatacttcatgctgaaatacgcaatggagattttgctttcagagtctagtgttatcactaatcactatttcagttggaacacaagcgcagtggcaatttttctagcaatccttgggttgacggtgcttcctgttaatgctgttgttggaacatacatcagcaatatgtttgaggacaggcaactcctcatggtctctcaaattacgttgctagtaggcattatcttcagcttcaaggttacgagtacatactctgttgtccagtatgttgtctcagcacttgtcacatttgtttctgcagaagttcttgaaggtgtgaacctttccctcctatcaagcgtgatgtcatctcgcctctcccgtggcacatacaacggtggcctcctctcgacggaggccgggaccctggcgagggtggtcgctgactgcaccatcactgcggcggggtacctgggcgtggggaagcttctcaacgtcaccctgctaccatccctggtgatatgtgttgcgtccattgcctgcaccttcctgacgtataactcgcttttctgatggagcttcacaatgtatttgtgtcatcatgattcgttccatattagcgcaaatcaaggcagctgggagaccgccattgccattgcccgaaggggctattgtattactattattatatgttcgtcgatttaattgctgtaaattgattgataaaatgatggtagctactgaacctggtcttgccgtgcaaaattttgaccgactctatccttgtcatgaatacatgctgtccatattatggc

SEQ ID NO: 57783 - DNA, 2209 bp, Zea Mays
tctctctggatatttaacttgctgattgtagcatcaacttgatagagaagattgtgctgtttctgttggaacagcaaggaatgttggcaagcaggattgaggagttaggaaagcaaagggcaatactacaagaccagccagatatatctggtattgctgagttacgagaagcttatagggaagttggtattgacctcatcaaactccttaaattcgttgatcttaatgcaactggcattcggaaaattttgaagaagtttgacaagcgtttcggctatagatttactgattactatgtgacaagtagatcaaatcacccgtactctcagctgcaacaggtctttaagcatgtgggtgtaggagctgttgtaggagctttgtcacgtaaccttgctgaacttcaagaacgtcaaggaagctacttatctatttatgatcagccatcttctgctcttaaggaccccatcattgatatgataaactcctcagttgataagttgacaaggtcaactaattttcttcgctttttggggcaacatgccttgattgtggatgaggagtctcctagtactgcaggagaggaagaaatagaagatcagaaataccatttcatgtcccttatgctgaacctggtgaacacatttctttacatggtcaacacatacatcattgtgccaactgcagatgactattcagtaagccttggggcagcttctactgtttgtggtgtggtcattggttcaatggctgttgcacaaatattttcctctgtttacttcagtgcatggtccaacaagtcatatttcaaaccgcttgttttcagtagcattgttttgttcttggggaatgtatgctatgcaatggcatatgatatgaagtccctaacagtccttattatcggccgtttactctgtgggatgggttctgcaagagctgtcaaccgtcggtacattagtgattgtgtccctgcaagaatacgcatgcaagcttcggcaggattcgttagcgcaagtgcacttggcatggcctgtgggccagcgctagctggtttacttcaatggaaattcaagatctacatggttactttcaatcaatcgactctacctggttgggtgatggcagttgcgtggctattgtatttgatttggctatgggtctcattcaaagaaccgaaccgtgctactgaggtgaatgaagccccacaaaatcctgcttctggacaaacggttgatattggacaagtagagaatggacttgctcagcctctgctcatggattccgtagataaacaaaatgaagatgaagatgaagaagttgatgaaagtgaagaagctgcagatgattcacgcaagcctgcaacatcaattggctcagcatacagactgcttactccatcagtaaaggtccagttgttgatatacttcatgctgaaatacgcaatggagattttgctttcagagtctagtgttatcactaatcactatttcagttggaacacaagcgcagtggcaatttttctagcaatccttgggttgacggtgcttcctgttaatgctgttgttggaacatacatcagcaatatgtttgaggacaggcaactcctcatggtctctcaaattacgttgctagtaggcattatcttcagcttcaaggttacgagtacatactctgttgtccagtatgttgtctcagcacttgtcacatttgtttctgcagaagttcttgaaggtgtgaacctttccctcctatcaagcgtgatgtcatctcgcctctcccgtggcacatacaacggtggcctcctctcgacggaggccgggaccctggcgagggtggtcgctgactgcaccatcactgcggcggggtacctgggcgtggggaagcttctcaacgtcaccctgctaccatccctggtgatatgtgttgcgtccattgcctgcaccttcctgacgtataactcgcttttctgatggagcttcacaatgtatttgtgtcatcatgattcgttccatattagcgcaaatcaaggcagctgggagaccgccattgccattgcccgaaggggctattgtattactattattatatgttcgtcgatttaattgctgtaaattgattgataaaatgatggtagctactgaacctggtcttgccgtgcaaaattttgaccgactctatccttgtcatgaatacatgctgtccatattatggc

SEQ ID NO: 57784 - DNA, 1368 bp, Zea Mays
ggcactccgtcggattcatattcctcccctccctaataaaccacacaggtggatgtaaccacccggatctcgccagctagccggattccctattgttgcaggcttgctgccaggctccagggtataaaatccagctgttactgctcctatccaaccaccgcatataggagtcgcatctaccgatgagcgccaccatgacaacacgggagaaatagccgccgcacccagaacccatcctcaccagctcccagaatcaggggtttggtctggggtcttcgtcggagttcgcgggagcacgaggtgcactcgccaggcacgactgatggctggagcggagggaattcttcaccggagcatggacgtcgtggtggtgtcatgtgtcgtcgtgggaggactcccccactacaccgctgcctaagcggggttgcaaggaacctgaagcccaactcggagaagtacctggtgctacaccaaaaagacaagttgtgtccttgatcacattttttgacctaagaatatttatgtttataataatcaccatggcatgcttaggttaaattgatgggacctaataggttacctagttttgtttaccctacaccttgcatacaaatgaattattgggtagtcctgctattgctttacctagttttgggagtaataacatttatgaattatcatcatgttctattatattgctagattatttattattgtgcttgataagatcattttgttaattggaatatggagcgatcacctgagacaacagtttaaccacaacgactatatggctttggtcttggccaattaattaggaaaggtagtgtaggataatccattctcgataggggcaagtggggaggcatcgctgcagagtatagtgatagatgtaattacgacgatggggttacagactatgaaaaaaggcatatgcttccttggtccaaaacgatagcgggttttctcatactagtggaactttgtaaaggccttgtagtgtaccctcgccaactcaccttggaagtgtttaagggtccgtacaatcctgggcaaaaagggaacacaacttgtgggtatagacgtgcaacctctgcagagtataaaactggtatatcagtcgtgctcataggcatgagcggctcgggccctcacatgagtaatttatgaaattaaatttaacatgccatgcattgcattgtgcgagttattaaatgtgatctcttatttaattaggataatatttacttatagttagtaattgctaataaaaatttgaccatcttatttaaaagtaatgctcagccttaaccatttttcttagtaagccttacgctacacatgagccccaaccgtatgtgagctcat

SEQ ID NO: 57785 - DNA, 1008 bp, Zea Mays
gtcggattcatattcctcccctccctaataaaccacacaggtggatgtaaccacccggatctcgccagctagccggattccctattgttgcaggcttgctgccaggctccagggtataaaatccagctgttactgctcctatccaaccaccgcatataggagtcgcatctaccgatgagcgccaccatgacaacacgggagaaatagccgccgcacccagaacccatcctcaccagctcccagaatcaggggtttggtctggggtcttcgtcggagttcgcgggagcacgaggtgcactcgccaggcacgactgatggctggagcggagggaattcttcaccggagcatggacgtcgtggtggtgtcatgtgtcgtcgtgggaggactcccccactacaccgctgcctgtaagatgcctttacatgagtttgtgttgtccttcgttacatgtagcgccctttgtattaggggtatgtgacctatgatgccggggcgctgcctcattatcgtgttgccatcgcggggtgggcgcacgccactggagtgcaaggtcggagcgagaataagaggttagagtcgttgatctccttctgggcgactctgattagaacgtggagatacccctttgtgcattaaaccgtagtcgtcgggtttggatcggagggataggataacgttttggctagatcagatcttggtcataagatggagcgttagtggattagattagatctctccctaataaaatctagattgtatattcaagatcggacgaccctgattagaaattgagataatgttttgatccgatgaaaactgggcatcaatcggggatctagcagctggaaatccataccagttcaacgaggggatctaattcgcgcctttagttgaagatctagcggccgagacacgctcatacccctttggctattgttgttttgcgtaagagaccatgcgttcctcaaaaagcaacccgcagtccaccccagtgcaaagactctcac

SEQ ID NO: 57786 - DNA, 1532 bp, Zea Mays
gccggcacagagggcctcgcacagtcgcactctttattatagccacggccggccggtggacgacagcaccacaccacctccaactacccgagaccatcgacgagcatcttcctgcatctgcaatggctgccgctaccgtgtccgtcccccgcatcaagctgggctcccaggggctagaggtctccgcgcagggcctcggctgcatgggcatgtccgccttctacggtccgcccaaacccgagcctgacatgatcaagctcatccaccacgccgtcgccgccggggtcaccctccttgacacctccgacatgtacggcccgcacaccaacgagatcctgctaggcgcttcaaggcggtgtaaaggagaaggtcgagctggccaccaagtttgccgtctccttcgccgacggcaagcgcgagatccgcggtgacccggcgtatgtacgggcagcctgcgaggccagcctcaagcggctcggcatcgactgcatcgacctctactaccagcaccgcatcgacaagaaggtgcccatcgaggtcacgattggtgaactcaagaagctagtggaagaaggaaaggttaagtacattgggttatccgaagcatctgcatcaacaatccgaagagctcacgcagtccatcctatcactgcagtacagcttgaatggtcattatggtctagagatgcggaagaagatataattcccacttgcagagaacttggaattggaattgtagcttacagtccactaggcagagggtttttttgtagtggagcaaaactagttgactcactgtcagagcaggacttccgcaagcatatgcctagacttcaaccagagaatattgtcaagaatgctaagatattcgagcatgtgaatgcaatggcagctaaaaaaggatgcacaccatcacagctagcattggcatgggttcaccatcaggaaacgatgtttgccccatacctggaacaacaaaaatcgagaacttcaaccagaacgtgggggcgctttctgtgaagttgacaccagatgagatggccgaactcgagtcctgtgctgctgcaggtgaaatcttgggtgaccgttatcctcaaatggccaacacctggaaggactctgagaccccgccattgtcttcttggaaatctgagtagccaatctggtgtctcttcaattctgccaccgtcacattggtgtatctccaaattgtcggactgcagaagatactcaggtgcactttgcaaaagcgtccatatgatgtgcttgccttttgcaagctatgatgtttggtacttggtgtgtattgcatgcctcaatttgtatcaagagtatttacccatgagtatagcttgaaggttaaaaccactggttcgacgaataaccatatgcatttgtatcgagagtatttaccatgagtagcaaactgaattttgtaataatagtcaaaagtgtgattgtaaaatgtacttagggaatgtggtacgctatattagcgtgcaaacataagtatagccagttaagcccctcca

SEQ ID NO: 57787 - DNA, 1057 bp, Zea Mays
gccggcacagagggcctcgcacagtcgcactctttattatagccacggccggccggtggacgacagcaccacaccacctccaactacccgagaccatcgacgagcatcttcctgcatctgcaatggctgccgctaccgtgtccgtcccccgcatcaagctgggctcccaggggctagaggtctccgcgcagggcctcggctgcatgggcatgtccgccttctacggtccgcccaaacccgagcctgacatgatcaagctcatccaccacgccgtcgccgccggggtcaccctccttgacacctccgacatgtacggcccgcacaccaacgagatcctgctaggcaaggcgcttcaaggcggtgtaaaggagaaggtcgagctggccaccaagtttgccgtctccttcgccgacggcaagcgcgagatccgcggtgacccggcgtatgtacgggcagcctgcgaggccagcctcaagcggctcggcatcgactgcatcgacctctactaccagcaccgcatcgacaagaaggtgcccatcgaggtcacgtgcataaaagagaaggatgcagcaacttgcttgtccggttcatgcagaacatgggtgtgcatagagacgaaggcccttatccatctggatggtaaatatttttgtacgtatgttccttggattcatctaccagtgtgaacctggagaaatgcaccagggtagcagccatgatcttcatctgcctgtatacaaattgcaaattccttcccaaatcagatgcaggggcctgcgtattatcatggaagaagggagattggttagatgctaattgttgtccaaattcaatgaaattaccgaccgtcgtcttaggaaattagtgaacacatattgccatctttcctattgtattgtaggtgtcacttgtagccacttgatgttagctaccaggggcgggcccaggatttggacaatgggtattcaaaattttactagagcaaaaaaatgatttgatagcctaaaatcaatcctagtagccttagtcatatataattgatggcctagagcatatt

SEQ ID NO: 57788 - DNA, 1477 bp, Zea Mays
acaacccgatcgcccacgcaaacctctcgacagaccacagctcgatcaaaccgcgaatgaaaaaaccacaaaaaatctcccaattctcgcaaccccaagccggccagcccccacgatctcgaatcccgatgctctcagcatctatcaactcccgagcggtcgtcaccagcgcatgagctttctccgctcgctggcgaactccttctcctcgctgctcttctcgtcggggggcgagacggcgcccatggacgcggcggggtcggcgccgtcgccggcggcggtggtgagggagcgcgtggcggtgaagctccggggctacttcgacctcgccaaggaggagatggacaaggccgtgcgcgccgaggagtgggggctccccgacgacgccaccgcgcactaccgcaacgcgatgcgcgtcatgctcgaggcccaggccgcgcgcgtccctgatgccgtctcctccaggtgcgcccgcgttctcttcctcgcgcccgtcgcggctagggcttctggaatgattcgtgactgactagtgggtggtgccctgcggagcttgagaggcttgcagcgagagggggcaggtcagggtgtaccaggagaagatcgccaagtggcaggcgcaggtcgaggagcggctcagagtgcttggtcagagaagtgctgaaggtgccactgctgcagtagtgcctaagaaggagctactaataaacctcaagagttggatgatgctgttcttcgaagactggtgaaaagaatatatgtgccactacctgatccaaacgtacggaggctacttctgaaaaatcagctcaaaggacaagcattcaaattgtcgaggtattctggaagtgacctgagagccgtgtgcgaagaagctgcaatgatgccaataagagagctcgggccacagagtattcttgctattaaagcaaatcagttgcgacctttgaagtacgaggatttcaagaacgcgatggcggtgatcaggccaagcttgcagaagagcaaatgggacgagcttgagaaatggaacgaggaatttggttcgagctgacggcggctcgcactgcctgtgcctgatgatgatcaagcggtcctatttccatctgtatatatgatttatgtctcccacgctgtggctcacaacacaaggggtcacaccatgcgcccattgatgcgtcctcgttgggctaggcagcacaacatcgacagaagcagaatgtaaaggtatacttctggcaacggcctatacagccattgagggctagtttgaaacaccgttcaagggattttcatttttcaaagggaaattagctcattttcccttgtaaaaatgaaatttttttaggaaaatggtgttcccaaactagccctaagtattgctgttgcccaagttaaacaaaaaaacgtgtctattattgggctctgtttgtttaccctctaaattatattatccagcttaaataagttaagagat

SEQ ID NO: 57789 - DNA, 1518 bp, Zea Mays
acaacccgatcgcccacgcaaacctctcgacagaccacagctcgatcaaaccgcgaatgaaaaaaccacaaaaaatctcccaattctcgcaaccccaagccggccagcccccacgatctcgaatcccgatgctctcagcatctatcaactcccgagcggtcgtcaccagcgcatgagctttctccgctcgctggcgaactccttctcctcgctgctcttctcgtcggggggcgagacggcgcccatggacgcggcggggtcggcgccgtcgccggcggcggtggtgagggagcgcgtggcggtgaagctccggggctacttcgacctcgccaaggaggagatggacaaggccgtgcgcgccgaggagtgggggctccccgacgacgccaccgcgcactaccgcaacgcgatgcgcgtcatgctcgaggcccaggccgcgcgcgtccctgatgccgtctcctccagaggcttgcagcgagagggggcaggtcagggtgtaccaggagaagatcgccaagtggcaggcgcaggtcgaggagcggctcagagtgcttggtcagagaagtgctgaaggtgccactgctgcagtagtgcctaagaaggttgtcatggtgcaatggtctacttgttaggctatgttgaggtgggggtgaggcgtcctcttgtgctcctggggagctactaataaacctcaagagttggatgatgctgttcttcgaagactggtgaaaagaatatatgtgccactacctgatccaaacgtacggaggctacttctgaaaaatcagctcaaaggacaagcattcaaattgtcgaccaacctggaactgatccctggcagaccatgatttcgaaagattagttgtggagaccgaagggtattctggaagtgacctgagagccgtgtgcgaagaagctgcaatgatgccaataagagagctcgggccacagagtattcttgctattaaagcaaatcagttgcgacctttgaagtacgaggatttcaagaacgcgatggcggtgatcaggccaagcttgcagaagagcaaatgggacgagcttgagaaatggaacgaggaatttggttcgagctgacggcggctcgcactgcctgtgcctgatgatgatcaagcggtcctatttccatctgtatatatgatttatgtctcccacgctgtggctcacaacacaaggggtcacaccatgcgcccattgatgcgtcctcgttgggctaggcagcacaacatcgacagaagcagaatgtaaaggtatacttctggcaacggcctatacagccattgagggctagtttgaaacaccgttcaagggattttcatttttcaaagggaaattagctcattttcccttgtaaaaatgaaatttttttaggaaaatggtgttcccaaactagccctaagtattgctgttgcccaagttaaacaaaaaaacgtgtctattattgggctctgtttgtttaccctctaaattatattatccagcttaaataagttaagagat

SEQ ID NO: 57790 - DNA, 1454 bp, Zea Mays
acaacccgatcgcccacgcaaacctctcgacagaccacagctcgatcaaaccgcgaatgaaaaaaccacaaaaaatctcccaattctcgcaaccccaagccggccagcccccacgatctcgaatcccgatgctctcagcatctatcaactcccgagcggtcgtcaccagcgcatgagctttctccgctcgctggcgaactccttctcctcgctgctcttctcgtcggggggcgagacggcgcccatggacgcggcggggtcggcgccgtcgccggcggcggtggtgagggagcgcgtggcggtgaagctccggggctacttcgacctcgccaaggaggagatggacaaggccgtgcgcgccgaggagtgggggctccccgacgacgccaccgcgcactaccgcaacgcgatgcgcgtcatgctcgaggcccaggccgcgcgcgtccctgatgccgtctcctccagaggcttgcagcgagagggggcaggtcagggtgtaccaggagaagatcgccaagtggcaggcgcaggtcgaggagcggctcagagtgcttggtcagagaagtgctgaaggtgccactgctgcagtagtgcctaagaaggttgtcatggtgcaatggtctacttgttaggctatgttgaggagctactaataaacctcaagagttggatgatgctgttcttcgaagactggtgaaaagaatatatgtgccactacctgatccaaactctttttatgtttggcacggtagccaacctggaactgatccctggcagaccatgatttcgaaagattagttgtggagaccgaagggtattctggaagtgacctgagagccgtgtgcgaagaagctgcaatgatgccaataagagagctcgggccacagagtattcttgctattaaagcaaatcagttgcgacctttgaagtacgaggatttcaagaacgcgatggcggtgatcaggccaagcttgcagaagagcaaatgggacgagcttgagaaatggaacgaggaatttggttcgagctgacggcggctcgcactgcctgtgcctgatgatgatcaagcggtcctatttccatctgtatatatgatttatgtctcccacgctgtggctcacaacacaaggggtcacaccatgcgcccattgatgcgtcctcgttgggctaggcagcacaacatcgacagaagcagaatgtaaaggtatacttctggcaacggcctatacagccattgagggctagtttgaaacaccgttcaagggattttcatttttcaaagggaaattagctcattttcccttgtaaaaatgaaatttttttaggaaaatggtgttcccaaactagccctaagtattgctgttgcccaagttaaacaaaaaaacgtgtctattattgggctctgtttgtttaccctctaaattatattatccagcttaaataagttaagagat

SEQ ID NO: 57791 - DNA, 2054 bp, Zea Mays
acaacccgatcgcccacgcaaacctctcgacagaccacagctcgatcaaaccgcgaatgaaaaaaccacaaaaaatctcccaattctcgcaaccccaagccggccagcccccacgatctcgaatcccgatgctctcagcatctatcaactcccgagcggtcgtcaccagcgcatgagctttctccgctcgctggcgaactccttctcctcgctgctcttctcgtcggggggcgagacggcgcccatggacgcggcggggtcggcgccgtcgccggcggcggtggtgagggagcgcgtggcggtgaagctccggggctacttcgacctcgccaaggaggagatggacaaggccgtgcgcgccgaggagtgggggctccccgacgacgccaccgcgcactaccgcaacgcgatgcgcgtcatgctcgaggcccaggccgcgcgcgtccctgatgccgtctcctccaggtgcgcccgcgttctcttcctcgcgcccgtcgcggctagggcttctggaatgattcgtgactgactagtgggtggtgccctgcggagcttgagaggcttgcagcgagagggggcaggtcagggtgtaccaggagaagatcgccaagtggcaggcgcaggtcgaggagcggctcagagtgcttggtcagagaagtgctgaaggtgccactgctgcagtagtgcctaagaaggttgtcatggtgcaatggtctacttgttaggctatgttgaggtgggggtgaggcgtcctcttgtgctcctggggtacaagttttttcagttttcaaatagttacaagtattttggatttgattcagttctgctattttggatttgatatccagtatttggcagctacttcaatttcaatgtaatgattcttaagttcaactcctattatttggcttcaattacttaagtaaccttgggtaggatatgtaggaattttgcttcgtttttttgcttcttggggtgtcagttctgtggtctgtcatttttgaaacagttttgagccttattgggcaggagttgtcatcactaaattagtctaattaatatgccactttaccttctcagattttggcggccacattttctcatgtttacttttttagtaaagaaaaaggagcatggaaactaatgattgttctttgcattaccacaatatgacctttatttttgtcatctttttatagggtctgattttaaaagagaactctcggttagctgtgtacactgtgagctactaataaacctcaagagttggatgatgctgttcttcgaagactggtgaaaagaatatatgtgccactacctgatccaaactctttttatgtttggcacggtagccaacctggaactgatccctggcagaccatgatttcgaaagattagttgtggagaccgaagggtattctggaagtgacctgagagccgtgtgcgaagaagctgcaatgatgccaataagagagctcgggccacagagtattcttgctattaaagcaaatcagttgcgacctttgaagtacgaggatttcaagaacgcgatggcggtgatcaggccaagcttgcagaagagcaaatgggacgagcttgagaaatggaacgaggaatttggttcgagctgacggcggctcgcactgcctgtgcctgatgatgatcaagcggtcctatttccatctgtatatatgatttatgtctcccacgctgtggctcacaacacaaggggtcacaccatgcgcccattgatgcgtcctcgttgggctaggcagcacaacatcgacagaagcagaatgtaaaggtatacttctggcaacggcctatacagccattgagggctagtttgaaacaccgttcaagggattttcatttttcaaagggaaattagctcattttcccttgtaaaaatgaaatttttttaggaaaatggtgttcccaaactagccctaagtattgctgttgcccaagttaaacaaaaaaacgtgtctattattgggctctgtttgtttaccctctaaattatattatccagcttaaataagttaagagat

SEQ ID NO: 57792 - DNA, 2305 bp, Zea Mays
acaacccgatcgcccacgcaaacctctcgacagaccacagctcgatcaaaccgcgaatgaaaaaaccacaaaaaatctcccaattctcgcaaccccaagccggccagcccccacgatctcgaatcccgatgctctcagcatctatcaactcccgagcggtcgtcaccagcgcatgagctttctccgctcgctggcgaactccttctcctcgctgctcttctcgtcggggggcgagacggcgcccatggacgcggcggggtcggcgccgtcgccggcggcggtggtgagggagcgcgtggcggtgaagctccggggctacttcgacctcgccaaggaggagatggacaaggccgtgcgcgccgaggagtgggggctccccgacgacgccaccgcgcactaccgcaacgcgatgcgcgtcatgctcgaggcccaggccgcgcgcgtccctgatgccgtctcctccaggtgcgcccgcgttctcttcctcgcgcccgtcgcggctagggcttctggaatgattcgtgactgactagtgggtggtgccctgcggagcttgagaggcttgcagcgagagggggcaggtcagggtgtaccaggagaagatcgccaagtggcaggcgcaggtcgaggagcggctcagagtgcttggtcagagaagtgctgaaggtgccactgctgcagtagtgcctaagaaggtaatagtttgtggacttctagctgcatgtgggtgtgttatctggaattccgtgttatcttgtatcggacttttgtttcatagcttaaatatttgttaccttctgaattttgatgccttcatctaggttctttcactgtttggcatgtacgcttatataatgtaatgtgacgtacctagattgttttgagtgcaattaaaacaggtctgtactatatgatttttttctcattgcctaactaaccctatattcggtgataggttgtcatggtgcaatggtctacttgttaggctatgttgaggtgggggtgaggcgtcctcttgtgctcctggggtacaagttttttcagttttcaaatagttacaagtattttggatttgattcagttctgctattttggatttgatatccagtatttggcagctacttcaatttcaatgtaatgattcttaagttcaactcctattatttggcttcaattacttaagtaaccttgggtaggatatgtaggaattttgcttcgtttttttgcttcttggggtgtcagttctgtggtctgtcatttttgaaacagttttgagccttattgggcaggagttgtcatcactaaattagtctaattaatatgccactttaccttctcagattttggcggccacattttctcatgtttacttttttagtaaagaaaaaggagcatggaaactaatgattgttctttgcattaccacaatatgacctttatttttgtcatctttttatagggtctgattttaaaagagaactctcggttagctgtgtacactgtgagctactaataaacctcaagagttggatgatgctgttcttcgaagactggtgaaaagaatatatgtgccactacctgatccaaacgtacggaggctacttctgaaaaatcagctcaaaggacaagcattcaaattgtcgaattagttgtggagaccgaagggtattctggaagtgacctgagagccgtgtgcgaagaagctgcaatgatgccaataagagagctcgggccacagagtattcttgctattaaagcaaatcagttgcgacctttgaagtacgaggatttcaagaacgcgatggcggtgatcaggccaagcttgcagaagagcaaatgggacgagcttgagaaatggaacgaggaatttggttcgagctgacggcggctcgcactgcctgtgcctgatgatgatcaagcggtcctatttccatctgtatatatgatttatgtctcccacgctgtggctcacaacacaaggggtcacaccatgcgcccattgatgcgtcctcgttgggctaggcagcacaacatcgacagaagcagaatgtaaaggtatacttctggcaacggcctatacagccattgagggctagtttgaaacaccgttcaagggattttcatttttcaaagggaaattagctcattttcccttgtaaaaatgaaatttttttaggaaaatggtgttcccaaactagccctaagtattgctgttgcccaagttaaacaaaaaaacgtgtctattattgggctctgtttgtttaccctctaaattatattatccagcttaaataagttaagagat

SEQ ID NO: 57793 - DNA, 1493 bp, Zea Mays
acaacccgatcgcccacgcaaacctctcgacagaccacagctcgatcaaaccgcgaatgaaaaaaccacaaaaaatctcccaattctcgcaaccccaagccggccagcccccacgatctcgaatcccgatgctctcagcatctatcaactcccgagcggtcgtcaccagcgcatgagctttctccgctcgctggcgaactccttctcctcgctgctcttctcgtcggggggcgagacggcgcccatggacgcggcggggtcggcgccgtcgccggcggcggtggtgagggagcgcgtggcggtgaagctccggggctacttcgacctcgccaaggaggagatggacaaggccgtgcgcgccgaggagtgggggctccccgacgacgccaccgcgcactaccgcaacgcgatgcgcgtcatgctcgaggcccaggccgcgcgcgtccctgatgccgtctcctccagaggcttgcagcgagagggggcaggtcagggtgtaccaggagaagatcgccaagtggcaggcgcaggtcgaggagcggctcagagtgcttggtcagagaagtgctgaaggtgccactgctgcagtagtgcctaagaaggttgtcatggtgcaatggtctacttgttaggctatgttgaggtgggggtgaggcgtcctcttgtgctcctggggagctactaataaacctcaagagttggatgatgctgttcttcgaagactggtgaaaagaatatatgtgccactacctgatccaaacgtacggaggctacttctgaaaaatcagctcaaaggacaagcattcaaattgtcgaaccatgatttcgaaagattagttgtggagaccgaagggtattctggaagtgacctgagagccgtgtgcgaagaagctgcaatgatgccaataagagagctcgggccacagagtattcttgctattaaagcaaatcagttgcgacctttgaagtacgaggatttcaagaacgcgatggcggtgatcaggccaagcttgcagaagagcaaatgggacgagcttgagaaatggaacgaggaatttggttcgagctgacggcggctcgcactgcctgtgcctgatgatgatcaagcggtcctatttccatctgtatatatgatttatgtctcccacgctgtggctcacaacacaaggggtcacaccatgcgcccattgatgcgtcctcgttgggctaggcagcacaacatcgacagaagcagaatgtaaaggtatacttctggcaacggcctatacagccattgagggctagtttgaaacaccgttcaagggattttcatttttcaaagggaaattagctcattttcccttgtaaaaatgaaatttttttaggaaaatggtgttcccaaactagccctaagtattgctgttgcccaagttaaacaaaaaaacgtgtctattattgggctctgtttgtttaccctctaaattatattatccagcttaaataagttaagagat

SEQ ID NO: 57794 - DNA, 1486 bp, Zea Mays
acaacccgatcgcccacgcaaacctctcgacagaccacagctcgatcaaaccgcgaatgaaaaaaccacaaaaaatctcccaattctcgcaaccccaagccggccagcccccacgatctcgaatcccgatgctctcagcatctatcaactcccgagcggtcgtcaccagcgcatgagctttctccgctcgctggcgaactccttctcctcgctgctcttctcgtcggggggcgagacggcgcccatggacgcggcggggtcggcgccgtcgccggcggcggtggtgagggagcgcgtggcggtgaagctccggggctacttcgacctcgccaaggaggagatggacaaggccgtgcgcgccgaggagtgggggctccccgacgacgccaccgcgcactaccgcaacgcgatgcgcgtcatgctcgaggcccaggccgcgcgcgtccctgatgccgtctcctccagaggcttgcagcgagagggggcaggtcagggtgtaccaggagaagatcgccaagtggcaggcgcaggtcgaggagcggctcagagtgcttggtcagagaagtgctgaaggtgccactgctgcagtagtgcctaagaaggttgtcatggtgcaatggtctacttgttaggctatgttgaggtgggggtgaggcgtcctcttgtgctcctggggagctactaataaacctcaagagttggatgatgctgttcttcgaagactggtgaaaagaatatatgtgccactacctgatccaaactctttttatgtttggcacggtagccaacctggaactgatccctggcagaccatgatttcgaaagattagttgtggagaccgaagggtattctggaagtgacctgagagccgtgtgcgaagaagctgcaatgatgccaataagagagctcgggccacagagtattcttgctattaaagcaaatcagttgcgacctttgaagtacgaggatttcaagaacgcgatggcggtgatcaggccaagcttgcagaagagcaaatgggacgagcttgagaaatggaacgaggaatttggttcgagctgacggcggctcgcactgcctgtgcctgatgatgatcaagcggtcctatttccatctgtatatatgatttatgtctcccacgctgtggctcacaacacaaggggtcacaccatgcgcccattgatgcgtcctcgttgggctaggcagcacaacatcgacagaagcagaatgtaaaggtatacttctggcaacggcctatacagccattgagggctagtttgaaacaccgttcaagggattttcatttttcaaagggaaattagctcattttcccttgtaaaaatgaaatttttttaggaaaatggtgttcccaaactagccctaagtattgctgttgcccaagttaaacaaaaaaacgtgtctattattgggctctgtttgtttaccctctaaattatattatccagcttaaataagttaagagat

SEQ ID NO: 57795 - DNA, 1550 bp, Zea Mays
acaacccgatcgcccacgcaaacctctcgacagaccacagctcgatcaaaccgcgaatgaaaaaaccacaaaaaatctcccaattctcgcaaccccaagccggccagcccccacgatctcgaatcccgatgctctcagcatctatcaactcccgagcggtcgtcaccagcgcatgagctttctccgctcgctggcgaactccttctcctcgctgctcttctcgtcggggggcgagacggcgcccatggacgcggcggggtcggcgccgtcgccggcggcggtggtgagggagcgcgtggcggtgaagctccggggctacttcgacctcgccaaggaggagatggacaaggccgtgcgcgccgaggagtgggggctccccgacgacgccaccgcgcactaccgcaacgcgatgcgcgtcatgctcgaggcccaggccgcgcgcgtccctgatgccgtctcctccaggtgcgcccgcgttctcttcctcgcgcccgtcgcggctagggcttctggaatgattcgtgactgactagtgggtggtgccctgcggagcttgagaggcttgcagcgagagggggcaggtcagggtgtaccaggagaagatcgccaagtggcaggcgcaggtcgaggagcggctcagagtgcttggtcagagaagtgctgaaggtgccactgctgcagtagtgcctaagaagggtctgattttaaaagagaactctcggttagctgtgtacactgtgagctactaataaacctcaagagttggatgatgctgttcttcgaagactggtgaaaagaatatatgtgccactacctgatccaaactctttttatgtttggcacggtagccaacctggaactgatccctggcagaccatgatttcgaaagattagttgtggagaccgaagggtattctggaagtgacctgagagccgtgtgcgaagaagctgcaatgatgccaataagagagctcgggccacagagtattcttgctattaaagcaaatcagttgcgacctttgaagtacgaggatttcaagaacgcgatggcggtgatcaggccaagcttgcagaagagcaaatgggacgagcttgagaaatggaacgaggaatttggttcgagctgacggcggctcgcactgcctgtgcctgatgatgatcaagcggtcctatttccatctgtatatatgatttatgtctcccacgctgtggctcacaacacaaggggtcacaccatgcgcccattgatgcgtcctcgttgggctaggcagcacaacatcgacagaagcagaatgtaaaggtatacttctggcaacggcctatacagccattgagggctagtttgaaacaccgttcaagggattttcatttttcaaagggaaattagctcattttcccttgtaaaaatgaaatttttttaggaaaatggtgttcccaaactagccctaagtattgctgttgcccaagttaaacaaaaaaacgtgtctattattgggctctgtttgtttaccctctaaattatattatccagcttaaataagttaagagat

SEQ ID NO: 57796 - DNA, 1854 bp, Zea Mays
acaacccgatcgcccacgcaaacctctcgacagaccacagctcgatcaaaccgcgaatgaaaaaaccacaaaaaatctcccaattctcgcaaccccaagccggccagcccccacgatctcgaatcccgatgctctcagcatctatcaactcccgagcggtcgtcaccagcgcatgagctttctccgctcgctggcgaactccttctcctcgctgctcttctcgtcggggggcgagacggcgcccatggacgcggcggggtcggcgccgtcgccggcggcggtggtgagggagcgcgtggcggtgaagctccggggctacttcgacctcgccaaggaggagatggacaaggccgtgcgcgccgaggagtgggggctccccgacgacgccaccgcgcactaccgcaacgcgatgcgcgtcatgctcgaggcccaggccgcgcgcgtccctgatgccgtctcctccaggtgcgcccgcgttctcttcctcgcgcccgtcgcggctagggcttctggaatgattcgtgactgactagtgggtggtgccctgcggagcttgagaggcttgcagcgagagggggcaggtcagggtgtaccaggagaagatcgccaagtggcaggcgcaggtcgaggagcggctcagagtgcttggtcagagaagtgctgaaggtgccactgctgcagtagtgcctaagaaggttgtcatggtgcaatggtctacttgttaggctatgttgaggtgggggtgaggcgtcctcttgtgctcctgggggtctgattttaaaagagaactctcggttagctgtgtacactgtgtatggattctttttgacatgacattatttatatacaggattacaagtgttttttatgctgaattatcttttcttgttttatctatgttttgttgatgtcaattctctgtccaggagctactaataaacctcaagagttggatgatgctgttcttcgaagactggtgaaaagaatatatgtgccactacctgatccaaacgtacggaggctacttctgaaaaatcagctcaaaggacaagcattcaaattgtcgagtaagtgctccagggtttctctgtataactacttgattgtggtggttgtatatgtagcacagtctttttatgtttggcacggtagccaacctggaactgatccctggcagaccatgatttcgaaagattagttgtggagaccgaagggtattctggaagtgacctgagagccgtgtgcgaagaagctgcaatgatgccaataagagagctcgggccacagagtattcttgctattaaagcaaatcagttgcgacctttgaagtacgaggatttcaagaacgcgatggcggtgatcaggccaagcttgcagaagagcaaatgggacgagcttgagaaatggaacgaggaatttggttcgagctgacggcggctcgcactgcctgtgcctgatgatgatcaagcggtcctatttccatctgtatatatgatttatgtctcccacgctgtggctcacaacacaaggggtcacaccatgcgcccattgatgcgtcctcgttgggctaggcagcacaacatcgacagaagcagaatgtaaaggtatacttctggcaacggcctatacagccattgagggctagtttgaaacaccgttcaagggattttcatttttcaaagggaaattagctcattttcccttgtaaaaatgaaatttttttaggaaaatggtgttcccaaactagccctaagtattgctgttgcccaagttaaacaaaaaaacgtgtctattattgggctctgtttgtttaccctctaaattatattatccagcttaaataagttaagagat

SEQ ID NO: 57797 - DNA, 1413 bp, Zea Mays
acaacccgatcgcccacgcaaacctctcgacagaccacagctcgatcaaaccgcgaatgaaaaaaccacaaaaaatctcccaattctcgcaaccccaagccggccagcccccacgatctcgaatcccgatgctctcagcatctatcaactcccgagcggtcgtcaccagcgcatgagctttctccgctcgctggcgaactccttctcctcgctgctcttctcgtcggggggcgagacggcgcccatggacgcggcggggtcggcgccgtcgccggcggcggtggtgagggagcgcgtggcggtgaagctccggggctacttcgacctcgccaaggaggagatggacaaggccgtgcgcgccgaggagtgggggctccccgacgacgccaccgcgcactaccgcaacgcgatgcgcgtcatgctcgaggcccaggccgcgcgcgtccctgatgccgtctcctccagaggcttgcagcgagagggggcaggtcagggtgtaccaggagaagatcgccaagtggcaggcgcaggtcgaggagcggctcagagtgcttggtcagagaagtgctgaaggtgccactgctgcagtagtgcctaagaaggagctactaataaacctcaagagttggatgatgctgttcttcgaagactggtgaaaagaatatatgtgccactacctgatccaaactctttttatgtttggcacggtagccaacctggaactgatccctggcagaccatgatttcgaaagattagttgtggagaccgaagggtattctggaagtgacctgagagccgtgtgcgaagaagctgcaatgatgccaataagagagctcgggccacagagtattcttgctattaaagcaaatcagttgcgacctttgaagtacgaggatttcaagaacgcgatggcggtgatcaggccaagcttgcagaagagcaaatgggacgagcttgagaaatggaacgaggaatttggttcgagctgacggcggctcgcactgcctgtgcctgatgatgatcaagcggtcctatttccatctgtatatatgatttatgtctcccacgctgtggctcacaacacaaggggtcacaccatgcgcccattgatgcgtcctcgttgggctaggcagcacaacatcgacagaagcagaatgtaaaggtatacttctggcaacggcctatacagccattgagggctagtttgaaacaccgttcaagggattttcatttttcaaagggaaattagctcattttcccttgtaaaaatgaaatttttttaggaaaatggtgttcccaaactagccctaagtattgctgttgcccaagttaaacaaaaaaacgtgtctattattgggctctgtttgtttaccctctaaattatattatccagcttaaataagttaagagat

SEQ ID NO: 57798 - DNA, 1538 bp, Zea Mays
acaacccgatcgcccacgcaaacctctcgacagaccacagctcgatcaaaccgcgaatgaaaaaaccacaaaaaatctcccaattctcgcaaccccaagccggccagcccccacgatctcgaatcccgatgctctcagcatctatcaactcccgagcggtcgtcaccagcgcatgagctttctccgctcgctggcgaactccttctcctcgctgctcttctcgtcggggggcgagacggcgcccatggacgcggcggggtcggcgccgtcgccggcggcggtggtgagggagcgcgtggcggtgaagctccggggctacttcgacctcgccaaggaggagatggacaaggccgtgcgcgccgaggagtgggggctccccgacgacgccaccgcgcactaccgcaacgcgatgcgcgtcatgctcgaggcccaggccgcgcgcgtccctgatgccgtctcctccaggtgcgcccgcgttctcttcctcgcgcccgtcgcggctagggcttctggaatgattcgtgactgactagtgggtggtgccctgcggagcttgagaggcttgcagcgagagggggcaggtcagggtgtaccaggagaagatcgccaagtggcaggcgcaggtcgaggagcggctcagagtgcttggtcagagaagtgctgaaggtgccactgctgcagtagtgcctaagaaggagctactaataaacctcaagagttggatgatgctgttcttcgaagactggtgaaaagaatatatgtgccactacctgatccaaacgtacggaggctacttctgaaaaatcagctcaaaggacaagcattcaaattgtcgaccaacctggaactgatccctggcagaccatgatttcgaaagattagttgtggagaccgaagggtattctggaagtgacctgagagccgtgtgcgaagaagctgcaatgatgccaataagagagctcgggccacagagtattcttgctattaaagcaaatcagttgcgacctttgaagtacgaggatttcaagaacgcgatggcggtgatcaggccaagcttgcagaagagcaaatgggacgagcttgagaaatggaacgaggaatttggttcgagctgacggcggctcgcactgcctgtgcctgatgatgatcaagcggtcctatttccatctgtatatatgatttatgtctcccacgctgtggctcacaacacaaggggtcacaccatgcgcccattgatgcgtcctcgttgggctaggcagcacaacatcgacagaagcagaatgtaaaggtatacttctggcaacggcctatacagccattgagggctagtttgaaacaccgttcaagggattttcatttttcaaagggaaattagctcattttcccttgtaaaaatgaaatttttttaggaaaatggtgttcccaaactagccctaagtattgctgttgcccaagttaaacaaaaaaacgtgtctattattgggctctgtttgtttaccctctaaattatattatccagcttaaataagttaagagat

SEQ ID NO: 57799 - DNA, 1445 bp, Zea Mays
acaacccgatcgcccacgcaaacctctcgacagaccacagctcgatcaaaccgcgaatgaaaaaaccacaaaaaatctcccaattctcgcaaccccaagccggccagcccccacgatctcgaatcccgatgctctcagcatctatcaactcccgagcggtcgtcaccagcgcatgagctttctccgctcgctggcgaactccttctcctcgctgctcttctcgtcggggggcgagacggcgcccatggacgcggcggggtcggcgccgtcgccggcggcggtggtgagggagcgcgtggcggtgaagctccggggctacttcgacctcgccaaggaggagatggacaaggccgtgcgcgccgaggagtgggggctccccgacgacgccaccgcgcactaccgcaacgcgatgcgcgtcatgctcgaggcccaggccgcgcgcgtccctgatgccgtctcctccagaggcttgcagcgagagggggcaggtcagggtgtaccaggagaagatcgccaagtggcaggcgcaggtcgaggagcggctcagagtgcttggtcagagaagtgctgaaggtgccactgctgcagtagtgcctaagaaggttgtcatggtgcaatggtctacttgttaggctatgttgaggagctactaataaacctcaagagttggatgatgctgttcttcgaagactggtgaaaagaatatatgtgccactacctgatccaaacgtacggaggctacttctgaaaaatcagctcaaaggacaagcattcaaattgtcgaattagttgtggagaccgaagggtattctggaagtgacctgagagccgtgtgcgaagaagctgcaatgatgccaataagagagctcgggccacagagtattcttgctattaaagcaaatcagttgcgacctttgaagtacgaggatttcaagaacgcgatggcggtgatcaggccaagcttgcagaagagcaaatgggacgagcttgagaaatggaacgaggaatttggttcgagctgacggcggctcgcactgcctgtgcctgatgatgatcaagcggtcctatttccatctgtatatatgatttatgtctcccacgctgtggctcacaacacaaggggtcacaccatgcgcccattgatgcgtcctcgttgggctaggcagcacaacatcgacagaagcagaatgtaaaggtatacttctggcaacggcctatacagccattgagggctagtttgaaacaccgttcaagggattttcatttttcaaagggaaattagctcattttcccttgtaaaaatgaaatttttttaggaaaatggtgttcccaaactagccctaagtattgctgttgcccaagttaaacaaaaaaacgtgtctattattgggctctgtttgtttaccctctaaattatattatccagcttaaataagttaagagat

SEQ ID NO: 57800 - DNA, 1457 bp, Zea Mays
acaacccgatcgcccacgcaaacctctcgacagaccacagctcgatcaaaccgcgaatgaaaaaaccacaaaaaatctcccaattctcgcaaccccaagccggccagcccccacgatctcgaatcccgatgctctcagcatctatcaactcccgagcggtcgtcaccagcgcatgagctttctccgctcgctggcgaactccttctcctcgctgctcttctcgtcggggggcgagacggcgcccatggacgcggcggggtcggcgccgtcgccggcggcggtggtgagggagcgcgtggcggtgaagctccggggctacttcgacctcgccaaggaggagatggacaaggccgtgcgcgccgaggagtgggggctccccgacgacgccaccgcgcactaccgcaacgcgatgcgcgtcatgctcgaggcccaggccgcgcgcgtccctgatgccgtctcctccagaggcttgcagcgagagggggcaggtcagggtgtaccaggagaagatcgccaagtggcaggcgcaggtcgaggagcggctcagagtgcttggtcagagaagtgctgaaggtgccactgctgcagtagtgcctaagaaggttgtcatggtgcaatggtctacttgttaggctatgttgaggtgggggtgaggcgtcctcttgtgctcctggggagctactaataaacctcaagagttggatgatgctgttcttcgaagactggtgaaaagaatatatgtgccactacctgatccaaacgtacggaggctacttctgaaaaatcagctcaaaggacaagcattcaaattgtcgaggtattctggaagtgacctgagagccgtgtgcgaagaagctgcaatgatgccaataagagagctcgggccacagagtattcttgctattaaagcaaatcagttgcgacctttgaagtacgaggatttcaagaacgcgatggcggtgatcaggccaagcttgcagaagagcaaatgggacgagcttgagaaatggaacgaggaatttggttcgagctgacggcggctcgcactgcctgtgcctgatgatgatcaagcggtcctatttccatctgtatatatgatttatgtctcccacgctgtggctcacaacacaaggggtcacaccatgcgcccattgatgcgtcctcgttgggctaggcagcacaacatcgacagaagcagaatgtaaaggtatacttctggcaacggcctatacagccattgagggctagtttgaaacaccgttcaagggattttcatttttcaaagggaaattagctcattttcccttgtaaaaatgaaatttttttaggaaaatggtgttcccaaactagccctaagtattgctgttgcccaagttaaacaaaaaaacgtgtctattattgggctctgtttgtttaccctctaaattatattatccagcttaaataagttaagagat

SEQ ID NO: 57801 - DNA, 4973 bp, Zea Mays
acaacccgatcgcccacgcaaacctctcgacagaccacagctcgatcaaaccgcgaatgaaaaaaccacaaaaaatctcccaattctcgcaaccccaagccggccagcccccacgatctcgaatcccgatgctctcagcatctatcaactcccgagcggtcgtcaccagcgcatgagctttctccgctcgctggcgaactccttctcctcgctgctcttctcgtcggggggcgagacggcgcccatggacgcggcggggtcggcgccgtcgccggcggcggtggtgagggagcgcgtggcggtgaagctccggggctacttcgacctcgccaaggaggagatggacaaggccgtgcgcgccgaggagtgggggctccccgacgacgccaccgcgcactaccgcaacgcgatgcgcgtcatgctcgaggcccaggccgcgcgcgtccctgatgccgtctcctccagaggcttgcagcgagagggggcaggtcagggtgtaccaggagaagatcgccaagtggcaggcgcaggtcgaggagcggctcagagtgcttggtcagagaagtgctgaaggtgccactgctgcagtagtgcctaagaaggagctactaataaacctcaagagttggatgatgctgttcttcgaagactggtgaaaagaatatatgtgccactacctgatccaaacgtacggaggctacttctgaaaaatcagctcaaaggacaagcattcaaattgtcgagtaagtgctccagggtttctctgtataactacttgattgtggtggttgtatatgtagcacagtctttttatgtttggcacggtagccaacctggaactgatccctggcagaccatgatttcgaaagattagttgtggagaccgaagggtattctggaagtgacctgagagccgtgtgcgaagaagctgcaatgatgccaataagagagctcgggccacagagtattcttgctattaaagcaaatcagttgcgacctttgaagtacgaggatttcaagaacgcgatggcggtgatcaggccaagcttgcagaagagcaaatgggacgagcttgagaaatggaacgaggaatttggttcgagctgacggcggctcgcactgcctgtgcctgatgatgatcaagcggtcctatttccatctgtatatatgatttatgtctcccacgctgtggctcacaacacaaggggtcacaccatgcgcccattgatgcgtcctcgttgggctaggcagcacaacatcgacagaagcagaatgtaaagttccgcaatggatgttggaatggttaagcgacttttacgttatcctaaaggttctgatccatatgtggctggtgtagagaggtttattgaatttgcatataaagataagcccgaaggcaacaagatttattgcccatgtcagtcatgcgtgcacactactgttcagtcaaaagatgagatgtatggtcatttggtgtgcaatgggattcttgacaattatgatcaatgggattttcatggcgatccttcagtgcatattagtggtctagataaaaaaacacaaagcgatgaaaggcatgttaacattgggcaaatgattgaagatgccattgggcatatatatgatgacgcacctatggtagatggagatgcaccagtgatcggacccaattcagaagttgaacagttttacaaacgggtcgaagaatcaaaaaagcctttatgggaaggttgtgaactcacagaggtaaccttatttgtgttgttgtttaatgtgaaatcctcaaacaaatggtcagataaatcttttggtgatcttcttgaggttctgcatatggctattcctaatggaaaggacttgccaaagaatttttatgaggctaagaaagtaatttctaaatttggactgggatatgaaactattgatgcatgtcgaaataattgccaattgtaccggaaggacaaaaaatgatgatttttgcacaacctgtaaggcttcaaggtggaaggataaggaacccaattgcatactaacaaagaaggaaaggaagaaagaaactccttgcaaagtactacgatacttccctattaaagataggctcaaaagaatgtttatgtgtagagaaacaacacctctcctaagatggcatgacgaggagcgcatcaaggatggtttgctacgacatccagctgatgctccagtgtggaagaggtttgacgaaaagtttccacaatttgcatcagattctcgtaatattcgttttgcattggctactgatgggtttaatccatttgggaagatgagctctatgcatagttgttggcctgttgttttggtagtctataacctcccgccatggctttgcatgaaagatcacaatattatgttgtccttgatgattcctggtcctaaaagcccaggatatcgaattcatgtgttctttgagccacttttggaggaccttaaggatcttttccaaactggtatatccacatatgatgcatcgagaaatgagagttttactttgcaaggagccgtgcttatgaacataagtgatctacctggtttaggaatgcttgcttctcatatggttcatgggaaatttgcatgcccaccatgtggtgaaaatgtatggacgaaacaactgaagaatggtcgtaaatcatgtttcctaggtcatcgcaaatatattgatcttgatcatccgtaccgtttcgacgcaagttcctttgatggaatgatagagcttggcaaggagccttcaacttattatggtcgtccaattttgcatgagatcactgcacttggtaatttcaaggactcaaaaacttataagtcagtaagtagtttgttctctttgccttactgggatgataatattcttagatacaaccttgatgtgatgcatatagagaaaaatgtgttcgataatttgtatgacacaatatcgggtttagaagggaagacaaaagataacctccaagctcgtttagatcttgtagacatgaacatcagagcggacctacaccctcaagtaaaagattcgggaaagttatacctgccaccagcaagatttggtatgtctaaaagtgagagacgagtattttgtgatgttattagaaacataaatgttccagatggttattgcagaaatatctcaaaacgtgttaacgttgcgaaaggaaaaatcattggcctcaaaacacatgactgtcatgttctaatgcaacagttcatgcccattgctttgaggggaaatcttccagatgatataacagcggttgtatttgagttgtctgcttattttcgaggaatatgttcgaaagttcttaatgttgaagagttggatcgtttagattagtccattaaaatcaccttatgcaaattggagacaaattttccaccaggttttttacagttatggttcatttagttgtacatctagcaactgaatgcaagatggctggaccagttaattatcgttggatgttttttattgagaggtacctagggaaattaaaatcatttgttcgcaacagagcctatccagaagcctcaatggcaaattcttttttggcagatgagtgtatggtgttttgttctagatacatagaaggtttctcgacaaagctaaataaatcatcaaggaatgatgatagtttggatcagattgactcaaacttacatggtcacaagtcgtcgttgtttcctccagtaggcaaaccattgggaaaaccatcaaatttaattttaactaacatagagaaattgcaagctcatagatatgtactattcaactgtgatgctgtgaatccgtatcttaagtaggtgaattcttgctcctttatacatgccatatggaattggatatattgtcatgaaaattatttttgcagggaacatgcttcttatttgaaaagaaagagacgtgatcgacgcccaactgttaaagaaattgaaaatttacaaaacagatatttttccaattggtttagagaacatatcatgcagaaggaggaaaatgatggtagtgacaacatcgacgaggatattagatggttggctcgaggaccactagagattgcacgaaggcatagagcctttaacattcgtgggttcagatttcgtgccaaacggtttgataaggcgactcaaaatagcggagttgttgttactgcaaagacatctagttattcatcggcaggtgatagcaaccccatacttggagatattatgtactatggtaggattattgatatcatagagttagactactacgggagattttcaatggtactatttaaatgtgaatgggttgatgtcactcgaggcaaaggagtaaaaacagataagtttggcttgccactagttaatttctcgcatcaaattcacaaaggtgataggattgagcatgaaccctttgtatttgccaatcaagttgaccaagtgttctatatagatgaccatactaacctaggatggttagttgtgttgaagatgaaacctagagatgtatttgacattggggaggattggaatgaagttcaatgtgaaccttttcatgtcagtatgcttggtgacctttttgataaagctcatgacagacattcatggactagaagagatatggagggaattactgtagaaggggcaaataaaggccataatccaagtagtgatgccggagatgagccataaaataaaaaggtgagtcatgtttgcttttgtcatcgtactagatttgctcggataatgtgaaatctgacaacccttatgtgtactgcagtatgttcacaatcacaatttgacaatggaggatgagagaaggctgtttgcaattagtacaaatagaacattgttcattgtgtcagttatgtgcttgtaactttgtgcttgggaaaatttctgaacggcatggtctgaactatggtctgaaattgggcttgttagtctgtaactatgtgtttgaacta

SEQ ID NO: 57802 - DNA, 2439 bp, Zea Mays
ctctttcctcacgcaacttatccactactcacgctactaccccttccctaggccacgtccaacagcctcccccaatccgtcctttggcttcgctggcgacgacggaggctggtgatggcaggaattggtgagcgctccaattcggggattggtggaggctggtgcgcgctaaggcaggaattggcggcggccggtgtgcgccagttcgaggaatcggctgcagctcacagaggacgcacggcgtgtgtttccttgccgtcgcagacatggcaaggggtatgagaaagtgcatcattcaaagccaagaagagtatttggtagaggagcctattggggaaacaagtcatcggccacgagatgcagcatatgaccaccatccttctactagagaacgccaaaaaagaaagcgacaatgataatgagttcaatgacctagatcatcataaaaaaatacaacatcttttgagactacttctgaagtgtacccttctcctgatgatgcggatatagaggattatgttgaaggaatggctgcttatgtagcttaagcttcaaagattggagattactgataggaaagaaggacaggaacaatgaacaaaaaaacaagcaagatgtactaaagcaagtaaagatgagattcttataccctgcccgcatggaaaagtggatacttcgaactattggtgagagatggagacaacacaagtccaatctaaaatccttacattttgatgcgcataggagcaaggaaaataatctaaaaaatgttccaaaaggcgtcttagatgatcaatgggtcactcttgtgaataattggtttacaacaaaatcacaggatatcagtgaggcaaataggataaactgcgcaaaaaggaaggcgacccatacatcaggaacaaagagttttgctcggaacagggaagatatgagggaacaagatccagaaaagaaatacccccatagggctgtattgtatatcaatacacacaagagtaacatcacaaagaacacaaacccacatgtggttgcattgaaggaactattagtgcaacaaccaagtttagctgacactagtcatggaaaggttgcatggaaaggaaatgcgcttagccaaattttaggagaagagaagcctggccatatccatggtcttggccttgttccgaatctagatcaagtgtttggtggatcaacttcaaggcatctaaaacatcttaatttaacctctttggatgcaacatcaagtgaagatgtagtatctcttcgacttcaagtggaaaaacttatagatcgtgtccagaagcaagatgatactatactaaatttgcaaaataccttggaactgcaaaaaagtcaccatgaatgtctagatgaacctttgtcggcatcaaaagatgttcagccgactacgaatcaaaaagttaatcttcttgatgaactgaatagcacaatggcggatgaaatcgaacatgatgggtacgaggagctacaggcccagtgcaaaaaatctaaaattcaagaaaagagcaagccaccaatgccacgaggaggactccaaggtggtagagtttcttcatcgttaaatgtaaaaaatagcagtaatgcagccaaggtgatgaaccaggacattgctcgaaattcctctaatcatgaaccatacaagaacaagggatctctagaaaattatttgccaagtactaaagacgatcaatctacatcagaacgaaaacgagtatatggtcaatttcaaagtgaggaattttggacacttgacgaaaatcacgaatcaagccactacgaggagacacattacaacctagtaggatttcaacaggactgaaggttggttctcatattttcttgaagagttggaggaatcaaaataagaaggttgcattaggtacaataattggttgtgatccaaagcaaaaagttggaggagatccattgggcaaagaattttggaaggtttgtctcggtcttgtacttgtgcgtgatgaaccactaatacggccctacaacaatttcgtggttctaggagacatagacaacaaccctatagcatggccttcaagctgtatagaaaaggcagctctttaatgtcaaccattgaacaacaacagatctacatgagggctatgactttgattcttctttaaattgtcgttattagtgatgagagtgatgagtctactgagtccggtttatgagtcaacctttgtttgtttcatactatcatagaaaaatgtcaattcacacattgtgtaatgaattaagttgttgatgatattttataatggtactactatttttaatatagtctgattccagattatttgccatgtgtgagccaataatagtttggaaattgataatgtgccatgcacatgatttgcatatttgttttgatccaaataaaaaataattataaatagt

SEQ ID NO: 57803 - DNA, 2507 bp, Zea Mays
ctctttcctcacgcaacttatccactactcacgctactaccccttccctaggccacgtccaacagcctcccccaatccgtcctttggcttcgctggcgacgacggaggctggtgatggcaggaattggtgagcgctccaattcggggattggtggaggctggtgcgcgctaaggcaggaattggcggcggccggtgtgcgccagttcgaggaatcggctgcagctcacagaggacgcacggcgtgtgtttccttgccgtcgcagacatggcaaggggtatgagaaagtgcatcattcaaagccaagaagagtatttggtagaggagcctattggggaaacaagtcatcggccacgagatgcagcatatgaccaccatccttctactagagaacgccaaaaaagaaagcgacaatgataatgagttcaatgacctaggtcaaactaatgaagcaataagtcgtggtccgaacaaacttaaacatgtttggaaccttcaaaaaggaaaacgaattgtagttaactgtaacgagctcgaccaacctattggagaggaggcaggagtcttaggaaaattccttgacatggttgctaggaatggctgcttatgtagcttaagcttcaaagattggagattactgataggaaagaaggacaggaacaatgaacaaaaaaacaagcaagatgtactaaagcaagtaaagatgagattcttataccctgcccgcatggaaaagtggatacttcgaactattggtgagagatggagacaacacaagtccaatctaaaatccttacattttgatgcgcataggagcaaggaaaataatctaaaaaatgttccaaaaggcgtcttagatgatcaatgggtcactcttgtgaataattggtttacaacaaaatcacaggatatcagtgaggcaaataggataaactgcgcaaaaaggaaggcgacccatacatcaggaacaaagagttttgctcggaacagggaagatatgagggaacaagatccagaaaagaaatacccccatagggctgtattgtatatcaatacacacaagagtaacatcacaaagaacacaaacccacatgtggttgcattgaaggaactattagtgcaacaaccaagtttagctgacactagtcatggaaaggttgcatggaaaggaaatgcgcttagccaaattttaggagaagagaagcctggccatatccatggtcttggccttgttccgaatctagatcaagtgtttggtggatcaacttcaaggcatctaaaacatcttaatttaacctctttggatgcaacatcaagtgaagatgtagtatctcttcgacttcaagtggaaaaacttatagatcgtgtccagaagcaagatgatactatactaaatttgcaaaataccttggaactgcaaaaaagtcaccatgaatgtctagatgaacctttgtcggcatcaaaagatgttcagccgactacgaatcaaaaagttaatcttcttgatgaactgaatagcacaatggcggatgaaatcgaacatgatgggtacgaggagctacaggcccagtgcaaaaaatctaaaattcaagaaaagagcaagccaccaatgccacgaggaggactccaaggtggtagagtttcttcatcgttaaatgtaaaaaatagcagtaatgcagccaaggtgatgaaccaggacattgctcgaaattcctctaatcatgaaccatacaagaacaagggatctctagaaaattatttgccaagtactaaagacgatcaatctacatcagaacgaaaacgagtatatggtcaatttcaaagtgaggaattttggacacttgacgaaaatcacgaatcaagccactacgaggagacacattacaacctagtaggatttcaacaggactgaaggttggttctcatattttcttgaagagttggaggaatcaaaataagaaggttgcattaggtacaataattggttgtgatccaaagcaaaaagttggaggagatccattgggcaaagaattttggaaggtttgtctcggtcttgtacttgtgcgtgatgaaccactaatacggccctacaacaatttcgtggttctaggagacatagacaacaaccctatagcatggccttcaagctgtatagaaaaggcagctctttaatgtcaaccattgaacaacaacagatctacatgagggctatgactttgattcttctttaaattgtcgttattagtgatgagagtgatgagtctactgagtccggtttatgagtcaacctttgtttgtttcatactatcatagaaaaatgtcaattcacacattgtgtaatgaattaagttgttgatgatattttataatggtactactatttttaatatagtctgattccagattatttgccatgtgtgagccaataatagtttggaaattgataatgtgccatgcacatgatttgcatatttgttttgatccaaataaaaaataattataaatagt

SEQ ID NO: 57804 - DNA, 2141 bp, Zea Mays
ctctttcctcacgcaacttatccactactcacgctactaccccttccctaggccacgtccaacagcctcccccaatccgtcctttggcttcgctggcgacgacggaggctggtgatggcaggaattggtgagcgctccaattcggggattggtggaggctggtgcgcgctaaggcaggaattggcggcggccggtgtgcgccagttcgaggaatcggctgcagctcacagaggacgcacggcgtgtgtttccttgccgtcgcagacatggcaaggggtatgagaaagtgcatcattcaaagccaagaagagtatttggtagaggagcctattggggaaacaagtcatcggccacgagatgcagcatatgaccaccatccttctactagagaacgccaaaaaagaaagcgacaatgataatgagttcaatgacctaggtcaaactaatgaagcaataagtcgtggtccgaacaaacttaaacatgtttggaaccttcaaaaaggaaaacgaattgtagttaactgtaacgagctcgaccaacctattggagaggaggcaggagtcttaggaaaattccttgacatggttgctaggaatggctgcttatgtagcttaagcttcaaagattggagattactgataggaaagaaggacaggaacaatgaacaaaaaaacaagcaagatgtactaaagcaagtaaagatgagattcttataccctgcccgcatggaaaagtggatacttcgaactattggtgagagatggagacaacacaagtccaatctaaaatccttacattttgatgcgcataggagcaaggaaaataatctaaaaaatgttccaaaaggcgtcttagatgatcaatgggtcactcttgtgaataattggtttacaacaaaatcacaggatatcagtgaggcaaataggataaactgcgcaaaaaggaaggcgacccatacatcaggaacaaagagttttgctcggaacagggaagatatggaatgtctagatgaacctttgtcggcatcaaaagatgttcagccgactacgaatcaaaaagttaatcttcttgatgaactgaatagcacaatggcggatgaaatcgaacatgatgggtacgaggagctacaggcccagtgcaaaaaatctaaaattcaagaaaagaacaagtcatcaaatgcccaagatgcaaaattactcaaagacaaaagagtttctattgcacaaaagagcaagccaccaatgccacgaggaggactccaaggtggtagagtttcttcatcgttaaatgtaaaaaatagcagtaatgcagccaaggtgatgaaccaggacattgctcgaaattcctctaatcatgaaccatacaagaacaagggatctctagaaaattatttgccaagtactaaagacgatcaatctacatcagaacgaaaacgagtatatggtcaatttcaaagtgaggaattttggacacttgacgaaaatcacgaatcaagccactacgaggagacacattacaacctagtaggatttcaacaggactgaaggttggttctcatattttcttgaagagttggaggaatcaaaataagaaggttgcattaggtacaataattggttgtgatccaaagcaaaaagttggaggagatccattgggcaaagaattttggaaggtttgtctcggtcttgtacttgtgcgtgatgaaccactaatacggccctacaacaatttcgtggttctaggagacatagacaacaaccctatagcatggccttcaagctgtatagaaaaggcagctctttaatgtcaaccattgaacaacaacagatctacatgagggctatgactttgattcttctttaaattgtcgttattagtgatgagagtgatgagtctactgagtccggtttatgagtcaacctttgtttgtttcatactatcatagaaaaatgtcaattcacacattgtgtaatgaattaagttgttgatgatattttataatggtactactatttttaatatagtctgattccagattatttgccatgtgtgagccaataatagtttggaaattgataatgtgccatgcacatgatttgcatatttgttttgatccaaataaaaaataattataaatagt

SEQ ID NO: 57805 - DNA, 2443 bp, Zea Mays
ctctttcctcacgcaacttatccactactcacgctactaccccttccctaggccacgtccaacagcctcccccaatccgtcctttggcttcgctggcgacgacggaggctggtgatggcaggaattggtgagcgctccaattcggggattggtggaggctggtgcgcgctaaggcaggaattggcggcggccggtgtgcgccagttcgaggaatcggctgcagctcacagaggacgcacggcgtgtgtttccttgccgtcgcagacatggcaaggggtatgagaaagtgcatcattcaaagccaagaagagtatttggtagaggagcctattggggaaacaagtcatcggccacgagatgcagcatatgaccaccatccttctactagagaacgccaaaaaagaaagcgacaatgataatgagttcaatgacctagatcatcataaaaaaatacaacatcttttgagactacttctgaagtgtacccttctcctgatgatgcggatatagaggattatgttgaaggaatggctgcttatgtagcttaagcttcaaagattggagattactgataggaaagaaggacaggaacaatgaacaaaaaaacaagcaagatgtactaaagcaagtaaagatgagattcttataccctgcccgcatggaaaagtggatacttcgaactattggtgagagatggagacaacacaagtccaatctaaaatccttacattttgatgcgcataggagcaaggaaaataatctaaaaaatgttccaaaaggcgtcttagatgatcaatgggtcactcttgtgaataattggtttacaacaaaatcacaggatatcagtgaggcaaataggataaactgcgcaaaaaggaaggcgacccatacatcaggaacaaagagttttgctcggaacagggaagatatgagggaacaagatccagaaaagaaatacccccatagggctgtattgtatatcaatacacacaagagtaacatcacaaagaacacaaacccacatgtggttgcattgaaggaactattagtgcaacaaccaagtttagctgacactagtcatggaaaggttgcatggaaaggaaatgcgcttagccaaattttaggagaagagaagcctggccatatccatggtcttggccttgttccgaatctagatcaagtgtttggtggatcaacttcaaggcatctaaaacatcttaatttaacctctttggatgcaacatcaagtgaagatgtagtatctcttcgacttcaagtggaaaaacttatagatcgtgtccagaagcaagatgatactatactaaatttgcaaaataccttggaactgcaaaaaagtcaccatgaatgtctagatgaacctttgtcggcatcaaaagatgttcagccgactacgaatcaaaaagttaatcttcttgatgaactgaatagcacaatggcggatgaaatcgaacatgatgggtacgaggagctacaggcccagtgcaaaaaatctaaaattcaagaaaagagcaagccaccaatgccacgaggaggactccaaggtggtagagtttcttcatcgttaaatgtaaaaaatagcagtaatgcagccaaggtgatgaaccaggacattgctcgaaattcctctaatcatgaaccatacaagaacaagggatctctagaaaattatttgccaagtactaaagacgatcaatctacatcagaacgaaaacgagtatatggtcaatttcaaagtgaggaattttggacacttgacgaaaatcacgagtcgatcaagccactacgaggagacacattacaacctagtaggatttcaacaggactgaaggttggttctcatattttcttgaagagttggaggaatcaaaataagaaggttgcattaggtacaataattggttgtgatccaaagcaaaaagttggaggagatccattgggcaaagaattttggaaggtttgtctcggtcttgtacttgtgcgtgatgaaccactaatacggccctacaacaatttcgtggttctaggagacatagacaacaaccctatagcatggccttcaagctgtatagaaaaggcagctctttaatgtcaaccattgaacaacaacagatctacatgagggctatgactttgattcttctttaaattgtcgttattagtgatgagagtgatgagtctactgagtccggtttatgagtcaacctttgtttgtttcatactatcatagaaaaatgtcaattcacacattgtgtaatgaattaagttgttgatgatattttataatggtactactatttttaatatagtctgattccagattatttgccatgtgtgagccaataatagtttggaaattgataatgtgccatgcacatgatttgcatatttgttttgatccaaataaaaaataattataaatagt

SEQ ID NO: 57806 - DNA, 2596 bp, Zea Mays
ctctttcctcacgcaacttatccactactcacgctactaccccttccctaggccacgtccaacagcctcccccaatccgtcctttggcttcgctggcgacgacggaggctggtgatggcaggaattggtgagcgctccaattcggggattggtggaggctggtgcgcgctaaggcaggaattggcggcggccggtgtgcgccagttcgaggaatcggctgcagctcacagaggacgcacggcgtgtgtttccttgccgtcgcagacatggcaaggggtatgagaaagtgcatcattcaaagccaagaagagtatttggtagaggagcctattggggaaacaagtcatcggccacgagatgcagcatatgaccaccatccttctactagagaacgccaaaaaagaaagcgacaatgataatgagttcaatgacctagatcatcataaaaaaatacaacatcttttgagactacttctgaagtgtacccttctcctgatgatgcggatatagaggattatgttgaaggtcaaactaatgaagcaataagtcgtggtccgaacaaacttaaacatgtttggaaccttcaaaaaggaaaacgaattgtagttaactgtaacgagctcgaccaacctattggagaggaggcaggagtcttaggaaaattccttgacatggttgctaggaatggctgcttatgtagcttaagcttcaaagattggagattactgataggaaagaaggacaggaacaatgaacaaaaaaacaagcaagatgtactaaagcaagtaaagatgagattcttataccctgcccgcatggaaaagtggatacttcgaactattggtgagagatggagacaacacaagtccaatctaaaatccttacattttgatgcgcataggagcaaggaaaataatctaaaaaatgttccaaaaggcgtcttagatgatcaatgggtcactcttgtgaataattggtttacaacaaaatcacaggatatcagtgaggcaaataggataaactgcgcaaaaaggaaggcgacccatacatcaggaacaaagagttttgctcggaacagggaagatatgagggaacaagatccagaaaagaaatacccccatagggctgtattgtatatcaatacacacaagagtaacatcacaaagaacacaaacccacatgtggttgcattgaaggaactattagtgcaacaaccaagtttagctgacactagtcatggaaaggttgcatggaaaggaaatgcgcttagccaaattttaggagaagagaagcctggccatatccatggtcttggccttgttccgaatctagatcaagtgtttggtggatcaacttcaaggcatctaaaacatcttaatttaacctctttggatgcaacatcaagtgaagatgtagtatctcttcgacttcaagtggaaaaacttatagatcgtgtccagaagcaagatgatactatactaaatttgcaaaataccttggaactgcaaaaaagtcaccatgaatgtctagatgaacctttgtcggcatcaaaagatgttcagccgactacgaatcaaaaagttaatcttcttgatgaactgaatagcacaatggcggatgaaatcgaacatgatgggtacgaggagctacaggcccagtgcaaaaaatctaaaattcaagaaaagagcaagccaccaatgccacgaggaggactccaaggtggtagagtttcttcatcgttaaatgtaaaaaatagcagtaatgcagccaaggtgatgaaccaggacattgctcgaaattcctctaatcatgaaccatacaagaacaagggatctctagaaaattatttgccaagtactaaagacgatcaatctacatcagaacgaaaacgagtatatggtcaatttcaaagtgaggaattttggacacttgacgaaaatcacgaatcaagccactacgaggagacacattacaacctagtaggatttcaacaggactgaaggttggttctcatattttcttgaagagttggaggaatcaaaataagaaggttgcattaggtacaataattggttgtgatccaaagcaaaaagttggaggagatccattgggcaaagaattttggaaggtttgtctcggtcttgtacttgtgcgtgatgaaccactaatacggccctacaacaatttcgtggttctaggagacatagacaacaaccctatagcatggccttcaagctgtatagaaaaggcagctctttaatgtcaaccattgaacaacaacagatctacatgagggctatgactttgattcttctttaaattgtcgttattagtgatgagagtgatgagtctactgagtccggtttatgagtcaacctttgtttgtttcatactatcatagaaaaatgtcaattcacacattgtgtaatgaattaagttgttgatgatattttataatggtactactatttttaatatagtctgattccagattatttgccatgtgtgagccaataatagtttggaaattgataatgtgccatgcacatgatttgcatatttgttttgatccaaataaaaaataattataaatagt

SEQ ID NO: 57807 - DNA, 1686 bp, Zea Mays
gttttctgagtatagcatctcctgctatgaggctagcagctggagagtggtttacagctcgcgtatcgtcctgtggtcttttccacatagcctatccaagtgcgtcggaccaattgaaaacagaattgaggactatctatggtcagctatgtcaggatgacatgcctatggtcagaagagcagcagcatcaaatcttggaaagtttgcagctacagttgaacagaatcatttgaagacagaaataatgtcaatatttgatgatttaacccaagatgatcaagattcagtgcgtctgttggctgttgaaggctgtgctgcccttggtaaattgttggaaccacaagattgcgtagcacacattcttccagtcattgtcaatttctcccaggataaatcatggcgtgttcgttatatggttgccaatcaattatatgagctctgtgaggctgttggccctgagcctacaagagctgatttggtgcctgcctatgttcgcctccttcgtgataatgaggctgaagtgcggatagcagctgctggaaaagtaactaagttttgccgcatattaaatcctcagctctcagtccaacatattcttccatgcgttaaggaattgtcatcagattcatcccagcatgttcgttcagctttagcctcagtgattatgggaatggctcctgtactgggaaaggatgctaccattgaacagcttgttccaattttcctctctttgttgaaagacgaatttcctgatgttcgacttaacataatcagcaaacttgatcaagttaatcaggttattggaattgacttgctatctcaatcactgctaccagcaattgtagaacttgcagaggataggcactggagagtccggcttgcaataattgagtacatcccattgttggcgagtcaattaggtgttgggtttttcgatgacaagctgggggcgctctgcatgcaatggttggaagacaaggtcttttcaatcagagatgctgccgctaacaacttgaagcgccttgcagaagagtttggtccagagtgggcaatgcagcatataatccctcaggtgctggagaagatcaacaacccacactatttataccgcatgacgattctgcaggcaatctccttgctagctcctgtcatgggtgcagaaatcacctgtcaaaagctgcttccagtcgtcattaattcttcgaaggacagggttcccaacatcaagttcaatgttgcgaaagtactacagtcacttgtaccgatcctcgaccaatctaccgtgaaaccgtgcctcgttgagctcagcgaggaccctgacgtcgacgtaaggtactatgcaaaccaggcactgcaggcgtgcgaccagatgatggtgtcaagctaactagcctttgtgtcaagtatttagagagttcgatcgatgctccatagtccaattttggattacctgtaatttggcctttagatttgaagagttgtttgtgtctagcctcggtaacagataaaaacggacggtcctgatccccttgttcgtttgtgttaattaatgttgtaattgagcaggacacaacgcgttgctgtgtgtgtttgcgtttacatggcagattgaactttacggtttgcttgcgctgtgcgatgctgctggcctatctacccttcgtcaatcatcacgtgtactagcg

SEQ ID NO: 57808 - DNA, 989 bp, Zea Mays
cgaacacggcccacgtcgccttcctccagactccaccagtctcctccggaccgagcacagcacaaaccacaatttgattttgacccgtcgcctgcctggccgcctcctagtcgtaatcccgccccgccgcctccccctctccggccttctccgctccgcgcgggcgccatggtgccgcgcacggcggagaacttcctggcgctctgcggaacgggctactacgacggcaccgtgttccaccgcaacatcaagggcttcatggtccagggcggcgaccccaccggcaccggcaagggcgggtcgtccatctggggcgccaagttcgcggacgagttgagggagtcgctcaagcacaacgcgcgcgggatcatgtcgatggccaacagcgggcccaacaccaacggcagccagttcttcatcacctacgccaagcagccgcacctcaacggtcactacaccgtgttcgccaaggtcatccacggcttcgaggtgctggacctcatggagaaggcgcagacgggacccggggacaggccgctcgccgagatcaggctcaaccgcgtcaccatccacgccaacccgctcgccgtctgaactcctcttcctaccgctctcccctccactcgctcctgtcctcatccaccgggatctgagcgtcatcagccttgctttcaaccgcaaaatcacgctttggtttcggaacatcaatctgtagctctctaattttataccgatgctgtgacatgtaacctttgatagatttgttttgcctggcgtttttttttttttttttgcttcatcgaccatcaaaatcttcaccggccatgtctgccagggtttgagtttgacactgtaacttgcaaaacaatatagcagccatggtcagcaaagagatggtataactgattcgatacattggcccagatgcgacctcgtactcattacaactgtgatcctataactagtcatacagaaataacaacagcaat

SEQ ID NO: 57809 - DNA, 1751 bp, Zea Mays
agatttccctgcctttctaaaggcatgtttgggagcaagggtgatggagagggttgagggggccaaaatcacttagagcttgttcagttatgagtggattgagggggattagaaaggattaaatctcctccaatctccctaaaaccgaacaagtccttactattcaactcaatctcctccattaccattgcttccaaacaagccctaaattaacttttgaggatcattcattcaaatacagcacaccaccatagaaacaataacaacaattagtcgaaaactgggcatgtgttatgctaaaagtcatcctagtttagcaataaattgagcaaaataacaatgctaacagttcaggatgttacaaaggctggggcatttgatcatcacagccactgaagaacagttccaaacaagaaagcaagatcaacagacaatcatcagaaaaaacaaaaaagatgtacagaaactatcaaactgaatcattgctgcacccagcacagcttcttttggggtgtttgtatgggtgggtgggtgagggggagagggctcagcttcgcctttgctcattcatcttactgtatcctcatcatctcttatcaccagatcgacttgtcctgacaagtcagctgccctggttatcacccatgaagaatggcatgaccatccgaggacaaggtctttataattaggacataattgaaaaggtttccaagagagcaaagcgaggactccagtttggtacccatagcagccttgattgctcaaaggcgcatgtcagccttggttattgatcattgccccacattggaattttacttattcataattgaggggcactcaggtagaaacgtatgatatataactgactttgcatattagtcttaacattaacccatagaaaccaacccctaccctatcttgccgcacatattacccatcttgatgcaagagcatctccaacaatttatccgtgcatgaaaaaaagaaggtacacacgcgcaaagatatgcagacgacctctacttatcatgggggggcaaagatatgtggatgaccgctactagttaatatctattggaaaggttgcaaaaacagatttttcaggattactccctttgtcccaaaataagtgcacttctagcattcaaatttcgtcccacaccaagtgcacatataggtatgggaccacctagctttagtatatttttttacattctctacttcctaagtgcaattgttactcagcattggaataaacaagcaattctagaagtgcttttcttttggggctggcgtagtatttcttttaaggtactgttggagatgctctaagtgtaactgtgctggttgtcacatccaaatgatcttcctaggcagaaccacaaacaaaaagcgctgatcaaatatgcttcaggagggtagagggtcagctcaatggcatgcaattcagaaaaagggagaacatcattgccctccatcagcaatccattcataggttcaggctcatttccaggcccagcacggtcaccctaagcaaatttcacttgcaatggccactggtactttctcccaagccagaaaactgcctctttatatctcataatcacatattctgatcccatatgcactgcctatccatgtgccaccgaggtgtgggggtgaggagcagaagggctacgaacgttcagagcaaagcacatcaaagcacacaggactgcaggcgtggatcaagtaaagaacatgggtgtcca

SEQ ID NO: 57810 - DNA, 2524 bp, Zea Mays
tgccaggaagtgcatgattttgggtgggttggaaaacctggcgaagggcccaacgagacctgggcacctggcgtagggtggtggcggccacccagtcatcgccacgagaggggggagagagagagagcacgcagggagaagaggaagggagaaggaaagaaggggggtgaaggagagaagatggaaaaaaatttaaatgtcccacaggaaactaaaagggaagaaaagaagatcaccactgcaacacattaggaggaaagtatacatgttccatccatcaagtagtagtagtgaaaacatgcttgtgaacgctactccctatcagagcatctccagtagttcccagaaacacactcccaatcttggttttatggcaggatggaaagaaagctctccaacaactctgcatcataactcccaatgtctctgcacttgggaaaatagatcgatacatgcgtgaacagcatagaaacagcacaaacgtagagaagcttttcacaaacatgaccaaaaaaagcacaaccaagctcatgacaataatttagcatgtctatcatttggattgatcaatccagattgatcaaagccatggcacaaaattaggaccactaacaccaatgccagttacccaaagggatttccaagctagtgcctcaggacacagaagtaaagacgcattagggaaccagttataagtattggtggaagaataaaagtagtaaataagagtgtggagaagaaataaaatcattctttagaacaaaatgagcaactcatccagttaagcttgggcatcccaaccaaaaacatgaagaatatatgcatcaaatctacccgagtcaagaatcttatatgacatcaaatcgaactcagatttgtcccatcggtatcatgatccaggtcccaagttgaaatcacagcaaaagaaggatacatgaaggaaatagaatcatagacaaaagtatatgacagaatagaaagagtaatgtcacattgaatggctcagatttgccccaacatcaacacaacactcgcagaagaaacatgaactcctccctccacacgctaaacgaacttttgagtaggattgttcacttggaaatataaacgacaccaccgccacagcaatggcaacaatcagttgcaaactggttgcttgtatatggtacaagccatccaagtttaacaatatattgagcaaaataccaaaccctaaatcctaaaccctaaacaattcaacacattcatcccattacttgaaatccatgtcccaagttgaaatcacaggaaaaagtaggatgaatgaaggaaatagaatcacaaacgaaagtatatgacagaatagaaagagaaatattatgttgaacggctcagatttgccccaatatcaacacgacacatcctactctaaatgaacttttgaataggattgttcatttggaaataaactggttgcttgtatatggtacaccaccgccacggcaatgaggcaatcagttgcaaactggttgcttgtatatggtacaagccatccaagtttaacagtgtattgagcacaatatcaaaccctaaatcctaaaccctaaacaattcaagacgctaaaaagtaatagctcaatggggatgggacatttgacatcacagccaccgaagagtagttccaaacaagaaaggaagatcaacagataagcgacaaataaatatctagaaaataaaggaatgcatagagcgtcatcacagccacagaagaagagttccaaacaagaaagcaagatcaacagataagcaacaaaaaaacgtcagaaaaaacaaagagatgtatagaaactaccaaaatgaatcaatgctgcaccctgcacagcttcttttggggtgtttgtatgggtgggtgggtaagggggggagggatcagtttcgcctttgctcattcatcttaatatttgacatcacagccgctgatgaatagttccaaacaagaaaggaagatcaacagataagcaacaaaaaaatatctggaaaacaaaggaatgcataggaactaccaaaatggatcaatgatgcaccttgcaagcctataatagttgtgatggcctacaggaagtaattgctaaaacacaatgctctcctaagtccaaagtcacccagctacaacaggagtactgagacataactcaagaaattactgaaataaattctggatgaacaaaattatcaaaaagtttccatcaagcaaaacaatactatcgcaaacaattatagcagaatcaacatcagaaactagggaacatctcaacctactaatgaacagaatccaaatgtaaatgattggtgtgttccacaaatgcaacaaaagtaatggagtcataaaatatgtaggtttggaaagaaaacatggagcaacaacatactcaacagaagaagtgaagatacaacataatgtgctttcttcttcccttttcgttgtgtgtgtgcgcgcgcgcgtgtgtgttgaggggggctcagcttcgcctttgctcaatcattt

SEQ ID NO: 57811 - DNA, 1182 bp, Zea Mays
ggagagaagaggaagggctccagtttgatacccatagcagccttgattgctcaaaggcgcatatgtcagccatggttattgatcattgcccccataaggaaatttttatggctttgatctcgatggcacttgggcaggagcttatgggatgcaactgaccaggcatattagtcccacaaacattgacccaggtcccagaatcaaatacagcaggaaggcaagtgaagaagagcattcttagatcatggtagagcatcaacaggacaaatcattagccttgctcacaaagacctgggtacctgacatatggtggcagtggtccaagtctcgccaggagagcgagagaactagcgaacgggagaagataacccactgcctgtctcaactcccaatctttctgcacttggtaaatgttttcagaacgtccgattagccgcgattaatgggctgatcgtaactcccgatcaagggtaacgacgcgatcagatcatccgattagtcggcgcgactaatcgtccaattagtttaggaacgatcagcctggctggctggattgaaatttcgcccagcggcccagaccagcttcctttttcccgattcccaccacgtgagcagaagctgcacaaccaagagccaacagagcaacgcccaggcacacacggcacgaaccaggcaaccagctgcgagggaggaaccctagcggaacactgtgcaggtgacggcggcgcgctaccggtgacgacggcggcggcggcgaggacaaggcaaggaagaatcagagagcataccaaatccagacaatcgatcgaaaagggtccatcaaaaggcggctcagatcccgcgttgcccgaccacggccccgaccaaaacccgcagcggaccgcgccgccacggtccccaaccccagcccctaccgccgaagcaacgccgcccgccacaggtccgtaatccggcgcggcgcagcggggcggggaccagagtagccccggggaggcgcagatccggcgacgagcgccagtcgggaaccggcccggcgccaagcgcggcgcccttcctcatcgccgcttttgttccaagggctgttggtttcagtggtgtggtcaccggccgccgcgagcgggaacaagcagcaggtttagagcgctcgccacgcatgcgccgccaccgaagcccacacggcca

SEQ ID NO: 57812 - DNA, 616 bp, Zea Mays
agaacaaatttccgtttgataaatggaaataagatcatcctcagccagcagccttagtgcagtctacaaacagtcacgatctgttggccagagcctcatgtcgacaaaaatccatcaggagtagcgaatgagggcagcgcggcaggccaaacctgactcggaagccgcctaggcggctccgcatggtcgaggccaagcaatgtaacggctgtgaggcggcaccgtatggatggacacctgacgcgacggctgctccggagaatggaccgcgcagtgccctcgattcgatctagggtttgggttcagggaatgtgcgaacacacacacacacacatacatacatacatacatactgctacatccagcatgctactgcatccgtccaccgtcctggagagattgcaatctagcatccaaaagaacggcgaacggcgaacggcgacggcaaggcaaggaagagtcagagagcataccaaaaccactcattcgcaacaaaaggctcgaaaaaggtccatcaaaggcggctcagatcccgcgctgctcgaccacggccccgaccagaagccggcacggaccccgccgccacggtccccaaccccagcccctaccgccgcag

SEQ ID NO: 57813 - DNA, 2096 bp, Zea Mays
caccacctccgttggattcgtaatcaacggaagcactgccctctgccgttcggcagacgatctggttcccctcacgcccaccaaatcccgaatcccaccaccgccttctatcgcccccaccccggctcccagatcgcggcggcacacataatggccgcctcgccgtcgctgcacgccgtggcgcaccgggggccctccctgaccgccctcctcttcctcgtcgccgcgatggtgttggttccccctgcggcggccgagatccgggagaccgcaatccgggccgacccgcggagcatcatcccgctggatgaattcggcttctcccactcgggcgtgctggagctcaacgtctccggcatcgccttcgacccgcaggcctccgcggagctggacctctcccagctcggcttcttcctctccacgctcgacgcctgggtccacgtcctccgccagctccaggacctcgacgtcacctgcgcgctccagtccgagctcgtcaagctcgccttctctttcgaccgcctccgcccgccctccaaccccgccggcgtcgaggtcgctcgctcctcctccttctccaccgccttccgcgtctccgagcccggccagtacacgctcgtcttcgccaactgcctcggcggcggcctcaaggttgacatggacgtccgctctgccatgtacaacgtcgacccggcaaccggggagcgccagtacctctccgcgggggcctccgcgctgccctccttctacttcctcttctgcctcgcctacgctggcctcgccgctgcctgggtcgccatcctcctccgcaagcgggccgccgtattccggatccactacttcatgctcgccgtgctcgtgctcaaggcgctcaacctcctcgccgaggccgaggacaagtcatgcatcgagcgcaccggcaccgcccacggctgggacgtgctattctacatcttcagcttcctcaaggggatctcgctcttcacgctcatagtgctcatcggcaccggctggtccttcctcaagccctacctggccgaccgagagaagaaggtgcttatggtggtcatccccctgcaggtcgtagctaacatcgcgcaggtggtgattgacgaatctggaccctatgcccgggactgggtcacctggaagcagattttcttgctggtcgatgtggtctgctgctgtgctgtgctcttcccgattgtgtggtccattaagaacctccgggaggctgctcgcttggacgggaaggctgcggtgaacctcatgaagctcaccctcttccgccagtactatgtggtggtcatctgctacatttacttcacgcgggtcgtggtgtatgccctacagaccatcacctcgtaccggtacctgtggactagcgtcgtggccggggagcttgtgacgctcgcgttctatgtctttactgggtacaagttccggcctgaggtgcataacccatacttcgccattgacgatgaggaagaggaggctgcagctgagacgctaaagttggatgatgaattcgagctatgaggggttaggaattggaatcacctccatggcagttttaatattggtgttgtatgccccagcacaggacaagtggcataaactgctgtattgctttggatctgcaaaaggagacatagaaacaagtgaagtcagagtcatagaagtcaactaaaacgttcagtcaatggaggaacagtgtaactatggcctgaaagggttctgattttgagccatggcgatgtctatcgagatgcaatgctgcttgcttatccatctacgcttgcagtcaagtttgatcactttcatggtttgggtcataacggtggaagcactgagttctggtcactagcattgtggagcaactttgcaagtggatggagccatgcatgctaaaagggcatcctctgtcacagttcgcctagcaaatgatttcctttcagttgtgttgacatcaaatcacaggggatgcacgcactcccatccaggttagtgccttgagcttatttggcgttgaaaacttgcatgcttccttatcgtggagagccatgctgctaaaataaatcgaggttgcttttgct

SEQ ID NO: 57814 - DNA, 3525 bp, Zea Mays
gagacaaattagttggatgtataaattcatgagctctctggtaaagttggttttaggatttttaaagcaattagaaaatattaagtgaattaaaggtgctttaaaaggactattggaattttagaaataagagttgagcaccaaaaatcatagaaattcttggaaagacttgttatcataaagtgagcacttgttaaaatttggagactttttagaagcctttttcttagaaagcattgtaaagtcacaaatagggtgagaaaatccctaatcaagtatgaattaatgctttggaaagaagataagtttatctagggaagagatgcagttgcttaagaagttttacgcttttggatgagatctaagatggattagttctctagtttgcctaagtgaatccgatttagccacttttagcaagtgttggtggtgtaaaaccatgtgtatacttgtcatgtgttttagtttgtggtgtttatgttccccacctctccttgtgagagtttgcatttcatgtcattacataaacatacatgtatttgtaattgacttgtagaacacctagaagaagtggtgtttgaaggaggagtctactccagtggctgctgatcaagtggaggagccatctgactgggtattgggtggaaaggtctttagcctcttctctgcaacaaaggcaagccccggtgcatttgccacctcccttgtgtttacaaaattttatcacttatatgctgcattaggtgataggagttgattgattaaacaattgatgcattaccatccttgaaagattgattaccataccttgtcacctgttttataaaagctagagatgcttagtcatgcttgatagactaagaaaaatgttttttcatctatgactcatgtttttacaaaaaaatgggcttgggataatgaaggcatcaagacgttgataaattcattatccaggcatggcccctatatcaggcgccaaaattttgaaatagtttaaaatgggaccagacgctgagcaggaaaggtcgcccgtctgtgtcgattaaggaccgtaccgattgttggcctgatgatgtaggaccttttaactggccacatacctcgtcatgggtaagcctgaaccctgctattcccatacgtgaaaagacaaccgcgcactggacgtgggagatggtgggagtagcagttaccctcctggcaagaagatgaatggtagggtaatgtgctcccgggtagcgcggaccagttcatgtagtagaggatccgtgggaatggttgacatatgcaagggttaagtgctacatatgtcgtgtggttggagatccccagttgggtattaatcgattcggatcgtcgttacttctcggatatgaagactggatcgctgcccttcatcgtagataacaagcaaaacaaaatttggattttaaaagcaacctagtgcaggtcaagtgaatgatctagattaggaaactactagattcaggctagaagattcaggtaataaactaacttgtgaaataaaacttggcttaaggacccacttctagtaagcttttctgcaaaatgagtccttgaactttgatgagctttaccttgattcccaaaagctagcatacccttgagagtcttttctttagtcgggtaagtcttgctgagtaattgcgtactcagggttttatctcttgttgtttttgtaggagaagtttttttcccttttctttaggttagttacttcatgtggaggacttgaagcttagaaggtttttatatatcttttatggaaaggcttcacccttccaattattgtaataagttatgcacttcgagtactatcaggacttgtaataaatacatctctttctaccatgtaaaacttgagttcgggaatgtaaagtgtactttgtaaaagtcttccgctctatctctaatgtgtgtgtatcaaatgtgattactgtattatacctgttatgtgggagatccttgggatgatgagttccagttggcgaactcgatagccttgttaagttatccggtacacgtgcacagccatctgagaccattaaggcaaggattggtgcatgtgggcctaataacttgggagggctgtcacaaaggtaattactaattaaattgtaaataaatataagttactgttatacaaccttttcttgctccagctatccaatctttggtgcagacaagcgcttctaccatggtagggtcaaggcgagtacgaaatggatcaagtacacgaccacccgcactaaaagcagattctgaagctactgttgacacttgcatagctaagacgtcacgagcaagctgggcccaagataggatattcttctttgtgtgctttccaccagtctagtatgtcaaaagtatgctgattatgtttaccaatctttaatattggatctgtcaaatatttttctaagtcacttgtgtcaatagaatcatcatgaccttgtccattaaatatgtagctatcaagctcttcatcgatacttgacttaatcatgtcacccgctgaagttgagtaaggtgcaacagatgatgttgagggtgtagtagaggcatagcattgatacatctttttcatgacaccattaaatttatccagttcagtttgataggtatatgggtacaccttcttcaagtaaaattctacaattttcctcttgtatctaggatcaaggacactagccacagcaagagcaatatttgacttattccagtacttgtcaaacttgaccatcatagtgtttgccatgttactaatagtgggattgatgctatcacaccaatcaacaagtaaaaacttaatctcacaaaaccctttaaaaaacaagttggcagtgggatataatgtaccagaaaataacttagtcaagtcaaagaactttctcaaacatggtaaaagagtctttgccaaatcctcatccaaattaattccttcttctggatttgcaccttgttcatgagatgttgcagcaggtgttgacgatgatgcggacacaccaaaaggttgagttgtatttgcatgaggtgaggatgtcaagttctgactttgatgttcactaggcaactccaacaacatacgcttttgtggaggtgaagatacaccttcactagccattagagcggatcacagtttttacctgcatataaaaattgtgacattagagtagatcacaccttcacactttccttttttttatcggatttttgtttgagcgaacacatgttttggatatgtgttattactccctagtattttatatgaacacccccacatactttaaaacccatgatatggcactcagtaaagcatcaatgtggctaatcattaaaaatttggtaagcattttcagcgcataaaaattatctaccatttgtttcctgtagcttcaacggtggactacggtgttctagacttctagtacggtagtaccccagcagtgtgggttcgccgagtgcaggctacagggcactccaagtgcaatgcgtggtgcactggtg

SEQ ID NO: 57815 - DNA, 2084 bp, Zea Mays
agaaaatattaagtgaattaaaggtgctttaaaaggactattggaattttagaaataagagttgagcaccaaaaatcatagaaattcttggaaagacttgttatcataaagtgagcacttgttaaaatttggagactttttagaagcctttttcttagaaagcattgtaaagtcacaaatagggtgagaaaatccctaatcaagtatgaattaatgctttggaaagaagataagtttatctagggaagagatgcagttgcttaagaagttttacgcttttggatgagatctaagatggattagttctctagtttgcctaagtgaatccgatttagccacttttagcaagtgttggtggtgtaaaaccatgtgtatacttgtcatgtgttttagtttgtggtgtttatgttccccacctctccttgtgagagtttgcatttcatgtcattacataaacatacatgtatttgtaattgacttgtagaacacctagaagaagtggtgtttgaaggaggagtctactccagtggctgctgatcaagtggaggagccatctgactgggtattgggtggaaaggtctttagcctcttctctgcaacaaaggagaagtttttttcccttttctttaggttagttacttcatgtggaggacttgaagcttagaaggtttttatatatcttttatggaaaggcttcacccttccaattattgtaataagttatgcacttcgagtactatcaggacttgtaataaatacatctctttctaccatgtaaaacttgagttcgggaatgtaaagtgtactttgtaaaagtcttccgctctatctctaatgtgtgtgtatcaaatgtgattactgtattatacctgttatgtgggagatccttgggatgatgagttccagttggcgaactcgatagccttgttaagttatccggtacacgtgcacagccatctgagaccattaaggcaaggattggtgcatgtgggcctaataacttgggagggctgtcacaaagacaagcgcttctaccatggtagggtcaaggcgagtacgaaatggatcaagtacacgaccacccgcactaaaagcagattctgaagctactgttgacacttgcatagctaagacgtcacgagcaagctgggcccaagataggatattcttctttgtgtgctttccaccagtctagtatgtcaaaagtatgctgattatgtttaccaatctttaatattggatctgtcaaatatttttctaagtcacttgtgtcaatagaatcatcatgaccttgtccattaaatatgtagctatcaagctcttcatcgatacttgacttaatcatgtcacccgctgaagttgagtaaggtgcaacagatgatgttgagggtgtagtagaggcatagcattgatacatctttttcatgacaccattaaatttatccagttcagtttgataggtatatgggtacaccttcttcaagtaaaattctacaattttcctcttgtatctaggatcaaggacactagccacagcaagagcaatatttgacttattccagtacttgtcaaacttgaccatcatagtgtttgccatgttactaatagtgggattgatgctatcacaccaatcaacaagtaaaaacttaatctcacaaaaccctttaaaaaacaagttggcagtgggatataatgtaccagaaaataacttagtcaagtcaaagaactttctcaaacatggtaaaagagtctttgccaaatcctcatccaaattaattccttcttctggatttgcaccttgttcatgagatgttgcagcaggtgttgacgatgatgcggacacaccaaaaggttgagttgtatttgcatgaggtgaggatgtcaagttctgactttgatgttcactaggcaactccaacaacatacgcttttgtggaggtgaagatacaccttcactagccattagagcggatcacagtttttacctgcatataaaaattgtgacattagagtagatcacaccttcacactttccttttttttatcggatttttgtttgagcgaacacatgttttggatatgtg

SEQ ID NO: 57816 - DNA, 1800 bp, Zea Mays
cagcacaattctggcatcacatgcaaaagcgaacacaaagcatagacaaggcttaaacaagaatatccacacaaaccccaaacaaacaagcaccatggttccatagcttgagttgaatgatctacctaattaaacaattaacaggaacaacgaagtagcttaccgaaattaaatctaccttgaaaccacaaggttgatgccactttccggttctagcattttaccgaatacgtgacgagcaacatactagacttcactattctacccgatcaaattttattctagcactaattcactactgcgatttacgtgcacgtcactggcccacgtttaacagcgcaagtataccaaactgacgagaaatattaaaacaaaaagcgagagcgatgatagctcaccaataatttgatccgtcttgaaggccacgagcacggctatgatttctgattctgccattacgtcgagcacatggtgagcaccacgcaggacttgttgctttatccaaactctcatgatttttcgacgacgcaagggatgtcgacgagtttgagacttgtaaggtcgagcacgacagagagcttcggatcccgacgcaagtagcgtgcagttgaaagatagatcgttggggtcgacgggcacgttggggaaacggcttggatcgacgacgaagaatgaggggacttgtggcactctaaatcgtgaacacatacatgtcgctctcttgtatacggactgttggaatcgactcgaatcgcgtaagcatgtccatcacgctgggcttttgtcgaacacgaggtgcagccacgacatcgatagcgagtgaggtggacaacaaggtcagagctgcgcagatccggggctgctgttcggaagaaaaaggggctactgttcggaagaaaaagtgcacaggcgacggcgagcagctggggcgcggctgcacgtgcgagcagggagaacggtggcgacttgggcgagtgtagaggcgtgcaagagagctcagcgcgtaggaagttgacgcgcgcagccgggaggaacgaggagcaagggctggagcgcgtggaggagaagccgacgagctcgagcacagggagatgcggccgagcagagaggtggcgcgcggcttctatgagcgaataggggagggatttggaacagccgagcgccatggatggaggagcggaggaaagtccagcacgcaggggagatccatggtagaggaggacgccggctaggacgagcttgagggcgcgatggctgagcctccccggcgagaacatggagaaccgacgcgagtgctagtcggcgttggtcggctgggcacccatggccggcccaagagcttccggcgaggagatccacaccagggatctgagcgcgagaaggtgagctacagcttggggtcgggcagcaagttcctcacgaggagttggtggctgctgccgaggggagcagagaacgaccgagcgctgagagtagggcggagtccgagctgggccgggcgccatgggagatggtgaggaaggagatggggaagatgccgagcaagcaccagagaagggtagcgacggccagcctccatggcgtgctccagccaccagggagcgacgaagtagaagacaggctggtgaaagctctgtgcgtttgctgtctcaaaaatatatcaagcgatgggataaggctgactgtaccagcgcggcgagaaaagatcaggacagtggcaaaaaatatgtgcgccatagagatcagtccagggcagcggcagaaatattagtagagagagaattttgcaaagaaaagtga

SEQ ID NO: 57817 - DNA, 6955 bp, Zea Mays
gccgactcttggctaggcgacggggacgtctagactttttggccgcctggacgcctaggcgctagacgacgcctttgaaaccatggattttagaataattttttatgtaaatctcaagttcattataaatcaaataatttttatgttgttctctatcaagttacttgtacatcttcgtcgcggagacgagaggattggggaatttttgcttgctggctcatgtgaacatccccatgcgtgcatatcccaggttatgcccgacacgctggaagtcaggagtctggaagtctttcgatgccttgcctggtgttgtgatcctgaacgtattccatctaagaaatacctctggatcactgaaccagaccaagcttcagctgctgaagggaagaaggccctggtgtacccggtgcaaattcgttgggttcctgctgattagagtctcatgcctggcgctccatagccgccggatggaggtgacggttaggacaaacccgacacccccttcacggagaagatgtggtgacgacaaccctccacctactcaacgtgctgcaatcactgacgatcctggcaacaagacccaccctcaacggcggccggtacatgacaaattgggacccttgaggcgctcggattcccccagggaattgagccagccttgggttctgattgatacaaaggctcgcagcagccagccttgtgctctgattgatgcagtggcatgcagcagcgtagggagtccttcgacccctgtgccggacggggatcagtgtctggtggcaggggatgtgctgctgcggcgcgaggagggctgcaaagaagctgaagtaattccaaagaccccgatggccgtttccagcctttgcccttcctccggagggagacgcagattgatgatgaaggccactgcaaaacaagcaaagttcaggaatccgcccatcgcgttcttcagacgacagcgacgcgctccgaagacccctgagggcgccccacttccctcttgctcatctggtgaccggggggcagggagcaacctgggcgccttgcctcctgccccagctgctggggtggccgcgtcgcccctaccacatgggccgcccccgcatgaggagtcccaagggtcgtcaggacagcaggattttcttcgtcgagtttccaaagttgttggcgccgttcttccacttccaaagacagtgaaaggaggacgacgacgaaggcaacccacttcccctccgaacgcgattcgccggagtcggcgcgttgcgtggttgggagtggagcaagttcagcatattcccaaagcaagaaagaaaataatgaagtccatcctcgcggagccggatagtgaacatttcagccaacaaaatcttgatgcatatacgaagctcttccaagcacccttgtctcgtgcccaggtggaggctctcgctgctctctttggatgggcgatgtaggatgacaaaggtgaggttgttccccctaggacagccactctggtctgctgattgcagcccacggtcgccttttattaccactgtttccctatggacccttccctaatcttgttctggaatgtccgcggtctcaactccgccgcaagacaagatgctgtaaggagtttggttgactcattaagagtggatgttgtctgtttacaagaaacaaagttggttgattgtgatcgtcgcacagttttgtcaatgttaggcgctgattttgacaataatttcgtttgcctcccctcggttggggccagtgatggggtgctgatcacttggagagcaaaattggggagaatcgttgcttcttgtgtggactccttcagtgtttcagtcaaattcaaccctgctgacggcgaggcttggtggcttacctgcgtgtatggaccacaaggacatgacagaaaaattgcctttatccatgagctgagagcgatcagagctgcttgcaccgggccttggctcctagggggtgattttaatctcaatttcagagacgaagacaaaaacaacctaaatatcaatcgggccatgatggggaggttcagaaggtgcatcgatgatttaagcatcaaagatattgaccttttaggctggaaatatacatggtctggcgctaataatgtacaagtcaggctggaccgggtcttctgttcttcagattgggaggaaaaattccccaattatctgctgcaaagctcagcttcagaggattcagaccactgtcctctcctgttgggattgaaggacaactacactgggaaacggagatttcattttgaatccttttggcccagatttgagggttttttggaagcggtaactaatgactggggttctgttcagcagtcttcttgtcccctcaagaccctttccctaaaattcaaggcgacaacaaaaggactgcaatgttggagtgacaaaaaggttggaaacttcaaactgcaacttgggcttgctagagaattattgctgcagctggaagtggcaaaagagagcagaattcttaatgttttggagacatggctgcttaggcgcttgaagaaatgctctctggctcttgcctccttaatccgctcggtggctaggactagatcaagaattgcctggctcaaagatggtgatgctaatacaaagctctttcactcttggtctcgtcatcggaaaagaaaaaatttcatagccaaaattcaagacggggagcagctagtgaccagtcatagcgataaggcagaggtgcttcggtccttctattcagatctaattggtacagcgcagcaaaggtccagaactgtcaaccttgacaccttaggactgcagcacattgaccttcaggggctcgagcagccaatctcggaggaggaggtgtggaataccatcaaacagcttcctccggacaaagccccggggcctgatgggttcacaggtcgtttctataaggcctgctggtcaatcatcaaaaaagacattatggctgctatcctggctgtctggaacaaggacttctggaacttcagatacctcaacacagccttcatcactcttttacctaagaaagaggatgccatccttgccatggactttcggcctattagcttgatccacagcttcgcaaagttaatcacgaagatcatggcaaacagactgagtggctatatggacaagctgatttctaggaaccaaaatgtgtttatcaagggccgattcatccaagacaacttcatgttagttcagcagactgcaagattgctgcatgctcaaaaacagcctagaattcttctcaagctggacatatccaaggcctttgattcggtatcttggtccttcttacttgaagtattggaaaaggttggattcggccccatttggagagatgtgatcagtgggctgcttatgacctcctctacccaaattatgcttaatggagtgcctggggaatacatccaacacaagaggggcctgcggcagggggactcactatcccctcttcttttcattatcgttatggatgttctcaatggcctaattgttaaagctgctgatgagggtctgctccaacccctttcaactcattccattcagcaccgaatatcgctctatgctgatgatgtggtgatattcttgaaaccgactgctagtgacctgcacttggtaaccatgatattggagttgtttggggatgcctcggggctaaaaaccaacgtacaaaaaagcagtgtggctccaattcactgctctccggtggacatggaaatggtaacccaaatttttccttgcaaagttgaaacacttcctctcaaatatctcgggctacctctctctcgggaagttaagcaaggagcaactgcagccattaattgataggcttgcggacctcttacctaattggagggccgacttgataactcgagctggcagagctatccaagtgcagcatgtactcacggcaacagttatatgacaagattagacgtggctttctttggaaaggtcgaaaggatgtgctcggtggccactgcttagttgcttggggcaaagtgacacgctcaaaggagcttggtgggcttggcatctcagatttagaaaagctgaattgggcccttcgggttagatggttgtggttggaaaaaacagacccctcgaagtcttgggctgatttacctctccagagttccagcattctgaaatctatcctctctacagctttgattacagaagtaggtgatggtcgtaacaccttgttttggagggacagatggttgatggggcagaggattgaggatctatctcctcatattttcgccctcgtcccgactaggattgccaataatagaacggtggcagaaggtatcgtggagatggcttggatccgggacctgagaggcaccatcacttgggttgtcctctctgattttttaactcttagtgaagtcattgcagatttctcccttagtgatggagtgccagacaatcatatctggaaattttccccgacaggccaatattcttcaaagtcggcttatgatatgctattcctaggatccacttcttttggagcctttgagcgcgtttgggagtcttgggcaccttcaaagtgcagtttcttcctttggcttgccatgcacaacagatgctgaaccgcagaccgtcttgctaaaagaggactaccccaccccagtgtgtgtcccctttgtgaccaggaagaggaaacaatacaacatcttctcatctcttgcgtctttgcaagacagttctggtacctcttgttgcgcaggtctaggttgcctaatctttcaccagacaatgctctttgcagcctcaaagactggtggagcagggctgtggagaagattccccgtgatctccaatcaggcttcaattctctagttattcttggcgcttggagcctttggcgtcatcgcaatgactgtgtgttcaatgggaggtcgccgagcctagcgagtactctcaccctcgctggcgatgagctcaggatgtggtgtagtgtcggggctaaagggttgaacttgctatcaactcttgtgtttatgcttgacccggggggatagtcttgttcagaatggttgtgtgtggtggctgtgttgcgtcttgtgtgtcttgttgtgtcgtgtgtgtgttgtgttgtaccttcttctatctattaatggaatgatacgcagatctcctgcgtgttcgagaaaagttacttgtacattatagtgattgaacgtgaagagaggtggagatattgcttcgctttttcgaaaacatgaagcaaagaagcttgctacctcctcgtcatatccttcttcagcttcaatagtaactcaagggcaacctagtaatgagcaagaggaaggaagagtgatcgaagaaaatcaaaatcctatgcctccttcaccaccaccgccaccatcgcaatcatgagccccaccggtttatgatatcaatcatcttccacatgatccaggtgaaagacaacccatctcaagttatcatgtttatgatcaggatgcaattcgagtatatattctgaaaggtcctttgcaaccatatgcacatgaatttccaaaaagaaaaatttgaaatagaggtcgcaactttaattttgtgtggttccataattttccttgggttgaatatagtatcaagaatcatgatgtcttttgttttgtgtgctatttattcaaaaataagaaaagtaagggcaagggcactgatgcatttactgcgagtggatggagaaattggaatataggacgcaaatcattttgaaacatgcgggttctttggcacacaagacagctcaagagaaatacattggctatatgaatcctaatacatcaattggtaaccaaattgagaaatgagtgatgaggaccttcgtttgtataagataagacttacttattcaattagatgtttgaggtatcttttccatcaagggttggcattccgtggacatgatgaaagcaaagagtctagcaatagggacaatttcattgagcttttgaaatttcttgatagtaatagtgaagaggtgaacaaggtcgtgttgaacaatactatagataactgcactttaactagcccaatgattcaagcatggattattcattgttgtgccatggaaactagaaagaaaataattgaacttggtaaatagccctttgctattttagcgcatgagcctagtgatgtaccgatgtatcacataaagaacaactagctcttaatgaaacttcatcacttaagattgcaattgagactctacttgttaagtatgacaagaatccatggtcaaggttataatgggccaacatgaaaggagatattaaagggttgaaaacattgatcttgcaagaatcaccttctgtttattatattcattgttttgtacatcgactccaactagttcttgttgtggccaagggaaacaatgattgtgtctagtttttttatcaagtttctctcttgttgaatattgttggtgtttcttataagtgtcatggaatgctacgaactgctaggcttgagagtatcataaaagcactggaatgtggtcatattgaaagtggtcatgttgaaagtggcagtggattaaatcaagagatggggttgcctaggcctagtgaaactagatggggctctcattactaaattgtatgcaacatcattgctatgtatcctataatatgtgatgtgctcatcacacttggagaggatacaacaattaagagattggtgtaggatacatttcatggttggagcatgagtcatttgactttgtttttgatgcacacctaatgttcgttattattggatatacaaatgaattgtcagaatgtttgcagaggagggagtaagatatacttaatgcaatctcactcattacaatggcagaaagaagaatgcaacaattaaggtttgatggttgggatcaattccttcaaaag

SEQ ID NO: 57818 - DNA, 1055 bp, Zea Mays
gcacacagcaacccaagttcccactaagcgagtacttctctacttcctatcacaaaaaaaaagatttgcaatctagcatatttatggaagcctttgctccggataaaatttgcgggtcagggagatcagcggtcaccacccatgaaagagtgatggaagcccaaagtagtacttgcttttcaaaagtcgtgggacctaacttatggtatggcgatcgcacaagacttacacccaagcaagaagaagctgcgcttggtttgtcacgtgcctgtggctctggcattccagcatacatttgcaccatgaagaagtctaatgttgtcaagagacagatggtattttcaagacagttcagtaagcgacacatattcggtcgtctgggcacttatgggtgtgaaaccagagtttttgcaggcagggacctgttcggcagtaagctcaacttctcaatgatccatggagaactaaggcttcttggtggatggcccctctttgtgaagagtcaccgtatcgaagcaggacacgtgtgtgctttcatgttccaggaagaggaagagggcgaactgtcacttagggtgcacgtgctgggtactatgccagtgccaacaatctagcctttgcttgtttcgttgatgaggcacgggatgaacgtcgctaacgaattatgcatcagacattagtattggaaacagcaacatgcagctagctatcttgctctggaaggtgacaagggtatctagattacagccttataggttgtgttgttgttgttctatctagataactatgtatggacatattgttcttttgtgttggagggagtaagcgttagtgttttgagacacaaagattgttattttttagactgaccgctccagttgtgcaaataggaactgaattagtggcattgttagcatgtacatgaaaacgtgatttgtgcagtgctgggattagcatgggaatgtcgtccaaggatggccttatattgtttcctcgcaatttgtggttggatttttctatcccatctttaaagtacatttggaatgtttattgta

SEQ ID NO: 57819 - DNA, 1043 bp, Zea Mays
gtaaattgagcacaaaattgtttaggggttacctgaaaacaacttatctgtgcaggggagtaatttggacttcttcaaaaaaaattatggacctagttgtgggacctaacctatggtatggcgatcgcacaagacttacacccaagcaagaagaagctgcgcttggtttgtcacgtgcctgtggctctggcattccagcatacatttgcaccatgaagaagtctaatgttgtcaagagacagatggtattttcaagacagttcagtaagcgacacatattcggtcgtctgggcacttatgggtgtgaaaccagagtttttgcaggcagggacctgttcggcagtaagctcaacttctcaatgatccatggaggactaaggcttcttggtggatggcccctctttgtgaagagccaccgtatcgaagcagaacacgtctgtgctttcatgttccaggaagaggaagagggcgaactgtcacttagggctgatttggtgatttggtgattagggatccctaggggatccatggggaggaatcatcttgcaattcaattttgaatagcaagaggatttcttcccctcgggatccccggtcaccaaatcagtccttagggtgcacgttctgggtactatgccagtgccaacaatctagcctttgcttgtttcgttgatgaggcacgggatgaacgtcgctaacgaattatgcatcagacattagtattggaaacaacaacatgtagctatctagattacagccttataggttgttttgttgttctatctagataactatgtatggacatattgttcttttgtgttggagggagtaagcgttagtgttttgagacacgaagattgttatttttagactgaccgctcgagttgtgcaaataggaactgaattagtggcattgttagcatgtacatgaaaacgtgatttgtgcagtgcagggattagcttgggaatgtcgtcctaaggatggccttatattgggcctgtttggttcaacttttttcttaccagcttttctgaaaatctgg

SEQ ID NO: 57820 - DNA, 1308 bp, Zea Mays
gtcgtatccggattccggtccctcccaagtcccaactgttcacctcccgccgccccctcgcgccgtcaaggcctccggaaccggtcgcaagcggcgtaggacccccgccgctacagagccctcgtccgtcgcacttcgccgccgcgtcggagtcatccagctcgtcgacgcctggcggggagatccccagtgcgaggggaacctccacgacgtcgtgggacctaacttatggtatggcgatcgcacaagacttacgcccaagcaagaagaagctgcgcttggtttgtcacgtgcctgtggctctggcattccagcatacatttgcaccatgaagaagtctaatgttgtcaagagacagatggtattttcaagacagttcagtaagcgacacatattcggtcgtctgggcacttatgggtgtgaaaccagagtttttgcaggcagggacctggtcggcagtaagctcaacttctcaatgatccatggagaactaaggcttcttggtggatggcccctctttgtgaagagccaccgtatcgaagcaggacacgtgtgtgctttcatgttccaggaagaggaagaggaagagggcgaactgtcacttagggtgcacgtgctgggtactatgccagtgccaacaatctagcctttgcttgtttcgttgatgaggcacgggatgaacgtcgctaacgaattatgcatcagacattagtattggaaacagcagcatgtggctatcttgctctggaattagttgttgttgttctatctagataactatgtatggacatattgttcttttgtgttggagagagtaagcgttagtgttttaagacacaaagattgttatttttagactgaccgctccagttgtgcaaataggaactgaattagtggcattgttagcatgtacatgaaaacgtgatttgtgcagtgctgggattagcttgggaatgtcgtccaaggatggccttatattgtttcctcgcaatttgtggttggatttttctatcccatctttaaagtacatttggaatgtttctaattcttcttggaagatgtttgagaagtgtaagatacagctatgtacgactatgattcctttcattgttttcatcaagttggtgtgaaattacccacctttgccatcgactacacaccttaccttggaaaacaaattattttttactgggtctcctgtccatcttgcacgtaccatctcactggcggcaatcatgcctgaccgttcatctcatcggtgctctggctatggcgacgagacgcgcgtccgcctacgctctgtactac

SEQ ID NO: 57821 - DNA, 949 bp, Zea Mays
tgaatgctgatgcccggcccggtgcatttactttactgatgtgcttggcggatctagagttcgattatatcaacccattcgattcatcctctcgaataaacaaggtcgtgatgccagaatttgtgttacaagcacttctcagcgtgctgttcctcttatctggccattgggcgatgctgttactttctctcccaatggtgtactacaattatacgctataccagcggcgacaacatctggtagatgtgacggagatatttaatcaacttggccgtgagaagaagcggcgcctttttaagatagtcagcctcatagttctcctgttcctgtccttgttctggatgatctggagtgtgttgtcggaggaggacgagtaggctgacaagatccggatggtagctcactctggccttgcaatcgttagttaggctatctggttcaatgtgaggcaaaaaaagaaaggaaaaaaaaggcaacatgcccccccctccccccaacagtgagcgagattgatgcaccaggctggttattgttcagttcagtggaagctccaactgttgtagcgtgcgccatgtgtatcgtgagccattcccgccatttgttgagcttgattggactgcgcatcaatactcacggggcaaagaaatagttacacagattaagtatgtgctctttttaatttgcataaaccctggtaagctgccaccatgtttgatggttcattgttttatcttttgctggagttcccctcgtatctcatgttaccccgccggcccgcccctagtcgtcattagcagtgcatttgctggttaaattgccgccacactgagtttccagcgcatcttgctggtactggatgcagctcatcaccgggtgctctgtgagcagctgtgctggaccaggaactgcagatctcactctttatcgctccctattttaaactttactc

SEQ ID NO: 57822 - DNA, 881 bp, Zea Mays
gcaacttactcgagggcacagtcgtcaaaagtggcagcagttgtacactgggagttatgcaacatttaagatgatggaaatggccaagaatagggcttgtacccaggcacaagaacgacttgaggaaacaaaggtgaggtagcgacaaatttttgttgctttggctccaaggtggtatcaaatgaagaaaaacaagagtgaagatgtgggaggacgtggtcctccatataggactttttgtttaaagttatcgggaggagtttttgcctcccttgatatgtgtactactcagcactcgttatagctctggtctgtaataagtaacttgatcctactttctaaataaatgtaagtttatgcaatcgcttccgcatctctatatctccgatgttctgtaatgtctgcaagacgggtgaaacgttcctggtaaggtaagaaagaagataccgaacttgtcgagtgattcaggaacatctacagggttgtctgatgtctgttggataaggacaactgtaggtgggcctaattacttgggaggttctgtcacactaatcgcccgaagggatggatcctaagggaaaggggatggtgatcaatgataaggagaaggagtccttcgccaatgagccaaaagatgacaagcctaccgactcgggctcggatcacaaacgaagagatgggaagaagaagaagacgaggcgcatcaaggagatcgtctactacgacgacagcgacgagtccacttcttcccaaaaggacaacgacgacaacgactacgacaaaagaaagacggttaattcaaacttttcttttgattactctcgtattccgcaaagtacaaatattcatttgctctccattccacttggcaaacctcctca

SEQ ID NO: 57823 - DNA, 2473 bp, Zea Mays
ctatcctcaacctcaggcatgggttcttgttacagtaccccaaaattaatttccagtttccccgacagaaaaaggtagaattaaaaatggggtatgtgttaatgatttgaccatttcaatcatatattaatgcagatgcgatgcagaaaaggactacgaagtacttcactcttttgttttcagaaaaagtattcgtcgtcttactattctgtactaaaaagaatcttgtaatagcattcgtaatggaaacgcaaaaaacttttgattggtactgttctcctgaaatttgacaacagcatgatgtgttgtggaattttgtacagtaaaaaatgacattatggcattgacatagcttggggaaaaatgtcatttccacacaaaatgttgcctgtcacttttgtttgctctaatcaaggtcaacctggtgttaaatctcataggtactgcaagaacatcattggttgtgacaattggtccatctccaagacatcgtggggaaactaccagtacaataatgtttggacaaaggaaaatgaaaggcaaaggaaacattttgacgatgaagttgagagaataagagctgaagctcaatgccgcattgctgaggctgaaagggaatgcaaaatcacattagagaatgagaaaatgaagtatcatgaagaatacttagactcaataagaatactggaggagaagtggaaagtacatcagcaatcacccaagaaacaaaataaagaggctgagtctacatccaatgatactggagaagtgcataatttactgcagaatgagaaaatgctacgtcaatcggctgaagatgaggccagtgacctcaagaatcaaatatcacactggaaaaagctggaggctacagctacagctgagataataaaactacagaaaatgctagatgctgaagctagccagaaagagaaacttgaagaagaaataggtgttttgagaagccagttattgcagatgagtatggaagccgatgagacaagaagtcttgataaaggagatgggccaggaaaaatatttcctgggtttagattcattgggtgtctcagactcgaggtttcacaacccagagagcaaggacaattggacagaagcaaccgattgccaaactctttgaacaagttgggttacaaaagatattgtcattgcttgaatctgaagaacctgatgtccgcgttcatgcagtgaaagttgtcgcaaatctggcagctgaagaggcaaatcaagaaaagattgtagaagcaggtggcctcacttccctgcttatgctacttaggagctctgaggatgagacaattcgtagagtagcagcaggagcaattgctaaccttgcaatgaatgaaacaaaccaagatcttatcatggctcaagggggtgtaaccttgttgtctatgacagcatctgatgcagaggatccacaaactcttagaatggtggccggagcaatagctaacctttgtggcaacgacaaactgcaaacacggttgcgggtagaaggtggaattaaagcgttgcttggaatggttaggtgtgggcaccctgatgtccttgctcaagttgcacgtggcattgcaaattttgcgaaatgtgaatctagagcagctactcaaggaaataagatggggaaatcactattaatcgatgatggagcgcttccctggattgtaaaaaatgctaacaacgaagctgccccaattaggcggcacatcgagcttgcactgtgtcatttggcacaacatgaagtaaattcaaaagacattatcaatgaaggtgccctatgggagcttgttcggatctcaagggactgttctcgagaagatataaggaatttggcataccggacattgacatccagccccactcttgaagcagagatgaggagattaggaataaaaatgtgataacagaacagagtgcagctggggctcacactatgaagttccatttctcgtgcacatacagaggtgtccgttgctatgggcgctggtaatcaagcacatcttcccttgatctacctgattttggcaggcatacacgggcaccgcactgactaatcagaagaggcaatggccttcgcaccaactttctcctcgagagttcatttttctttggtttgagggggcagttgaaaatctcgacagcactagcaattcgtttattttgtaaaataatgctagcatagcagatgttacctacccccaatgcagggtttgtaaattttttgctgtaaaaatatcaaggccaaaaggagtgctttcgcagtttgaagcataactgtattccctgatccctagaaggtttaacttttatttatttatttatttattgattgcagatgagccatatttgtaactgattttgtttctttcttaagcgttgacactgccatttcttttacactatctgctctcagatgatctatgtgagacacagcttttggaatgcgaagcga

SEQ ID NO: 57824 - DNA, 2422 bp, Zea Mays
ctacgaagtacttcactcttttgttttcagaaaaagtattcgtcgtcttactattctgtactaaaaagaatcttgtaatagcattcgtaatggaaacgcaaaaaacttttgattggtactgttctcctgaaatttgacaacagcatgatgtgttgtggaattttgtacagtaaaaaatgacattatggcattgacatagcttggggaaaaatgtcatttccacacaaaatgttgcctgtcacttttgtttgctctaatcaaggtcaacctggtgttaaatctcataggtactgcaagaacatcattggttgtgacaattggtccatctccaagacatcgtggggaaactaccagtacaataatgtttggacaaagggcaatgaaagttgagaacatggtgaaattgaaggaagagtttgattacaagagcttatgtaggaaacttgatattgaattggataaattaattgcagaaaatgaaaggcaaaggaaacattttgacgatgaagttgagagaataagagctgaagctcaatgccgcattgctgaggctgaaagggaatgcaaaatcacattagagaatgagaaaatgaagtatcatgaagaatacttagactcaataagaatactggaggagaagtggaaagtacatcagcaatcacccaagaaacaaaataaagaggctgagtctacatccaatgatactggagaagtgcataatttactgcagaatgagaaaatgctacgtcaatcggctgaagatgaggccagtgacctcaagaatcaaatatcacactggaaaaagctggaggctacagctacagctgagataataaaactacagaaaatgctagatgctgaagctagccagaaagagaaacttgaagaagaaataggtgttttgagaagccagttattgcagatgagtatggaagccgatgagacaagaagtcttgataaaggagatgggccaggaaaaatatttcctgggtttagattcattgggtgtctcagactcgaggtttcacaacccagagagcaaggacaattggacagaagcaaccgattgccaaactctttgaacaagttgggttacaaaagatattgtcattgcttgaatctgaagaacctgatgtccgcgttcatgcagtgaaagttgtcgcaaatctggcagctgaagaggcaaatcaagaaaagattgtagaagcaggtggcctcacttccctgcttatgctacttaggagctctgaggatgagacaattcgtagagtagcagcaggagcaattgctaaccttgcaatgaatgtgcagaaacaaaccaagatcttatcatggctcaagggggtgtaaccttgttgtctatgacagcatctgatgcagaggatccacaaactcttagaatggtggccggagcaatagctaacctttgtggcaacgacaaactgcaaacacggttgcgggtagaaggtggaattaaagcgttgcttggaatggttaggtgtgggcaccctgatgtccttgctcaagttgcacgtggcattgcaaattttgcgaaatgtgaatctagagcagctactcaaggaaataagatggggaaatcactattaatcgatgatggagcgcttccctggattgtaaaaaatgctaacaacgaagctgccccaattaggcggcacatcgagcttgcactgtgtcatttggcacaacatgaagtaaattcaaaagacattatcaatgaaggtgccctatgggagcttgttcggatctcaagggactgttctcgagaagatataaggaatttggcataccggacattgacatccagccccactcttgaagcagagatgaggagattaggaataaaaatgtgataacagaacagagtgcagctggggctcacactatgaagttccatttctcgtgcacatacagaggtgtccgttgctatgggcgctggtaatcaagcacatcttcccttgatctacctgattttggcaggcatacacgggcaccgcactgactaatcagaagaggcaatggccttcgcaccaactttctcctcgagagttcatttttctttggtttgagggggcagttgaaaatctcgacagcactagcaattcgtttattttgtaaaataatgctagcatagcagatgttacctacccccaatgcagggtttgtaaattttttgctgtaaaaatatcaaggccaaaaggagtgctttcgcagtttgaagcataactgtattccctgatccctagaaggtttaacttttatttatttatttatttattgattgcagatgagccatatttgtaactgattttgtttctttcttaagcgttgacactgccatttcttttacactatctgctctcagatgatctatgtgagacacagcttttggaatgcgaagcga

SEQ ID NO: 57825 - DNA, 2417 bp, Zea Mays
ctacgaagtacttcactcttttgttttcagaaaaagtattcgtcgtcttactattctgtactaaaaagaatcttgtaatagcattcgtaatggaaacgcaaaaaacttttgattggtactgttctcctgaaatttgacaacagcatgatgtgttgtggaattttgtacagtaaaaaatgacattatggcattgacatagcttggggaaaaatgtcatttccacacaaaatgttgcctgtcacttttgtttgctctaatcaaggtcaacctggtgttaaatctcataggtactgcaagaacatcattggttgtgacaattggtccatctccaagacatcgtggggaaactaccagtacaataatgtttggacaaagggcaatgaaagttgagaacatggtgaaattgaaggaagagtttgattacaagagcttatgtaggaaacttgatattgaattggataaattaattgcagaaaatgaaaggcaaaggaaacattttgacgatgaagttgagagaataagagctgaagctcaatgccgcattgctgaggctgaaagggaatgcaaaatcacattagagaatgagaaaatgaagtatcatgaagaatacttagactcaataagaatactggaggagaagtggaaagtacatcagcaatcacccaagaaacaaaataaagaggctgagtctacatccaatgatactggagaagtgcataatttactgcagaatgagaaaatgctacgtcaatcggctgaagatgaggccagtgacctcaagaatcaaatatcacactggaaaaagctggaggctacagctacagctgagataataaaactacagaaaatgctagatgctgaagctagccagaaagagaaacttgaagaagaaataggtgttttgagaagccagttattgcagatgagtatggaagccgatgagacaagaagtcttgataaaggagatgggccaggaaaaatatttcctgggtttagattcattgggtgtctcagactcgaggtttcacaacccagagagcaaggacaattggacagaagcaaccgattgccaaactctttgaacaagttgggttacaaaagatattgtcattgcttgaatctgaagaacctgatgtccgcgttcatgcagtgaaagttgtcgcaaatctggcagctgaagaggcaaatcaagaaaagattgtagaagcaggtggcctcacttccctgcttatgctacttaggagctctgaggatgagacaattcgtagagtagcagcaggagcaattgctaaccttgcaatgaatgaaacaaaccaagatcttatcatggctcaagggggtgtaaccttgttgtctatgacagcatctgatgcagaggatccacaaactcttagaatggtggccggagcaatagctaacctttgtggcaacgacaaactgcaaacacggttgcgggtagaaggtggaattaaagcgttgcttggaatggttaggtgtgggcaccctgatgtccttgctcaagttgcacgtggcattgcaaattttgcgaaatgtgaatctagagcagctactcaaggaaataagatggggaaatcactattaatcgatgatggagcgcttccctggattgtaaaaaatgctaacaacgaagctgccccaattaggcggcacatcgagcttgcactgtgtcatttggcacaacatgaagtaaattcaaaagacattatcaatgaaggtgccctatgggagcttgttcggatctcaagggactgttctcgagaagatataaggaatttggcataccggacattgacatccagccccactcttgaagcagagatgaggagattaggaataaaaatgtgataacagaacagagtgcagctggggctcacactatgaagttccatttctcgtgcacatacagaggtgtccgttgctatgggcgctggtaatcaagcacatcttcccttgatctacctgattttggcaggcatacacgggcaccgcactgactaatcagaagaggcaatggccttcgcaccaactttctcctcgagagttcatttttctttggtttgagggggcagttgaaaatctcgacagcactagcaattcgtttattttgtaaaataatgctagcatagcagatgttacctacccccaatgcagggtttgtaaattttttgctgtaaaaatatcaaggccaaaaggagtgctttcgcagtttgaagcataactgtattccctgatccctagaaggtttaacttttatttatttatttatttattgattgcagatgagccatatttgtaactgattttgtttctttcttaagcgttgacactgccatttcttttacactatctgctctcagatgatctatgtgagacacagcttttggaatgcgaagcga

SEQ ID NO: 57826 - DNA, 2021 bp, Zea Mays
ctacgaagtacttcactcttttgttttcagaaaaagtattcgtcgtcttactattctgtactaaaaagaatcttgtaatagcattcgtaatggaaacgcaaaaaacttttgattggtactgttctcctgaaatttgacaacagcatgatgtgttgtggaattttgtacagtaaaaaatgacattatggcattgacatagcttggggaaaaatgtcatttccacacaaaatgttgcctgtcacttttgtttgctctaatcaaggtcaacctggtgttaaatctcataggtactgcaagaacatcattggttgtgacaattggtccatctccaagacatcgtggggaaactaccagtacaataatgtttggacaaagggcaatgaaagttgagaacatggtgaaattgaaggaagagtttgattacaagagcttatgtaggaaacttgatattgaattggataaattaattgcagaaaatgaaaggcaaaggaaacattttgacgatgaagttgagagaataagagctgaagctcaatgccgcattgctgaggctgaaagggaatgcaaaatcacattagagaatgagaaaatgaagtatcatgaagaatacttagactcaataagaatactggaggagaagtggaaagtacatcagcaatcacccaagaaacaaaataaagaggctgagtctacatccaatgatactggagaagtgcataatttactgcagaatgagaaaatgctacgtcaatcggctgaagatgaggccagtgacctcaagaatcaaatatcacactggaaaaagctggaggctacagctacagctgagataataaaactacagaaaatgctagatgctgaagctagccagaaagagaaacttgaagaagaaataggtgttttgagaagccagttattgcagatgagtatggaagccgatgagacaagaagtcttgataaaggagatgggccaggaaaaatatttcctgggtttagattcattgggtgtctcagactcgaggtttcacaacccagagagcaaggacaattggacagaagcaaccgattgccaaactctttgaacaagttgggttacaaaagatattgtcattgcttgaatctgaagaacctgatgtccgcgttcatgcagtgaaagttgtcgcaaatctggcagctgaaggaaataagatggggaaatcactattaatcgatgatggagcgcttccctggattgtaaaaaatgctaacaacgaagctgccccaattaggcggcacatcgagcttgcactgtgtcatttggcacaacatgaagtaaattcaaaagacattatcaatgaaggtgccctatgggagcttgttcggatctcaagggactgttctcgagaagatataaggaatttggcataccggacattgacatccagccccactcttgaagcagagatgaggagattaggaataaaaatgtgataacagaacagagtgcagctggggctcacactatgaagttccatttctcgtgcacatacagaggtgtccgttgctatgggcgctggtaatcaagcacatcttcccttgatctacctgattttggcaggcatacacgggcaccgcactgactaatcagaagaggcaatggccttcgcaccaactttctcctcgagagttcatttttctttggtttgagggggcagttgaaaatctcgacagcactagcaattcgtttattttgtaaaataatgctagcatagcagatgttacctacccccaatgcagggtttgtaaattttttgctgtaaaaatatcaaggccaaaaggagtgctttcgcagtttgaagcataactgtattccctgatccctagaaggtttaacttttatttatttatttatttattgattgcagatgagccatatttgtaactgattttgtttctttcttaagcgttgacactgccatttcttttacactatctgctctcagatgatctatgtgagacacagcttttggaatgcgaagcga

SEQ ID NO: 57827 - DNA, 850 bp, Zea Mays
tggaaacgcaaaaaacttttgattggtactgttctcctgaaatttgacaacagcatgatgtgttgtggaattttgtacagtaaaaaatgacattatggcattgacatagcttggggaaaaatgtcatttccacacaaaatgttgcctgtcacttttgtttgctctaatcaaggtcaacctggtgttaaatctcataggtactgcaagaacatcattggttgtgacaattggtccatctccaagacatcgtggggaaactaccagtacaataatgtttggacaaagggcaatgaaagttgagaacatggtgaaattgaaggaagagtttgattacaagagcttatgtaggaaacttgatattgaattggataaattaattgcagaaaatgaaaggcaaaggaaacattttgacgatgaagttgagagaataagagctgaagctcaatgccgcattgctgaggctgaaagggaatgcaaaatcacattagagaatgagaaaatgaagtatcatgaagaatacttagactcaataagaatactggaggagaagtggaaagtacatcagcaatcacccaagaaacaaaataaagaggctgagtctacatccaatgatactggagaagtgcataatttactgcagaatgagaaaatgctacgtcaatcggctgaagatgaggccagtgacctcaagaatcaaatatcacactggaaaaagctggaggctacagctacagctgagataataaaactacagaaaatgctagatgctgaagctagccagaaagagaaacttgaagaagaaataggtgttttgagaagccagttattgcagatgagtatggaagccgat

SEQ ID NO: 57828 - DNA, 623 bp, Zea Mays
ataggtactgcaagaacatcattggttgtgacaattggtccatctccaagacatcgtggggaaactaccagtacaataatgtttggacaaagggcaatgaaagttgagaacatggtgaaattgaaggaagagtttgattacaagagcttatgtaggaaacttgatattgaattggataaattaattgcagaaaatgaaaggcaaaggaaacattttgacgatgaagttgagagaataagagctgaagctcaatgccgcattgctgaggctgaaagggaatgcaaaatcacattagagaataaagaggctgagtctacatccaatgatactggagaagtgcataatttactgcagaatgagaaaatgctacgtcaatcggctgaagatgaggccagtgacctcaagaatcaaatatcacactggaaaaagctggaggctacagctacagctgagataataaaactacagaaaatgctagatgctgaagctagccagaaagagaaacttgaagaagaaataggtgttttgagaagccagttattgcagatgagtatggaagccgatgagacaagaagtcttgataaaggagatgggccaggaaaaatatttcctgggtttagatt

SEQ ID NO: 57829 - DNA, 2131 bp, Zea Mays
ataggtactgcaagaacatcattggttgtgacaattggtccatctccaagacatcgtggggaaactaccagtacaataatgtttggacaaagggcaatgaaagttgagaacatggtgaaattgaaggaagagtttgattacaagagcttatgtaggaaacttgatattgaattggataaattaattgcagaaaatgaaaggcaaaggaaacattttgacgatgaagttgagagaataagagctgaagctcaatgccgcattgctgaggctgaaagggaatgcaaaatcacattagagaatgagaaaatgaagtatcatgaagaatacttagactcaataagaatactggaggagaagtggaaagtacatcagcaatcacccaagaaacaaaataaagaggctgagtctacatccaatgatactggagaagtgcataatttactgcagaatgagaaaatgctacgtcaatcggctgaagatgaggccagtgacctcaagaatcaaatatcacactggaaaaagctggaggctacagctacagctgagataataaaactacagaaaatgctagatgctgaagctagccagaaagagaaacttgaagaagaaataggtgttttgagaagccagttattgcagatgagtatggaagccgatgagacaagaagtcttgataaaggagatgggccaggaaaaatatttcctgggtttagattcattgggtgtctcagactcgaggtttcacaacccagagagcaaggacaattggacagaagcaaccgattgccaaactctttgaacaagttgggttacaaaagatattgtcattgcttgaatctgaagaacctgatgtccgcgttcatgcagtgaaagttgtcgcaaatctggcagctgaagaggcaaatcaagaaaagattgtagaagcaggtggcctcacttccctgcttatgctacttaggagctctgaggatgagacaattcgtagagtagcagcaggagcaattgctaaccttgcaatgaatgaaacaaaccaagatcttatcatggctcaagggggtgtaaccttgttgtctatgacagcatctgatgcagaggatccacaaactcttagaatggtggccggagcaatagctaacctttgtggcaacgacaaactgcaaacacggttgcgggtagaaggtggaattaaagcgttgcttggaatggttaggtgtgggcaccctgatgtccttgctcaagttgcacgtggcattgcaaattttgcgaaatgtgaatctagagcagctactcaaggaaataagatggggaaatcactattaatcgatgatggagcgcttccctggattgtaaaaaatgctaacaacgaagctgccccaattaggcggcacatcgagcttgcactgtgtcatttggcacaacatgtaaattcaaaagacattatcaatgaaggtgccctatgggagcttgttcggatctcaagggactgttctcgagaagatataaggaatttggcataccggacattgacatccagccccactcttgaagcagagatgaggagattaggaataaaaatgtgataacagaacagagtgcagctggggctcacactatgaagttccatttctcgtgcacatacagaggtgtccgttgctatgggcgctggtaatcaagcacatcttcccttgatctacctgattttggcaggcatacacgggcaccgcactgactaatcagaagaggcaatggccttcgcaccaactttctcctcgagagttcatttttctttggtttgagggggcagttgaaaatctcgacagcactagcaattcgtttattttgtaaaataatgctagcatagcagatgttacctacccccaatgcagggtttgtaaattttttgctgtaaaaatatcaaggccaaaaggagtgctttcgcagtttgaagcataactgtattccctgatccctagaaggtttaacttttatttatttatttatttattgattgcagatgagccatatttgtaactgattttgtttctttcttaagcgttgacactgccatttcttttacactatctgctctcagatgatctatgtgagacacagcttttggaatgcgaagcga

SEQ ID NO: 57830 - DNA, 2037 bp, Zea Mays
aggtactgcaagaacatcattggttgtgacaattggtccatctccaagacatcgtggggaaactaccagtacaataatgtttggacaaaggaaaatgaaaggcaaaggaaacattttgacgatgaagttgagagaataagagctgaagctcaatgccgcattgctgaggctgaaagggaatgcaaaatcacattagagaatgagaaaatgaagtatcatgaagaatacttagactcaataagaatactggaggagaagtggaaagtacatcagcaatcacccaagaaacaaaataaagaggctgagtctacatccaatgatactggagaagtgcataatttactgcagaatgagaaaatgctacgtcaatcggctgaagatgaggccagtgacctcaagaatcaaatatcacactggaaaaagctggaggtgctacagctacagctgagataataaaactacagaaaatgctagatgctgaagctagccagaaagagaaacttgaagaagaaataggtgttttgagaagccagttattgcagatgagtatggaagccgatgagacaagaagtcttgataaaggagatgggccaggaaaaatatttcctgggtttagattcattgggtgtctcagactcgaggtttcacaacccagagagcaaggacaattggacagaagcaaccgattgccaaactctttgaacaagttgggttacaaaagatattgtcattgcttgaatctgaagaacctgatgtccgcgttcatgcagtgaaagttgtcgcaaatctggcagctgaagaggcaaatcaagaaaagattgtagaagcaggtggcctcacttccctgcttatgctacttaggagctctgaggatgagacaattcgtagagtagcagcaggagcaattgctaaccttgcaatgaatgaaacaaaccaagatcttatcatggctcaagggggtgtaaccttgttgtctatgacagcatctgatgcagaggatccacaaactcttagaatggtggccggagcaatagctaacctttgtggcaacgacaaactgcaaacacggttgcgggtagaaggtggaattaaagcgttgcttggaatggttaggtgtgggcaccctgatgtccttgctcaagttgcacgtggcattgcaaattttgcgaaatgtgaatctagagcagctactcaaggaaataagatggggaaatcactattaatcgatgatggagcgcttccctggattgtaaaaaatgctaacaacgaagctgccccaattaggcggcacatcgagcttgcactgtgtcatttggcacaacatgaagtaaattcaaaagacattatcaatgaaggtgccctatgggagcttgttcggatctcaagggactgttctcgagaagatataaggaatttggcataccggacattgacatccagccccactcttgaagcagagatgaggagattaggaataaaaatgtgataacagaacagagtgcagctggggctcacactatgaagttccatttctcgtgcacatacagaggtgtccgttgctatgggcgctggtaatcaagcacatcttcccttgatctacctgattttggcaggcatacacgggcaccgcactgactaatcagaagaggcaatggccttcgcaccaactttctcctcgagagttcatttttctttggtttgagggggcagttgaaaatctcgacagcactagcaattcgtttattttgtaaaataatgctagcatagcagatgttacctacccccaatgcagggtttgtaaattttttgctgtaaaaatatcaaggccaaaaggagtgctttcgcagtttgaagcataactgtattccctgatccctagaaggtttaacttttatttatttatttatttattgattgcagatgagccatatttgtaactgattttgtttctttcttaagcgttgacactgccatttcttttacactatctgctctcagatgatctatgtgagacacagcttttggaatgcgaagcga

SEQ ID NO: 57831 - DNA, 551 bp, Zea Mays
gcaagaacatcattggttgtgacaattggtccatctccaagacatcgtggggaaactaccagtacaataatgtttggacaaaggaaaatgaaaggcaaaggaaacattttgacgatgaagttgagagaataagagctgaagctcaatgccgcattgctgaggctgaaagggaatgcaaaatcacattagagaatgagaaaatgaagtatcatgaagaatacttagactcaataagaatactggaggagaagtggaaagtacatcagcaatcacccaagaaacaaaataaagaggctgagtctacatccaatgatactggagaagtgcataatttactgcagaatgagaaaatgctacgtcaatcggctgaagatgaggccagtgacctcaagaatcaaatatcacactggaaaaagctggaggctacagctacagctgagataataaaactacagaaaatgctagatgctgaagctagccagaaagagaaacttgaagaagaaataggtgttttgagaagccagttattgcagatgagtatggaagccgat

SEQ ID NO: 57832 - DNA, 1555 bp, Zea Mays
aaacaccaggcgccgtcaagaaaaaaaaaacagaggaaagaaaaaaccgtcagagcgacgttagtcggctcagctgtagtgtagttgcaggtgttcgccggcacacgcgcgtggccgcgaaccctagatgacaccggcgaacggcgccccagcgcgggcagcggaggcgggcccccacgaggtggagtcggaggccgacgcgttccggcgccaggtcgacgacctcgtctcgaagaccgacgtgctggagcggcgggtgaaagaggtggcggacttctacgatggcaaaaagcacggaagcggcgggaggaagggtggtggtggtggcaggtatggggcatcctcgaggggaatgccggaccttatgcgccagttcggcgtgcttttgaaagagatcacctctcataaagatgcatggccatttctggagccggtggatgttgtaactctacagcttcctgactatcacaacattattacccaacctatggacttctctaccatccaaaagaaaatggaaaggaaggatggtacttgttacaccaatgttagagaaatatgttctgatgttcgattaatttttgccaatgcgatgaagtacaatgatgatcaaaatgtcatccacttgatggctaaatcattgcttgagaaatttgaagagaagtggctccattttcttcctaaagttgagagtgaggaaaaaagacaaaaggaggaggaatcaaagggtgttgcagccacaaatacttctcgagaagttgcaatcgtaaaattagcaaaagacactgatgatgagatcaacaagaagctggaggagctccggaaaatggtggttcacagatgcaggaaaatgacgacagacgagaagaggaagctgggtgcaggtatctgtcacttgtctccagatgatcttagcaaggcgctagagattgtcgcacaagacaatcctagcttccagactaaagcagaagaagtggatcttgatatggatgcccagagcgagacaactctatggaggctgaaattctttgtgagggaagcgctggaacgacaggccaacgttgcctctgggaagatggacgaaaacgccaagagaaagagggagatatgcaatgctctggccaaaaccacctcgagacggatcaagaagcagccctagccatcttccatatctttcactcgcgtcctctgattgtttagaagttctttttttgatactagccaccagctttgtgaaacgttttcctgcattttttttgtgatgtgtatatagtagtatagtgaactgtccagtccagtaacaagtgatttcgtgtgtaaccatgagctggtcgcattcgcgtcccctctgatccaacaacaaacattgtctcacaatgtgattgattgtagaagcaagcttttgtcacagggcgatgttgctcacttgtggaatcagatgatgcatacatttcgtaactgttcattcattctccaccttggcttgaaaattaaggtgagaaggcctgcggatttacatgttaccgttattcttgtttcttgtggtatgttgtaa

SEQ ID NO: 57833 - DNA, 1384 bp, Zea Mays
aaaaaaaaacagaggaaagaaaaaaccgtcagagcgacgttagtcggctcagctgtagtgtagttgcaggtgttcgccggcacacgcgcgtggccgcgaaccctagatgacaccggcgaacggcgccccagcgcgggcagcggaggcgggcccccacgaggtggagtcggaggccgacgcgttccggcgccaggtcgacgacctcgtctcgaagaccgacgtgatcacctctcataaagatgcatggccatttctggagccggtggatgttgtaactctacagcttcctgactatcacaacattattacccaacctatggacttctctaccatccaaaagaaaatggaaaggaaggatggtacttgttacaccaatgttagagaaatatgttctgatgttcgattaatttttgccaatgcgatgaagtacaatgatgatcaaaatgtcatccacttgatggctaaatcattgcttgagaaatttgaagagaagtggctccattttcttcctaaagttgagagtgaggaaaaaagacaaaaggaggaggaatcaaagggtgttgcagccacaaatacttctcgagaagttgcaatcgtaaaattagcaaaagacactgatgatgagatcaacaagaagctggaggagctccggaaaatggtggttcacagatgcaggaaaatgacgacagacgagaagaggaagctgggtgcaggtatctgtcacttgtctccagatgatcttagcaaggcgctagagattgtcgcacaagacaatcctagcttccagactaaagcagaagaagtggatcttgatatggatgcccagagcgagacaactctatggaggctgaaattctttgtgagggaagcgctggaacgacaggccaacgttgcctctgggaagatggacgaaaacgccaagagaaagagggagatatgcaatgctctggccaaaaccacctcgagacggatcaagaagcagccctagccatcttccatatctttcactcgcgtcctctgattgtttagaagttctttttttgatactagccaccagctttgtgaaacgttttcctgcattttttttgtgatgtgtatatagtagtatagtgaactgtccagtccagtaacaagtgatttcgtgtgtaaccatgagctggtcgcattcgcgtcccctctgatccaacaacaaacattgtctcacaatgtgattgattgtagaagcaagcttttgtcacagggcgatgttgctcacttgtggaatcagatgatgcatacatttcgtaactgttcattcattctccaccttggcttgaaaattaaggtgagaaggcctgcggatttacatgttaccgttattcttgtttcttgtggtatgttgtaa

SEQ ID NO: 57834 - DNA, 172 bp, Zea Mays
caacactcattaggtgttcgatgatatgctcgaactggtggccgtcttcgttcttgctgaaatcgagtcggagcatgatgtggttcgttacacgtgatgcgaaggacaagagccgagttgatcccaaaatgatgctagtgacgaacctaaggatggatgatctgatagagtg

SEQ ID NO: 57835 - DNA, 2200 bp, Zea Mays
tgcacgtcgattggcggtagcctgcctaaccatggcggcgggcgtcctgttcatcatccttggcttcctcctggtgctgccgtcagcaacggcaatagggcaggtctgcggcaacgccggcaactacacggccaacagcacctaccagtccaacctggcctctctcgccgccgcgctcccagccaacacctctacctctccccaactgttcgccaccgccaccgccggccaatcccccgacgcggtctacgcgctcgcgctctgccgcggcgacaccgccagcagcagcaacctcaccgggtgcgccgcctgcgtcaagaactcgttcgcctacgcgcagaggacgtgcccccacgccaaggccgccagcgtgtacgacgacgactgcctcctcggcttctccagcagcgacatcctcatccccgccaacaacatgagcacgctgttccagtactggaacccggcgagcatccccggcggcgacgcctccatggtgagcgccgacgtgaaggacctgctgacgcagaccgctagggcggcggccagcagcccgcggaggttcgccaccgccttcatggacgcatccggcagctccatcccgacgctctactcgctggcccagtgcacgcccgacctgtccgctggcgactgcctggcctgcctccagcggctcgtcagcctgctcaacgccaccacgtccgtgcgcctgggcgggcgggtcctcgtgctgcgctgcaacttcaggttcgagaacatgatgttctacgacggcgcgcccacgacgcgcgtcaccacgccctcgtcgtcagggcccccggcgccaccgtttccggcgccgacgacgacggataagagagctgctgggacgaagccctgggtagttgccgtgtctgtactctgtagcacctcctctagcggtagtagcagcactctgcttcgtcttgtactgccgctggcgaagcagaaggtacacaaaaggtaggcctagattactacgaaagcctacttataacagctcgcgagggggagacgaagtagactgggaaatggaggcgcacctctccgagttttgggtctttgacttgcatcagatattggaggccacagacaacttctccgaagaaaataagcttggcgaaggtgggtttggccccgtctacaagggccagttgcccgagggggttgagatagctgtcaaaagactcgcttcacattcaggacaaggtttcgtagagttcaaaaacgaggtgcagctcatagcaaagctccagcacaggaatctggtccggcacctgggatgttgctcgcaggaggaggagaagattctggtctacgaatacttgccaaacaaaagcctggacttgtttatctttgcagacgaagacagaagatcgttgctggactggaacaaccgtctggcgataatcgaaggaacggcagaggggcttctctacctacacaagcactcccggctgcgtgtcatacaccgagatcttaaaccgagcaacatcctcttggacagcgagatgaaccctaagatctcggacttcgggctagcaaagatattcagctccaacgacgtcagcagcgaaggaggcaccactacacggagagtggtcggtacatacttcggcgtcctcgttcttgagatcatcagtgggaaaaggaattccggcatccatgagtgcggagatttcatcaatatccttggatatacatggcagctctacgaagagggaaggtggagggagctagttgatgcttcgttgctatccatgcagcaccactcagatgaaataatgatggtgataatgaggtgcatgaacatcggattgctttgcgtgcaggagaatgcggctgatcgaccaaccatgttggatgttgttgccatgctgagtaccaagactaaggtcctggataagccgaaccacccggcgtatttcaatgtgcgggtagggaacgaagaggcgtccactactgctactactatgtcgtgcagtgtgtcgatgagataatataatgtatccatatatagtttgtgttttcaaggctgccatatcaatatttatttatctacataatataatgtatccatactttcatcctatctctctcatatatttttttattaaattgcatgtcatgtcatcctgtatatttatgtgacatactatttaatgagaatggtatatatatatat

SEQ ID NO: 57836 - DNA, 2226 bp, Zea Mays
tgcacgtcgattggcggtagcctgcctaaccatggcggcgggcgtcctgttcatcatccttggcttcctcctggtgctgccgtcagcaacggcaatagggcaggtctgcggcaacgccggcaactacacggccaacagcacctaccagtccaacctggcctctctcgccgccgcgctcccagccaacacctctacctctccccaactgttcgccaccgccaccgccggccaatcccccgacgcggtctacgcgctcgcgctctgccgcggcgacaccgccagcagcagcaacctcaccgggtgcgccgcctgcgtcaagaactcgttcgcctacgcgcagaggacgtgcccccacgccaaggccgccagcgtgtacgacgacgactgcctcctcggcttctccagcagcgacatcctcatccccgccaacaacatgagcacgctgttccagtactggaacccggcgagcatccccggcggcgacgcctccatggtgagcgccgacgtgaaggacctgctgacgcagaccgctagggcggcggccagcagcccgcggaggttcgccaccgccttcatggacgcatccggcagctccatcccgacgctctactcgctggcccagtgcacgcccgacctgtccgctggcgactgcctggcctgcctccagcggctcgtcagcctgctcaacgccaccacgtccgtgcgcctgggcgggcgggtcctcgtgctgcgctgcaacttcaggttcgagaacatgatgttctacgacggcgcgcccacgacgcgcgtcaccacgccctcgtcgtcagggcccccggcgccaccgtttccggcgccgacgacgacggataagagagctgctgggacgaagccctgggtagttgccgtgtctgtactctgtagcacctcctctagcggtagtagcagcactctgcttcgtcttgtactgccgctggcgaagcagaaggtacacaaaagctcgcgagggggagacgaagtagactgggaaatggaggcgcacctctccgagttttgggtctttgacttgcatcagatattggaggccacagacaacttctccgaagaaaataagcttggcgaaggtgggtttggccccgtctacaagggccagttgcccgagggggttgagatagctgtcaaaagactcgcttcacattcaggacaaggtttcgtagagttcaaaaacgaggtgcagctcatagcaaagctccagcacaggaatctggtccggcacctgggatgttgctcgcaggaggaggagaagattctggtctacgaatacttgccaaacaaaagcctggacttgtttatctttgcagacgaagacagaagatcgttgctggactggaacaaccgtctggcgataatcgaaggaacggcagaggggcttctctacctacacaagcactcccggctgcgtgtcatacaccgagatcttaaaccgagcaacatcctcttggacagcgagatgaaccctaagatctcggacttcgggctagcaaagatattcagctccaacgacgtcagcagcgaaggaggcaccactacacggagagtggtcggtacatacggctatatggctcccgagtatgcctccgagggcctcttctctgtcaaatccgacgtgttcagcttcggcgtcctcgttcttgagatcatcagtgggaaaaggaattccggcatccatgagtgcggagatttcatcaatatccttggatatacatggcagctctacgaagagggaaggtggagggagctagttgatgcttcgttgctatccatgcagcaccactcagatgaaataatgatggtgataatgaggtgcatgaacatcggattgctttgcgtgcaggagaatgcggctgatcgaccaaccatgttggatgttgttgccatgctgagtaccaagactaaggtcctggataagccgaaccacccggcgtatttcaatgtgcgggtagggaacgaagaggcgtccactactgctactactatgtcgtgcagtgtgtcgatgagataatataatgtatccatatatagtttgtgttttcaaggctgccatatcaatatttatttatctacataatataatgtatccatactttcatcctatctctctcatatatttttttattaaattgcatgtcatgtcatcctgtatatttatgtgacatactatttaatgagaatggtatatatatatat

SEQ ID NO: 57837 - DNA, 2094 bp, Zea Mays
tgcacgtcgattggcggtagcctgcctaaccatggcggcgggcgtcctgttcatcatccttggcttcctcctggtgctgccgtcagcaacggcaatagggcaggtctgcggcaacgccggcaactacacggccaacagcacctaccagtccaacctggcctctctcgccgccgcgctcccagccaacacctctacctctccccaactgttcgccaccgccaccgccggccaatcccccgacgcggtctacgcgctcgcgctctgccgcggcgacaccgccagcagcagcaacctcaccgggtgcgccgcctgcgtcaagaactcgttcgcctacgcgcagaggacgtgcccccacgccaaggccgccagcgtgtacgacgacgactgcctcctcggcttctccagcagcgacatcctcatccccgccaacaacatgagcacgctgttccagtactggaacccggcgagcatccccggcggcgacgcctccatggtgagcgccgacgtgaaggacctgctgacgcagaccgctagggcggcggccagcagcccgcggaggttcgccaccgccttcatggacgcatccggcagctccatcccgacgctctactcgctggcccagtgcacgcccgacctgtccgctggcgactgcctggcctgcctccagcggctcgtcagcctgctcaacgccaccacgtccgtgcgcctgggcgggcgggtcctcgtgctgcgctgcaacttcaggttcgagaacatgatgttctacgacggcgcgcccacgacgcgcgtcaccacgccctcgtcgtcagggcccccggcgccaccgtttccggcgccgacgacgacggataagagagctgctgggacgaagccctgggtagttgccgtgtctgtactctgtagcacctcctctagcggtagtagcagcactctgcttcgtcttgtactgccgctggcgaagcagaaggtacacaaaagctcgcgagggggagacgaagtagactgggaaatggaggcgcacctctccgagttttgggtctttgacttgcatcagatattggaggccacagacaacttctccgaagaaaataagcttggcgaaggtgggtttggccccgtctacaagggccagttgcccgagggggttgagatagctgtcaaaagactcgcttcacattcaggacaaggtttcgtagagttcaaaaacgaggtgcagctcatagcaaagctccagcacaggaatctggtccggcacctgggatgttgctcgcaggaggaggagaagattctggtctacgaatacttgccaaacaaaagcctggacttgtttatctttgcagacgaagacagaagatcgttgctggactggaacaaccgtctggcgataatcgaaggaacggcagaggggcttctctacctacacaagcactcccggctgcgtgtcatacaccgagatcttaaaccgagcaacatcctcttggacagcgagatgaaccctaagatctcggacttcgggctagcaaagatattcagctccaacgacgtcagcagcgaaggaggcaccactacacggagagtggtcggtacatacggctatatggctcccgagtatgcctccgagggcctcttctctgtcaaatccgacgtgttcagcttcggcgtcctcgttcttgagatcatcagtgggaaaaggaattccggcatccatgagtgcggagatttcatcaatatccttggatatgagaatgcggctgatcgaccaaccatgttggatgttgttgccatgctgagtaccaagactaaggtcctggataagccgaaccacccggcgtatttcaatgtgcgggtagggaacgaagaggcgtccactactgctactactatgtcgtgcagtgtgtcgatgagataatataatgtatccatatatagtttgtgttttcaaggctgccatatcaatatttatttatctacataatataatgtatccatactttcatcctatctctctcatatatttttttattaaattgcatgtcatgtcatcctgtatatttatgtgacatactatttaatgagaatggtatatatatatat

SEQ ID NO: 57838 - DNA, 2131 bp, Zea Mays
tgcacgtcgattggcggtagcctgcctaaccatggcggcgggcgtcctgttcatcatccttggcttcctcctggtgctgccgtcagcaacggcaatagggcaggtctgcggcaacgccggcaactacacggccaacagcacctaccagtccaacctggcctctctcgccgccgcgctcccagccaacacctctacctctccccaactgttcgccaccgccaccgccggccaatcccccgacgcggtctacgcgctcgcgctctgccgcggcgacaccgccagcagcagcaacctcaccgggtgcgccgcctgcgtcaagaactcgttcgcctacgcgcagaggacgtgcccccacgccaaggccgccagcgtgtacgacgacgactgcctcctcggcttctccagcagcgacatcctcatccccgccaacaacatgagcacgctgttccagtactggaacccggcgagcatccccggcggcgacgcctccatggtgagcgccgacgtgaaggacctgctgacgcagaccgctagggcggcggccagcagcccgcggaggttcgccaccgccttcatggacgcatccggcagctccatcccgacgctctactcgctggcccagtgcacgcccgacctgtccgctggcgactgcctggcctgcctccagcggctcgtcagcctgctcaacgccaccacgtccgtgcgcctgggcgggcgggtcctcgtgctgcgctgcaacttcaggttcgagaacatgatgttctacgacggcgcgcccacgacgcgcgtcaccacgccctcgtcgtcagggcccccggcgccaccgtttccggcgccgacgacgacggataagagagctgctgggacgaagccctgggtagttgccgtgtctgtactctgtagcacctcctctagcggtagtagcagcactctgcttcgtcttgtactgccgctggcgaagcagaaggtacacaaaaggtaggcctagattactacgaaagcctacttataacagctcgcgagggggagacgaagtagactgggaaatggaggcgcacctctccgagttttgggtctttgacttgcatcagatattggaggccacagacaacttctccgaagaaaataagcttggcgaaggtgggtttggccccgtctacaagggccagttgcccgagggggttgagatagctgtcaaaagactcgcttcacattcaggacaaggtttcgtagagttcaaaaacgaggtgcagctcatagcaaagctccagcacaggaatctggtccggcacctgggatgttgctcgcaggaggaggagaagattctggtctacgaatacttgccaaacaaaagcctggacttgtttatctttgcagacgaagacagaagatcgttgctggactggaacaaccgtctggcgataatcgaaggaacggcagaggggcttctctacctacacaagcactcccggctgcgtgtcatacaccgagatcttaaaccgagcaacatcctcttggacagcgagatgaaccctaagatctcggacttcgggctagcaaagatattcagctccaacgacgtcagcagcgaaggaggcaccactacacggagagtggtcggtacatacggctatatggctcccgagtatgcctccgagggcctcttctctgtcaaatccgacgtgttcagcttcggcgtcctcgttcttgagatcatcagtgggaaaaggaattccggcatccatgagtgcggagatttcatcaatatccttggatatgagaatgcggctgatcgaccaaccatgttggatgttgttgccatgctgagtaccaagactaaggtcctggataagccgaaccacccggcgtatttcaatgtgcgggtagggaacgaagaggcgtccactactgctactactatgtcgtgcagtgtgtcgatgagataatataatgtatccatatatagtttgtgttttcaaggctgccatatcaatatttatttatctacataatataatgtatccatactttcatcctatctctctcatatatttttttattaaattgcatgtcatgtcatcctgtatatttatgtgacatactatttaatgagaatggtatatatatatat

SEQ ID NO: 57839 - DNA, 2068 bp, Zea Mays
tgcacgtcgattggcggtagcctgcctaaccatggcggcgggcgtcctgttcatcatccttggcttcctcctggtgctgccgtcagcaacggcaatagggcaggtctgcggcaacgccggcaactacacggccaacagcacctaccagtccaacctggcctctctcgccgccgcgctcccagccaacacctctacctctccccaactgttcgccaccgccaccgccggccaatcccccgacgcggtctacgcgctcgcgctctgccgcggcgacaccgccagcagcagcaacctcaccgggtgcgccgcctgcgtcaagaactcgttcgcctacgcgcagaggacgtgcccccacgccaaggccgccagcgtgtacgacgacgactgcctcctcggcttctccagcagcgacatcctcatccccgccaacaacatgagcacgctgttccagtactggaacccggcgagcatccccggcggcgacgcctccatggtgagcgccgacgtgaaggacctgctgacgcagaccgctagggcggcggccagcagcccgcggaggttcgccaccgccttcatggacgcatccggcagctccatcccgacgctctactcgctggcccagtgcacgcccgacctgtccgctggcgactgcctggcctgcctccagcggctcgtcagcctgctcaacgccaccacgtccgtgcgcctgggcgggcgggtcctcgtgctgcgctgcaacttcaggttcgagaacatgatgttctacgacggcgcgcccacgacgcgcgtcaccacgccctcgtcgtcagggcccccggcgccaccgtttccggcgccgacgacgacggataagagagctgctgggacgaagccctgggtagttgccgtgtctgtactctgtagcacctcctctagcggtagtagcagcactctgcttcgtcttgtactgccgctggcgaagcagaaggtacacaaaaggtaggcctagattactacgaaagcctacttataacagctcgcgagggggagacgaagtagactgggaaatggaggcgcacctctccgagttttgggtctttgacttgcatcagatattggaggccacagacaacttctccgaagaaaataagcttggcgaaggtgggtttggccccgtctacaagggccagttgcccgagggggttgagatagctgtcaaaagactcgcttcacattcaggacaaggtttcgtagagttcaaaaacgaggtgcagctcatagcaaagctccagcacaggaatctggtccggcacctgggatgttgctcgcaggaggaggagaagattctggtctacgaatacttgccaaacaaaagcctggacttgtttatctttgcagacgaagacagaagatcgttgctggactggaacaaccgtctggcgataatcgaaggaacggcagaggggcttctctacctacacaagcactcccggctgcgtgtcatacaccgagatcttaaaccgagcaacatcctcttggacagcgagatgaaccctaagatctcggacttcgggctagcaaagatattcagctccaacgacgtcagcagcgaaggaggcaccactacacggagagtggtcggtacatacttcggcgtcctcgttcttgagatcatcagtgggaaaaggaattccggcatccatgagtgcggagatttcatcaatatccttggatatgagaatgcggctgatcgaccaaccatgttggatgttgttgccatgctgagtaccaagactaaggtcctggataagccgaaccacccggcgtatttcaatgtgcgggtagggaacgaagaggcgtccactactgctactactatgtcgtgcagtgtgtcgatgagataatataatgtatccatatatagtttgtgttttcaaggctgccatatcaatatttatttatctacataatataatgtatccatactttcatcctatctctctcatatatttttttattaaattgcatgtcatgtcatcctgtatatttatgtgacatactatttaatgagaatggtatatatatatat

SEQ ID NO: 57840 - DNA, 2263 bp, Zea Mays
tgcacgtcgattggcggtagcctgcctaaccatggcggcgggcgtcctgttcatcatccttggcttcctcctggtgctgccgtcagcaacggcaatagggcaggtctgcggcaacgccggcaactacacggccaacagcacctaccagtccaacctggcctctctcgccgccgcgctcccagccaacacctctacctctccccaactgttcgccaccgccaccgccggccaatcccccgacgcggtctacgcgctcgcgctctgccgcggcgacaccgccagcagcagcaacctcaccgggtgcgccgcctgcgtcaagaactcgttcgcctacgcgcagaggacgtgcccccacgccaaggccgccagcgtgtacgacgacgactgcctcctcggcttctccagcagcgacatcctcatccccgccaacaacatgagcacgctgttccagtactggaacccggcgagcatccccggcggcgacgcctccatggtgagcgccgacgtgaaggacctgctgacgcagaccgctagggcggcggccagcagcccgcggaggttcgccaccgccttcatggacgcatccggcagctccatcccgacgctctactcgctggcccagtgcacgcccgacctgtccgctggcgactgcctggcctgcctccagcggctcgtcagcctgctcaacgccaccacgtccgtgcgcctgggcgggcgggtcctcgtgctgcgctgcaacttcaggttcgagaacatgatgttctacgacggcgcgcccacgacgcgcgtcaccacgccctcgtcgtcagggcccccggcgccaccgtttccggcgccgacgacgacggataagagagctgctgggacgaagccctgggtagttgccgtgtctgtactctgtagcacctcctctagcggtagtagcagcactctgcttcgtcttgtactgccgctggcgaagcagaaggtacacaaaaggtaggcctagattactacgaaagcctacttataacagctcgcgagggggagacgaagtagactgggaaatggaggcgcacctctccgagttttgggtctttgacttgcatcagatattggaggccacagacaacttctccgaagaaaataagcttggcgaaggtgggtttggccccgtctacaagggccagttgcccgagggggttgagatagctgtcaaaagactcgcttcacattcaggacaaggtttcgtagagttcaaaaacgaggtgcagctcatagcaaagctccagcacaggaatctggtccggcacctgggatgttgctcgcaggaggaggagaagattctggtctacgaatacttgccaaacaaaagcctggacttgtttatctttgcagacgaagacagaagatcgttgctggactggaacaaccgtctggcgataatcgaaggaacggcagaggggcttctctacctacacaagcactcccggctgcgtgtcatacaccgagatcttaaaccgagcaacatcctcttggacagcgagatgaaccctaagatctcggacttcgggctagcaaagatattcagctccaacgacgtcagcagcgaaggaggcaccactacacggagagtggtcggtacatacggctatatggctcccgagtatgcctccgagggcctcttctctgtcaaatccgacgtgttcagcttcggcgtcctcgttcttgagatcatcagtgggaaaaggaattccggcatccatgagtgcggagatttcatcaatatccttggatatacatggcagctctacgaagagggaaggtggagggagctagttgatgcttcgttgctatccatgcagcaccactcagatgaaataatgatggtgataatgaggtgcatgaacatcggattgctttgcgtgcaggagaatgcggctgatcgaccaaccatgttggatgttgttgccatgctgagtaccaagactaaggtcctggataagccgaaccacccggcgtatttcaatgtgcgggtagggaacgaagaggcgtccactactgctactactatgtcgtgcagtgtgtcgatgagataatataatgtatccatatatagtttgtgttttcaaggctgccatatcaatatttatttatctacataatataatgtatccatactttcatcctatctctctcatatatttttttattaaattgcatgtcatgtcatcctgtatatttatgtgacatactatttaatgagaatggtatatatatatat

SEQ ID NO: 57841 - DNA, 1489 bp, Zea Mays
cgaccccgtctctgctcttctctctcttcttctccgatccgcagcccaatcacgacgaaaagagaagagaagcctccgtccctgcctccccgctctgctcctcctcctcctcctcctccctatttaacccgtctccaccggccattgctctctcccttcccgaagtcgccggagccacacgcattcccctgcctcgcacttccccctcctatttaccgcccgcgtcgccccccgccgcacgccttcccacccccgcgcctgcctctgcctgcctgctccccgacgccggggggccccacaacgatccggccccggccccgcgcggtcacagcaagccgggacatggcgcgcggcggcatcgcccgcctactcgccacgctcctcctcttcctcctgctcgccacgcccctcgcagacggagcttccgaggcagaggcgggcctcgcgcagggcgcgtccgaggcggcggcgccggacgcgggcgcggacgcgcagcagcagcacctcctgccgcggcccctcgtcatcgagctcccgtcgtcgcgggccgaggacgaggacgagcccggcgccgacgccgtgccgccggacgtgcgctgcgccagctggcggctggcggcggaggccaacaacctcgcgccgtggagggcggtgccgccggagtgcgcgccgcacgtgcgggactacgtcaccggcgtcgcctaccgctccgacctcgacctcgtggcgcgggagtccgccgcctacgcgcgcgccgccgcgccgctcggcgccgacgggcgcgacgcctgggtcttcgacgtcgacgagaccctgctctccaacctcccgtactacgccgagcacggctacggggctgagttgttcgaccaccacaagtttgacgagtgggtggagaggggcgaggcggccgccatcccctcgagcttgaagctgtacaatgaggttcgcgagctggggttcaagaccttcctgctcacgggcagaagcgaggggcaccgaggcgtcacggtggacaacctcaacaaacaggggttccatgactgggaaaagctcgtactcaggtgaccgcaagaaaacagcgacagtctacaaatcagaaaagaggaaggagatggaacaagagggttacaggatcctaggcaactctggcgaccaatggagcgacctgctggggtcttccatgggtgcccgctctttcaagctccctaacccaatgtattatatcccgtgacagaaactgggaaacaaggccgggtgaaaggtgctgcgtttattggatgcacaggcccggtcgaaaacagaaatcatttcgcaatggaatttaaaactgtacaaatgcttctttcactaacttggtgtacattactcgactgcatgtgcagttacttcaactatgtaagagtgaaaacgggtccggggatcaatgttcctcgatgcaactgtcaaacttaattactgcagcgcgtatattcttagaattttttta

SEQ ID NO: 57842 - DNA, 1609 bp, Zea Mays
cccacaccgcgtcgcgttcttgggctggcctctgtctggtccagtaatcagtacacgcctcggggttgggccccaaggcacagcggcctgcttcttccgctctctgctcagtgctgagtctgctccgtccgtctccgtgccgtgtgctggcggtggcggtccaggccccgctcgctcctaccagtggcccgtgcgtgcggccgccggcgccctgatcgatcgacccgcgcctcggccggatggaggcgtcagtagcagcagcaggaggtgggggaggcagcgccgccacgcggagcagcccggcggccgtgcaggccaccaacgacgacgccgcggccagcaagctgtcctgtgttaacaaaggatacatgaaggatgattatgtgcggttttttgttaggcgaccaacaagaagggctccaataatcaatcgtgggtattatgcgcgttggtctgttctcaggacgcttctgcatcaattcctcaatgcggggaagaatagtaacaatgacaagcctaaacaaatattatcccttggtgctggctttgacacaacattcttccagttgcaagatgaaggaatggctccacactgttatgtagaattggatttcaaggaggtaaccagcaaaaaagccgccatcattaaccattatagtgaaatgaaggaaaagttaggctcagaagcttcaatttcaatcgaaaaaggtgaagtgataagcacacattacaagctattttccgctgatattcgtgacataccaaaactggattcagttattcgcatggctgaaatggatcctagagtgtgtgcttatttacctggacccaactgccactggtgctattgtgagttgggcatctcaaaagttctccactgctgtctttttcttatatgagcagattcatcctgatgatgcatttggggagcaaatgattagaaatcttgagagtagaggatgcccccttctcggtataaatgctacaccaaccttgagtcacaaggagaaactttttcttggcaatggatggcagagagccgttgcatgggatatgctgaaaatctataatgacttcattgacagtcaagaaagacgcaggatcgaacggttagaactgtttgatgagtttgaagagtggtatatgatgcaggaacactactgtgtggcctatggaatcaacgacgccgagggcatatttgacagttttggatttggggagacatagcagcactggtgccttttcttctgtgggtaccagctgcacttgttgtaaaccgacaccattaattcaagtattactcgaagtaaactttgcttgataaaagaaggaacgattgcttgataaaagaaggaacggacaggggtaggatacctaaacatctcctgatgttggagcttgctttgataggctgccagttcgtcacaatatgaacagaacagtggtgctttccattttactgtttgcagatttaggttaaatctggtagcacatgtttgcagaataaatccgatgtagtttccttcagcctcttcagatacgagaggagatgacatatacgtccggttccaatttgcgcttgacgtgcgaggagctttgaagccaaaat

SEQ ID NO: 57843 - DNA, 1032 bp, Zea Mays
cagcggcctgcttcttccgctctctgctcagtgctgagtctgctccgtccgtctccgtgccgtgtgctggcggtggcggtccaggccccgctcgctcctaccagtggcccgtgcgtgcggccgccggcgccctgatcgatcgacccgcgcctcggccggatggaggcgtcagtagcagcagcaggaggtgggggaggcagcgccgccacgcggagcagcccggcggccgtgcaggccaccaacgacgacgccgcggccagcaagctgtcctgtgttaacaaaggatacatgaaggatgattatgtgcggttttttgttaggcgaccaacaagaagggctccaataatcaatcgtgggtattatgcgcgttggtctgttctcaggacgcttctgcatcaattcctcaatgcggggaagaatagtaacaatgacaagcctaaacaaatattatcccttggtgctggctttgacacaacattcttccagttgcaagatgaaggaatggctccacactgttatgtagaattggatttcaaggaggtaaccagcaaaaaagccgccatcattaaccattatagtgaaatgaaggaaaagttaggctcagaagcttcaatttcaatcgaaaaaggtgaagtgataagcacacattacaagctattttccgctgatattcgtgacataccaaaactggattcagttattcgcatggctgaaatggatcctagcttgccgacctttataattgcagagtgtgtgcttatttacctggacccaactgccactggtgctattattcatcctgatgatgcatttggggagcaaatgattagaaatcttgagagtagaggatgcccccttctcggtataaatgctacaccaaccttgagtcacaaggagaaactttttcttggcaatggatggcagagagccgttgcatgggatatgctgaaaatctataatgacttcattgacagtcaagaaagacgcagcttgtgttatgctgcacctttccatgatgtcactgctgataag

SEQ ID NO: 57844 - DNA, 967 bp, Zea Mays
ctgcttcttccgctctctgctcagtgctgagtctgctccgtccgtctccgtgccgtgtgctggcggtggcggtccaggccccgctcgctcctaccagtggcccgtgcgtgcggccgccggcgccctgatcgatcgacccgcgcctcggccggatggaggcgtcagtagcagcagcaggaggtgggggaggcagcgccgccacgcggagcagcccggcggccgtgcaggccaccaacgacgacgccgcggccagcaagctgtcctgtgttaacaaaggatacatgaaggatgattatgtgcggttttttgttaggcgaccaacaagaagggctccaataatcaatcgtgggtattatgcgcgttggtctgttctcaggacgcttctgcatcaattcctcaatgcggggaagaatagtaacaatgacaagcctaaacaaatattatcccttggtgctggctttgacacaacattcttccagttgcaagatgaaggaatggctccacactgttatgtagaattggatttcaaggaggtaaccagcaaaaaagccgccatcattaaccattatagtgaaatgaaggaaaagttaggctcagaagcttcaatttcaatcgaaaaaggtgaagtgataagcacacattacaagctattttccgctgatattcgtgacataccaaaactggattcagttattcgcatggctgaaatggatcctagagtgtgtgcttatttacctggacccaactgccactggtgctattattcatcctgatgatgcatttggggagcaaatgattagaaatcttgagagtagaggatgcccccttctcggtataaatgctacaccaaccttgagtcacaaggagaaactttttcttggcaatggatggcagagagccgttgcatgggatatgctgaaaatctataatgacttcattgacagtcaagaaagacgcagaattttaa

SEQ ID NO: 57845 - DNA, 1689 bp, Zea Mays
ctgcttcttccgctctctgctcagtgctgagtctgctccgtccgtctccgtgccgtgtgctggcggtggcggtccaggccccgctcgctcctaccagtggcccgtgcgtgcggccgccggcgccctgatcgatcgacccgcgcctcggccggatggaggcgtcagtagcagcagcaggaggtgggggaggcagcgccgccacgcggagcagcccggcggccgtgcaggccaccaacgacgacgccgcggccagcaagctgtcctgtgttaacaaaggatacatgaaggatgattatgtgcggttttttgttaggcgaccaacaagaagggctccaataatcaatcgtgggtattatgcgcgttggtctgttctcaggacgcttctgcatcaattcctcaatgcggggaagaatagtaacaatgacaagcctaaacaaatattatcccttggtgctggctttgacacaacattcttccagttgcaagatgaaggaatggctccacactgttatgtagaattggatttcaaggaggtaaccagcaaaaaagccgccatcattaaccattatagtgaaatgaaggaaaagttaggctcagaagcttcaatttcaatcgaaaaaggtgaagtgataagcacacattacaagctattttccgctgatattcgtgacataccaaaactggattcagttattcgcatggctgaaatggatcctagcttgccgacctttataattgcagagtgtgtgcttatttacctggacccaactgccactggtgctattgtgagttgggcatctcaaaagttctccactgctgtctttttcttatatgagcagattcatcctgatgatgcatttggggagcaaatgattagaaatcttgagagtagaggatgcccccttctcggtataaatgctacaccaaccttgagtcacaaggagaaactttttcttggcaatggatggcagagagccgttgcatgggatatgctgaaaatctataatgacttcattgacagtcaagaaagacgcagcttgtgttatgctgcacctttccatgatgtcactgctgataaggctgcccgcaatggatgcaggatcgaacggttagaactgtttgatgagtttgaagagtggtatatgatgcaggaacactactgtgtggcctatggaatcaacgacgccgagggcatatttgacagttttggatttggggagacatagcagcactggtgccttttcttctgtgggtaccagctgcacttgttgtaaaccgacaccattaattcaagtattactcgaagtaaactttgcttgataaaagaaggaacgattgcttgataaaagaaggaacggacaggggtaggatacctaaacatctcctgatgttggagcttgctttgataggctgttcaagttcaacggcgttgtgcttggtttaaggtctttggtgccagtcgcagtggtgtttgatgtcaagcatgccaggctgccagttcgtcacaatatgaacagaacagtggtgctttccattttactgtttgcagatttaggttaaatctggtagcacatgtttgcagaataaatccgatgtagtttccttcagcctcttcagatacgagaggagatgacatatacgtccggttccaatttgcgcttgacgtgcgaggagctttgaagccaaaat

SEQ ID NO: 57846 - DNA, 1505 bp, Zea Mays
cttcttccgctctctgctcagtgctgagtctgctccgtccgtctccgtgccgtgtgctggcggtggcggtccaggccccgctcgctcctaccagtggcccgtgcgtgccaccaacgacgacgccgcggccagcaagctgtcctgtgttaacaaaggatacatgaaggatgattatgtgcggttttttgttaggcgaccaacaagaagggctccaataatcaatcgtgggtattatgcgcgttggtctgttctcaggacgcttctgcatcaattcctcaatgcggggaagaatagtaacaatgacaagcctaaacaaatattatcccttggtgctggctttgacacaacattcttccagttgcaagatgaaggaatggctccacactgttatgtagaattggatttcaaggaggtaaccagcaaaaaagccgccatcattaaccattatagtgaaatgaaggaaaagttaggctcagaagcttcaatttcaatcgaaaaaggtgaagtgataagcacacattacaagctattttccgctgatattcgtgacataccaaaactggattcagttattcgcatggctgaaatggatcctagcttgccgacctttataattgcagagtgtgtgcttatttacctggacccaactgccactggtgctattgtgagttgggcatctcaaaagttctccactgctgtctttttcttatatgagcagattcatcctgatgatgcatttggggagcaaatgattagaaatcttgagagtagaggatgcccccttctcggtataaatgctacaccaaccttgagtcacaaggagaaactttttcttggcaatggatggcagagagccgttgcatgggatatgctgaaaatctataatgacttcattgacagtcaagaaagacgcaggatcgaacggttagaactgtttgatgagtttgaagagtggtatatgatgcaggaacactactgtgtggcctatggaatcaacgacgccgagggcatatttgacagttttggatttggggagacatagcagcactggtgccttttcttctgtgggtaccagctgcacttgttgtaaaccgacaccattaattcaagtattactcgaagtaaactttgcttgataaaagaaggaacgattgcttgataaaagaaggaacggacaggggtaggatacctaaacatctcctgatgttggagcttgctttgataggctgttcaagttcaacggcgttgtgcttggtttaaggtctttggtgccagtcgcagtggtgtttgatgtcaagcatgccaggctgccagttcgtcacaatatgaacagaacagtggtgctttccattttactgtttgcagatttaggttaaatctggtagcacatgtttgcagaataaatccgatgtagtttccttcagcctcttcagatacgagaggagatgacatatacgtccggttccaatttgcgcttgacgtgcgaggagctttgaagccaaaat

SEQ ID NO: 57847 - DNA, 1038 bp, Zea Mays
gctcagtgctgagtctgctccgtccgtctccgtgccgtgtgctggcggtggcggtccaggccccgctcgctcctaccagtggcccgtgcgtgcggccgccggcgccctgatcgatcgacccgcgcctcggccggatggaggcgtcagtagcagcagcaggaggtgggggaggcagcgccgccacgcggagcagcccggcggccgtgcaggccaccaacgacgacgccgcggccagcaagctgtcctgtgttaacaaaggatacatgaaggatgattatgtgcggttttttgttaggcgaccaacaagaagggctccaataatcaatcgtgggtattatgcgcgttggtctgttctcaggacgcttctgcatcaattcctcaatgcggggaagaatagtaacaatgacaagcctaaacaaatattatcccttggtgctggctttgacacaacattcttccagttgcaagatgaaggaatggctccacactgttatgtagaattggatttcaaggaggtaaccagcaaaaaagccgccatcattaaccattatagtgaaatgaaggaaaagttaggctcagaagcttcaatttcaatcgaaaaaggtgaagtgataagcacacattacaagctattttccgctgatattcgtgacataccaaaactggattcagttattcgcatggctgaaatggatcctagagtgtgtgcttatttacctggacccaactgccactggtgctattgtgagttgggcatctcaaaagttctccactgctgtctttttcttatatgagcagattcatcctgatgatgcatttggggagcaaatgattagaaatcttgagagtagaggatgcccccttctcggtataaatgctacaccaaccttgagtcacaaggagaaactttttcttggcaatggatggcagagagccgttgcatgggatatgctgaaaatctataatgacttcattgacagtcaagaaagacgcagcttgtgttatgctgcacctttccatgatgtcactgctgataag

SEQ ID NO: 57848 - DNA, 1709 bp, Zea Mays
gctcagtgctgagtctgctccgtccgtctccgtgccgtgtgctggcggtggcggtccaggccccgctcgctcctaccagtggcccgtgcgtgcggccgccggcgccctgatcgatcgacccgcgcctcggccggatggaggcgtcagtagcagcagcaggaggtgggggaggcagcgccgccacgcggagcagcccggcggccgtgcaggccaccaacgacgacgccgcggccagcaagctgtcctgtgttaacaaaggatacatgaaggatgattatgtgcggttttttgttaggcgaccaacaagaagggctccaataatcaatcgtgggtattatgcgcgttggtctgttctcaggacgcttctgcatcaattcctcaatgcggggaagaatagtaacaatgacaagcctaaacaaatattatcccttggtgctggctttgacacaacattcttccagttgcaagatgaaggaatggctccacactgttatgtagaattggatttcaaggaggtaaccagcaaaaaagccgccatcattaaccattatagtgaaatgaaggaaaagttaggctcagaagcttcaatttcaatcgaaaaaggtgaagtgataagcacacattacaagctattttccgctgatattcgtgacataccaaaactggattcagttattcgcatggctgaaatggatcctagcttgccgacctttataattgcagagtgtgtgcttatttacctggacccaactgccactggtgctattgtgagttgggcatctcaaaagttctccactgctgtctttttcttatatgagcagattcatcctgatgatgcatttggggagcaaatgattagaaatcttgagagtagaggatgcccccttctcggtataaatgctacaccaaccttgagtcacaaggagaaactttttcttggcaatggatggcagagagccgttgcatgggatatgctgaaaatctataatgacttcattgacagtcaagaaagacgcagaattttaaatttgatcctggctgagaactcggtttcagcttgtgttatgctgcacctttccatgatgtcactgctgataaggctgcccgcaatggatgcaggatcgaacggttagaactgtttgatgagtttgaagagtggtatatgatgcaggaacactactgtgtggcctatggaatcaacgacgccgagggcatatttgacagttttggatttggggagacatagcagcactggtgccttttcttctgtgggtaccagctgcacttgttgtaaaccgacaccattaattcaagtattactcgaagtaaactttgcttgataaaagaaggaacgattgcttgataaaagaaggaacggacaggggtaggatacctaaacatctcctgatgttggagcttgctttgataggctgttcaagttcaacggcgttgtgcttggtttaaggtctttggtgccagtcgcagtggtgtttgatgtcaagcatgccaggctgccagttcgtcacaatatgaacagaacagtggtgctttccattttactgtttgcagatttaggttaaatctggtagcacatgtttgcagaataaatccgatgtagtttccttcagcctcttcagatacgagaggagatgacatatacgtccggttccaatttgcgcttgacgtgcgaggagctttgaagccaaaat

SEQ ID NO: 57849 - DNA, 1655 bp, Zea Mays
gctcagtgctgagtctgctccgtccgtctccgtgccgtgtgctggcggtggcggtccaggccccgctcgctcctaccagtggcccgtgcgtgcggccgccggcgccctgatcgatcgacccgcgcctcggccggatggaggcgtcagtagcagcagcaggaggtgggggaggcagcgccgccacgcggagcagcccggcggccgtgcaggccaccaacgacgacgccgcggccagcaagctgtcctgtgttaacaaaggatacatgaaggatgattatgtgcggttttttgttaggcgaccaacaagaagggctccaataatcaatcgtgggtattatgcgcgttggtctgttctcaggacgcttctgcatcaattcctcaatgcggggaagaatagtaacaatgacaagcctaaacaaatattatcccttggtgctggctttgacacaacattcttccagttgcaagatgaaggaatggctccacactgttatgtagaattggatttcaaggaggtaaccagcaaaaaagccgccatcattaaccattatagtgaaatgaaggaaaagttaggctcagaagcttcaatttcaatcgaaaaaggtgaagtgataagcacacattacaagctattttccgctgatattcgtgacataccaaaactggattcagttattcgcatggctgaaatggatcctagcttgccgacctttataattgcagagtgtgtgcttatttacctggacccaactgccactggtgctattattcatcctgatgatgcatttggggagcaaatgattagaaatcttgagagtagaggatgcccccttctcggtataaatgctacaccaaccttgagtcacaaggagaaactttttcttggcaatggatggcagagagccgttgcatgggatatgctgaaaatctataatgacttcattgacagtcaagaaagacgcagaattttaaatttgatcctggctgagaactcggtttcagcttgtgttatgctgcacctttccatgatgtcactgctgataaggctgcccgcaatggatgcaggatcgaacggttagaactgtttgatgagtttgaagagtggtatatgatgcaggaacactactgtgtggcctatggaatcaacgacgccgagggcatatttgacagttttggatttggggagacatagcagcactggtgccttttcttctgtgggtaccagctgcacttgttgtaaaccgacaccattaattcaagtattactcgaagtaaactttgcttgataaaagaaggaacgattgcttgataaaagaaggaacggacaggggtaggatacctaaacatctcctgatgttggagcttgctttgataggctgttcaagttcaacggcgttgtgcttggtttaaggtctttggtgccagtcgcagtggtgtttgatgtcaagcatgccaggctgccagttcgtcacaatatgaacagaacagtggtgctttccattttactgtttgcagatttaggttaaatctggtagcacatgtttgcagaataaatccgatgtagtttccttcagcctcttcagatacgagaggagatgacatatacgtccggttccaatttgcgcttgacgtgcgaggagctttgaagccaaaat

SEQ ID NO: 57850 - DNA, 1554 bp, Zea Mays
gctcagtgctgagtctgctccgtccgtctccgtgccgtgtgctggcggtggcggtccaggccccgctcgctcctaccagtggcccgtgcgtgcggccgccggcgccctgatcgatcgacccgcgcctcggccggatggaggcgtcagtagcagcagcaggaggtgggggaggcagcgccgccacgcggagcagcccggcggccgtgcaggccaccaacgacgacgccgcggccagcaagctgtcctgtgttaacaaaggatacatgaaggatgattatgtgcggttttttgttaggcgaccaacaagaagggctccaataatcaatcgtgggtattatgcgcgttggtctgttctcaggacgcttctgcatcaattcctcaatgcggggaagaatagtaacaatgacaagcctaaacaaatattatcccttggtgctggctttgacacaacattcttccagttgcaagatgaaggaatggctccacactgttatgtagaattggatttcaaggaggtaaccagcaaaaaagccgccatcattaaccattatagtgaaatgaaggaaaagttaggctcagaagcttcaatttcaatcgaaaaaggtgaagtgataagcacacattacaagctattttccgctgatattcgtgacataccaaaactggattcagttattcgcatggctgaaatggatcctagcttgccgacctttataattgcagagtgtgtgcttatttacctggacccaactgccactggtgctattattcatcctgatgatgcatttggggagcaaatgattagaaatcttgagagtagaggatgcccccttctcggtataaatgctacaccaaccttgagtcacaaggagaaactttttcttggcaatggatggcagagagccgttgcatgggatatgctgaaaatctataatgacttcattgacagtcaagaaagacgcaggatcgaacggttagaactgtttgatgagtttgaagagtggtatatgatgcaggaacactactgtgtggcctatggaatcaacgacgccgagggcatatttgacagttttggatttggggagacatagcagcactggtgccttttcttctgtgggtaccagctgcacttgttgtaaaccgacaccattaattcaagtattactcgaagtaaactttgcttgataaaagaaggaacgattgcttgataaaagaaggaacggacaggggtaggatacctaaacatctcctgatgttggagcttgctttgataggctgttcaagttcaacggcgttgtgcttggtttaaggtctttggtgccagtcgcagtggtgtttgatgtcaagcatgccaggctgccagttcgtcacaatatgaacagaacagtggtgctttccattttactgtttgcagatttaggttaaatctggtagcacatgtttgcagaataaatccgatgtagtttccttcagcctcttcagatacgagaggagatgacatatacgtccggttccaatttgcgcttgacgtgcgaggagctttgaagccaaaat

SEQ ID NO: 57851 - DNA, 1531 bp, Zea Mays
gctcagtgctgagtctgctccgtccgtctccgtgccgtgtgctggcggtggcggtccaggccccgctcgctcctaccagtggcccgtgcgtgcggccgccggcgccctgatcgatcgacccgcgcctcggccggatggaggcgtcagtagcagcagcaggaggtgggggaggcagcgccgccacgcggagcagcccggcggccgtgcaggccaccaacgacgacgccgcggccagcaagctgtcctgtgttaacaaaggatacatgaaggatgattatgtgcggttttttgttaggcgaccaacaagaagggctccaataatcaatcgtgggtattatgcgcgttggtctgttctcaggacgcttctgcatcaattcctcaatgcggggaagaatagtaacaatgacaagcctaaacaaatattatcccttggtgctggctttgacacaacattcttccagttgcaagatgaaggaatggctccacactgttatgtagaattggatttcaaggaggtaaccagcaaaaaagccgccatcattaaccattatagtgaaatgaaggaaaagttaggctcagaagcttcaatttcaatcgaaaaaggtgaagtgataagcacacattacaagctattttccgctgatattcgtgacataccaaaactggattcagttattcgcatggctgaaatggatcctagagtgtgtgcttatttacctggacccaactgccactggtgctattattcatcctgatgatgcatttggggagcaaatgattagaaatcttgagagtagaggatgcccccttctcggtataaatgctacaccaaccttgagtcacaaggagaaactttttcttggcaatggatggcagagagccgttgcatgggatatgctgaaaatctataatgacttcattgacagtcaagaaagacgcaggatcgaacggttagaactgtttgatgagtttgaagagtggtatatgatgcaggaacactactgtgtggcctatggaatcaacgacgccgagggcatatttgacagttttggatttggggagacatagcagcactggtgccttttcttctgtgggtaccagctgcacttgttgtaaaccgacaccattaattcaagtattactcgaagtaaactttgcttgataaaagaaggaacgattgcttgataaaagaaggaacggacaggggtaggatacctaaacatctcctgatgttggagcttgctttgataggctgttcaagttcaacggcgttgtgcttggtttaaggtctttggtgccagtcgcagtggtgtttgatgtcaagcatgccaggctgccagttcgtcacaatatgaacagaacagtggtgctttccattttactgtttgcagatttaggttaaatctggtagcacatgtttgcagaataaatccgatgtagtttccttcagcctcttcagatacgagaggagatgacatatacgtccggttccaatttgcgcttgacgtgcgaggagctttgaagccaaaat

SEQ ID NO: 57852 - DNA, 900 bp, Zea Mays
gcagaccctggtggtgcttttatttgagtagaggatgcccccttctcggtataaatgctacaccaaccttgagtcacaaggagaaactttttcttggcaatggatggcagagagccgttgcatgggatatgctgaaaatctataatgacttcattgacagtcaagaaagacgcaggatcgaacggttagaactgtttgatgagtttgaagagtggtatatgatgcaggtatgtgataccttgagaaacactgtactgctcattgtttgaggaatatttttttttcttgatttactaccatatataaagaagtcgatcagttaagtgtgtttctgttctgaaacctttgacttgtgctttcaggaacactactgtgtggcctatggaatcaacgacgccgagggcatatttgacagttttggatttggggagacatagcagcactggtgccttttcttctgtgggtaccagctgcacttgttgtaaaccgacaccattaattcaagtattactcgaagtaaactttgcttgataaaagaaggaacgattgcttgataaaagaaggaacggacaggggtaggatacctaaacatctcctgatgttggagcttgctttgataggctgttcaagttcaacggcgttgtgcttggtttaaggtctttggtgccagtcgcagtggtgtttgatgtcaagcatgccaggctgccagttcgtcacaatatgaacagaacagtggtgctttccattttactgtttgcagatttaggttaaatctggtagcacatgtttgcagaataaatccgatgtagtttccttcagcctcttcagatacgagaggagatgacatatacgtccggttccaatttgcgcttgacgtgcgaggagctttgaagccaaaat

SEQ ID NO: 57853 - DNA, 1865 bp, Zea Mays
cgtagccaccctagctaatagccgtacgttaccagagatgctgagagcaaggagcagcgtgcagccgccaaccgcgaggatcgcagccgaggggtcggcaatttctcgccgatgactcggcaccgccgcagatccattattgcccgtcgtggcccatggcaccgacacctccattacaaggaagagctcctccatgtgattcccctcggtccctacaccgcgttgcacctattgggtatgtattttgatgcgggggcgtcaatttgctcatcgtcagtgagggagcgtcgccgcctcgctacggtcctacggacgtcgctggtgttggtcagctgggaggaagaaccgcttctgaccacccgatccgcgtcgtatggtgtggattaaaaacggaggatgccacttcacagccgtgaggacacgtgtcatctgaagagcaagttggtacctgacatctcaagtcccaggcaagttgtgcccttgatcacttctttttacccagtcatgttctgattaatcataatgatctgcataggttaattttgatgggacccaacaggttaccctagtttgattatctttataccttgactccactaaactttttgggtagtacctgctattgctttacgtggttttgggtatgaaaattacactattcatgattatacttttgttatcagttgttatttattgttcatgttaagatcattatgttaattggaacatggagaaccacccgggaaaacagtgctaccacaagggtttatggacgcccttggctgattaattaggaaagctagtggatgactaccttacctgaaaggggcaagggcagtaggggagtggtcagtgtagggaggcccttaggatgattttgctgcgatggaggtcatgcgagggattcctgcattggagcttcctataaactgtagcgggttttctgaagctagtggaactttgtaaaggcctcgtagtgttaccctgcctcgcctcctcggtagaggtgtatgggattggccgtctcttggcagatgggtaacatgacttttgggtaaagatgtgcaacctctgcagagtgtaaaactggtatactagccgtgctcacggtcatgagcaaactcggacactcacatgattaaattatggaactttaaactcaaattgtcatatgcattgcatcgcaggtgaggttgttacttttgttctactacttaattgggttggtattcacttatacttagtaactgctaataaaattttgaccaactttaaaagcaatgctcagcttcaaccatcctctttggtaagccttacacttcacgtgagctcccacctttggcgagttcatgcacattattccccacaacttgttgagcgatgaacgtatgtgagctcactcttgctgtctcacaccccccccacaggtcaagaacaggtaccgcaggatgaggcgcatggaggatgttgtgacgagttcgtgagaggtctaggtcgtcgtctcccagtcaactttgggttgctggaccgttgtctccttataatgtaattatttatgcatttattttgtacaaaactcctgttatgtagtaaagatgtgacattcgatcctgtgccatgattcatcatatgtgtgagacttggtcccagcacacctggtgattatgttcgcgcccgggtcttggtaccccgaaacccgggtgtgacaaatgtttcaatcaaagttcagagaattaagtatatttagctcattcctaagtttgctaaaagttttctcatctagtggctaggtaaaaatattggctaattggttgtgggtgctcatataagcaattttgatatcccccttttgttggtgatctctc

SEQ ID NO: 57854 - DNA, 2688 bp, Zea Mays
tagccaccctagctaatagccgtacgttaccagagatgctgagagcaaggagcagcgtgcagccgccaaccgcgaggatcgcagccgaggggtcggcaatttctcgccgatgactcggcaccgccgcagatccattattgcccgtcgtggcccatggcaccgacacctccattacaaggaagagctcctccatgtgattcccctcggtccctacaccgcgttgcacctattgggtatgtattttgatgcgggggcgtcaatttgctcatcgtcagtgagggagcgtcgccgcctcgctacggtcctacggacgtcgctggtgttggtcagctgggaggaagaaccgcttctgaccacccgatccgcgtcgtatggtgtggattaaaaacggaggatgccacttcacaggtatgatttgggtcatggatctctgatccaacggctacgtctccgtaccgcttcgttgaggaacgtctttaaatctgaatcgtacatctttgatcccacggccaccgttagggaccggctcgattctaatcagtgcggtacgtttctgatccaacggtccacagtcgaagataccccttcagccagcgcgttttgcaaaagaacccttatgtttctatgcaataaacccgccgtcctcggtagtaggcaaaacttgcaatagggtccatggactttttaaatatacccctagaaacctttacagagttaaaataaataattaggaaacctcgaaacttgtttatggcataacttactcgttttaaatccgttttactccgttctagttgcgttagcttcataaaaacattctctacgtaataaaaaccttaatcataccatatctcatacttttatagttagatattcatttaacctatgtttagtagattaacctctctaaatcaaagttaatctgtttataattatagtttggctaaaatatgatccctaattatattatgatttaacttaaaggtgaattaattattcatttaggttattttctcacatgatctattaaatcaacataaggtctagttttaagtgcttaaattaggtggatcttcggaaaatcataactcggtaaacgtagctccaaatttagtaattcttgttcccacgatcttgtagcaacgtgtagactattattacgcagtttttgcttatgtttcgtgtaatgttaatttttttctataccatttttgtttgtattgatacatttagccgtgaggacacgtgtcatctgaagagcaagttggtacctgacatctcaagtcccaggcaagttgtgcccttgatcacttctttttacccagtcatgttctgattaatcataatgatctgcataggttaattttgatgggacccaacaggttaccctagtttgattatctttataccttgactccactaaactttttgggtagtacctgctattgctttacgtggttttgggtatgaaaattacactattcatgattatacttttgttatcagttgttatttattgttcatgttaagatcattatgttaattggaacatggagaaccacccgggaaaacagtgctaccacaagggtttatggacgcccttggctgattaattaggaaagctagtggatgactaccttacctgaaaggggcaagggcagtaggggagtggtcagtgtagggaggcccttaggatgattttgctgcgatggaggtcatgcgagggattcctgcattggagcttcctataaactgtagcgggttttctgaagctagtggaactttgtaaaggcctcgtagtgttaccctgcctcgcctcctcggtagaggtgtatgggattggccgtctcttggcagatgggtaacatgacttttgggtaaagatgtgcaacctctgcagagtgtaaaactggtatactagccgtgctcacggtcatgagcaaactcggacactcacatgattaaattatggaactttaaactcaaattgtcatatgcattgcatcgcaggtgaggttgttacttttgttctactacttaattgggttggtattcacttatacttagtaactgctaataaaattttgaccaactttaaaagcaatgctcagcttcaaccatcctctttggtaagccttacacttcacgtgagctcccacctttggcgagttcatgcacattattccccacaacttgttgagcgatgaacgtatgtgagctcactcttgctgtctcacaccccccccacaggtcaagaacaggtaccgcaggatgaggcgcatggaggatgttgtgacgagttcgtgagaggtctaggtcgtcgtctcccagtcaactttgggttgctggaccgttgtctccttataatgtaattatttatgcatttattttgtacaaaactcctgttatgtagtaaagatgtgacattcgatcctgtgccatgattcatcatatgtgtgagacttggtcccagcacacctggtgattatgttcgcgcccgggtcttggtaccccgaaacccgggtgtgacaaatgtttcaatcaaagttcagagaattaagtatatttagctcattcctaagtttgctaaaagttttctcatctagtggctaggtaaaaatattggctaattggttgtgggtgctcatataagcaattttgatatcccccttttgttggtgatctctc

SEQ ID NO: 57855 - DNA, 376 bp, Zea Mays
ctttatcttcctccgtattcaagccatgcgatatctagattttcgtaacagctaaattgtcaaaaaaaaacctagcacaacgtgattgtgtttacatggcaagggcaaaagagtacaacaaattctttttttaaaaaaaaagaagattaatgaccacatgatgatctgtcatgtaatgacatcattaaaacctatctactgtagctatgtagcatctacctacagaacaaacccacggcccattcgaattcaaggtccttgccaattaatcttagctttggaccacaccatctgcacgaccgtgaccactgacgccagcaagccaaggatgatcagtcggtgctctgccgtccatggggcagcagcttgagcgcct

SEQ ID NO: 57856 - DNA, 1325 bp, Zea Mays
ctttaaaacgcacaactccataaaccctagcggacaaagccacttgctcacaccagaaccctctccgcaatctccccgcctcgctcccgcctccacccaatggcgtctctccctaacggtggcggcgccgccgcctctggctcatgcggcgcgcgccctgtggacaaggaggtggacttcgccaactacttctgcacgtacgcctacctttaccaccagaaggagatgctctgcgaccgcgtccgcatggacgcgtaccactccgccgtcttccgcaacgcgccccacttccagggcaaggtggtccttgacgtgggcaccgggagcggcatccttgctatctggagcgcgcaggccggggccaggaaggtgtacgccgtcgaggcgactaacatggcggagcacgcgcgcgagcttgctcgcgccaacggcgtcacggatatcgttgaggtgatacagggcaccgtggaagacgttgaccttccggagaaagttgatgtcattatatcagagtggatgggctactttcttttgagagagtccatgtttgattccgtcatttgcgcacgtgaccgctggttgaagccagatggtgtgatgtatcctagccatgctcggatgtggctagcacccataagaactggtttgggtgacaagaagagggaagattttgatattgctatggatgactggagcctgtttgttcaggacactcaaacttattatggtgtcaacatgaatgctttgacaaaggcatatcgtgcagaacatgaaaaatactatttgaagtcttcaatatggaacaatcttcatccaaaccaagttatcggtcaacctgcagctatcaaggaaattgattgcttgacagccactgtcgatgagatccgagaagtcagagcacaagtcacattgccaatcagaatggaagctagattatcagcactggctggatggtttgatgttcattttcgaggtagtgctcaaaaccctggggtggaggaagttgaattaactacagcgccagatgagcatggtggaactcattggggtcagcaggtattcttgctgactccacctctgagtgtgactaaaggagacaacgttaacgtttccttctcgatggttcgctcgaaggaaaatcatcggcttatggatatggagttcacatatgaattgcacgagttatctggcaggaagcacccagcagtcaaaaccaagatgtacttagagtagaacaaggttcgccagcataatgatctgtgacacagatgctcacacatgaagcatgctgcattgctttagttgataacatggttcaatcttac

SEQ ID NO: 57857 - DNA, 1267 bp, Zea Mays
agtgttttgggctgatctgcaaacttgcggtgaaattccggtttcggcttccgcggggtgggaatttggatagcgcggcgcaggaaaaatggcggcttccgctctccacctccgcctccacccctcgccgccggcgggtgtgaagcttcagcagcggaaactgcgctcgaaaatacagaggcagggtggcctatctcgaagattttcaaaagttgtgtcctattacggtctcacaaccccaccatataaactggatgctctggaaccttatatgagcaagaggacagttgaacttcactggggtaagcaccatcaagattacgtggatggcttgaataagcagttggctaccagccctctgtatggatacactctggaggatctgataaaagaagcttataacaatggcaatccattaccagagtataacaacgcagcacaggtctggaaccatcacttcttctgggaatcaatgcaaccagaaggtggtggcttacctgagggagtgaagagaaatgagagaaagctttcggttgttcatacacgaaatgctatctccccacttgcttttggtgacattccaatcatcagcctagacttgtgggagcacgcttactacttagactacaagagtcttttgtgaaccttggtgagccaaatatcccagaggcttgagctacagatacaccctagttatcatcgtgaggcattcttcggatacatcggatcaaatcctgctggaggaaccagagagttggaaaatctcatgtctcacaagaaatgcttatcaccccaatgtcatacacgccaagataagctgctgggatttcaccattgcccttggatattgctacaaggaaatcactagtcagcatccagtttgaagacatgcaacaaaacagctctagaagctatggagctggtagattctggagttggcagtgaggcagtgatccaacttgggctttgaagccatggtgctttctctagacggctattatttccatagtgttgttagaataatcctggttctgtgttttcataacttcatcatgctagggttctgttgtagcgtaacgcagaatggaacggaacaatattcttgttttactggttgagaaacctgttagttttggactgcagggaaatcttttacttgtatcagacgctgcaagcatggactttttttgtctggaaggaagttgaaacttctgaacttgaatgcaatactatagccatccaattccaaaacgtgcagaccttgaga

SEQ ID NO: 57858 - DNA, 1349 bp, Zea Mays
agtgttttgggctgatctgcaaacttgcggtgaaattccggtttcggcttccgcggggtgggaatttggatagcgcggcgcaggaaaaatggcggcttccgctctccacctccgcctccacccctcgccgccggcgggtgtgaagcttcagcagcggaaactgcgctcgaaaatacagaggcagggtggcctatctcgaagattttcaaaagttgtgtcctattacggtctcacaaccccaccatataaactggatgctctggaaccttatatgagcaagaggacagttgaacttcactggggtaagcaccatcaagattacgtggatggcttgaataagcagttggctaccagccctctgtatggatacactctggaggatctgataaaagaagcttataacaatggcaatccattaccagagtataacaacgcagcacaggtctggaaccatcacttcttctgggaatcaatgcaaccagaaggtggtggcttacctgagggagtgaagagaaatgagagaaagctttcggttgttcatacacgaaatgctatctccccacttgcttttggtgacattccaatcatcagcctagacttgtgggagcacgcttactacttagactacaaggatgataagctaacatatgtcacaaactttatggaccatcttgtctcttggcatactgtcactctacgcatgatgcgtgcagagtcttttgtgaaccttggtgagccaaatatcccagaggcttgagctacagatacaccctagttatcatcgtgaggcattcttcggatacatcggatcaaatcctgctggaggaaccagagagttggaaaatctcatgtctcacaagaaatgcttatcaccccaatgtcatacacgccaagataagctgctgggatttcaccattgcccttggatattgctacaaggaaatcactagtcagcatccagtttgaagacatgcaacaaaacagctctagaagctatggagctggtagattctggagttggcagtgaggcagtgatccaacttgggctttgaagccatggtgctttctctagacggctattatttccatagtgttgttagaataatcctggttctgtgttttcataacttcatcatgctagggttctgttgtagcgtaacgcagaatggaacggaacaatattcttgttttactggttgagaaacctgttagttttggactgcagggaaatcttttacttgtatcagacgctgcaagcatggactttttttgtctggaaggaagttgaaacttctgaacttgaatgcaatactatagccatccaattccaaaacgtgcagaccttgaga

SEQ ID NO: 57859 - DNA, 1456 bp, Zea Mays
agtgttttgggctgatctgcaaacttgcggtgaaattccggtttcggcttccgcggggtgggaatttggatagcgcggcgcaggaaaaatggcggcttccgctctccacctccgcctccacccctcgccgccggcgggtgtgaagcttcagcagcggaaactgcgctcgaaatacagaggcagggtggcctatctcgaagattttcaaaagttgtgtcctattacggtctcacaaccccaccatataaactggatgctctggaaccttatatgagcaagaggacagttgaacttcactggggtaagcaccatcaagattacgtggatggcttgaataagcagttggctaccagccctctgtatggatacactctggaggatctgataaaagaagcttataacaatggcaatccattaccagagtataacaacgcagcacaggtctggaaccatcacttcttctgggaatcaatgcaaccagaaggtggtggcttacctgagggaggtgtgctgcagcagattgaaaaggattttggctcgtttactaattttagggaagagtttatccgctcagccttacagctgttagggtctggttgggtttggcttgtcttgaagagaaatgagagaaagctttcggttgttcatacacgaaatgctatctccccacttgcttttggtgacattccaatcatcagcctagacttgtgggagcacgcttactacttagactacaaggatgataagctaacatatgtcacaaactttatggaccatcttgtctcttggcatactgtcactctacgcatgatgcgtgcagagtcttttgtgaaccttggtgagccaaatatcccagaggcttgagctacagatacaccctagttatcatcgtgaggcattcttcggatacatcggatcaaatcctgctggaggaaccagagagttggaaaatctcatgtctcacaagaaatgcttatcaccccaatgtcatacacgccaagataagctgctgggatttcaccattgcccttggatattgctacaaggaaatcactagtcagcatccagtttgaagacatgcaacaaaacagctctagaagctatggagctggtagattctggagttggcagtgaggcagtgatccaacttgggctttgaagccatggtgctttctctagacggctattatttccatagtgttgttagaataatcctggttctgtgttttcataacttcatcatgctagggttctgttgtagcgtaacgcagaatggaacggaacaatattcttgttttactggttgagaaacctgttagttttggactgcagggaaatcttttacttgtatcagacgctgcaagcatggactttttttgtctggaaggaagttgaaacttctgaacttgaatgcaatactatagccatccaattccaaaacgtgcagaccttgaga

SEQ ID NO: 57860 - DNA, 1084 bp, Zea Mays
ggaatccgggcccacctggttccgctgccctgatcggccctaggggcattgtcgtccttgcacatcaccgtatgctcgacccgtgtccatgtgtgtatatatatctccatgcgtttgccacttacggctctgcttcgtggccgccttttttcagagaaaacagagggaggaaagaaaaagctcacccccctctctcttcccaccacctctctcacgtgtgtgaggtggcgagcccaaggaggagcgggaggccacaagtccgatccgcccgtatctaatccgctcgagcgcagcggctcgttcctcgcgggggcgcacggttggcatttcgagtgctgagacatcggcttcattgaatcctaaagcacggttgagccatggctggctcccttgctgcctcagccttcttccctggcccaggggcgtctccagcagcatccgcgaagaacttggctggtgaagtaccggatagtttgagcgtccgtggtattgtcgcaaagcctaatgccaattctgggaacatgcaagtgaaggctcaagcacaaacccttcccaaggttaatggcaccaaggttaacctcaagaatgcaagctcagacacagaggaggcgataccctacactgctcccaagacattctacaaccaactgccagattggagcatgcttcttgcggctgtcactaccatcttcctggcagcagagaagcagtggacactgcttgactggaagccgaagaaacccgacatgcttgttgatacatttggttttggtgggatcatccaggatgggatggtgtttaggcaaaacttcattattcggtcctatgagattggtgccgatcgtactgcttctatagagacattaatgaatcacttacaggaaacagctcttaaccatgtgaagacagctggccttcttggagatggttttggcgccacgccagagatgagcaaacgaaacttgatctgggttgtcagcaaaattcagcttcttgttgagaagtaccccttgtgagaacgagttcattggccacttcccctttcttccatggccttcacagtttcagcaggcaacaccttaat

SEQ ID NO: 57861 - DNA, 2415 bp, Zea Mays
ggaatccgggcccacctggttccgctgccctgatcggccctaggggcattgtcgtccttgcacatcaccgtatgctcgacccgtgtccatgtgtgtatatatatctccatgcgtttgccacttacggctctgcttcgtggccgccttttttcagagaaaacagagggaggaaagaaaaagctcacccccctctctcttcccaccacctctctcacgtgtgtgaggtggcgagcccaaggaggagcgggaggccacaagtccgatccgcccgtatctaatccgctcgagcgcagcggctcgttcctcgcgggggcgcacggttggcatttcgagtgctgagacatcggcttcattgaatcctaaagcacggttgagccatggctggctcccttgctgcctcagccttcttccctggcccaggggcgtctccagcagcatccgcgaagaacttggctggtgaagtaccggatagtttgagcgtccgtggtattgtcgcaaagcctaatgccaattctgggaacatgcaagtgaaggctcaagcacaaacccttcccaaggttaatggcaccaaggttaacctcaagaatgcaagctcagacacagaggaggcgataccctacactgctcccaagacattctacaaccaactgccagattggagcatgcttcttgcggctgtcactaccatcttcctggcagcagagaagcagtggacactgcttgactggaagccgaagaaacccgacatgcttgttgatacatttggttttggtgggatcatccaggatgggatggtgtttaggcaaaacttcattattcggtcctatgagattggtgccgatcgtactgcttctatagagacattaatgaatcacttacaggaaacagctcttaaccatgtgaagacagctggccttcttggagatggttttggcgccacgccagagatgagcaaacgaaacttgatctgggttgtcagcaaaattcagcttcttgttgagaagtaccccttgtgggaagacacggttcaagtggacacgtgggtagctgccgctgggaaaaatggcatgcgtcgagactggcatgtcctcgactgcaagtctggatgtacgatcttgagagctacaagtgtttgggtgatgatgaataagaacactagaaggctttcaaaaatgccggacgaagtaagggctgagataggcccgtatttcaacgcccgcgcagccataacagatgagcagagcgagaaactggctaagccagggagcactgctggtggcgatgctatgaagcagttcatgagaaaggggctcactcctaggtggtggggtgaccttgatgtcaaccagcacgtgaataacgtcaagtacatcggttggattcttgaggtaatttcttcggggcctgcctcttttcatcgtattcaatggccactgctctggccatgtggtgggtgttgttggagagatctcgctggcatggcttcaaagtttataaagctctgtatacttgtgcttgtgtaactccttgctgatgaatgatcaattggtagtctggctgggtctgtatttgaaaaaacagacgttgctagtacggttgatcagctgagctgcttcttgatctttgcctagtacgaagcaaagccccttagtgcctgaaccctttttcttcttcttcgcagagtgctccgatcgcgatcctggagaagcacgagctcgcaagcatgacgctggattacaggaaggagtgcggacgcgacagcgtgctgcagtcgctcaccaccgtcgcgggtgaatgcgtagacggcgacacagactccaccatccagtgcgaccacctgctccagctggaaacaggagccgatattgtgaaggcgcacacggagtggcgcccgaagcgggcgcatggtgaggggacccccatggggggtttcccggcggagagcgcgtgaatccatatttggcagggtgagggggacggctgtgaagcacagatcctatgtttatgggtacactaacgcccaactgagttgagtgtgttttggttggttggttggtcgcgacaagtatggcaggcacatgggggagcgccgcattacccacacccaacctggggatttggccaagacaaaagcccagcggtatgaggatcgaggaagcagaccagagttgttgcggagcgagaggactggggatcagtgtgtgttgtgggttgctgggcaaggatacatgcagggggagctgatggttttgcaggggatgatgttgtgtagctggttggttggttggggtgtgtagaaggcattcattcccctttgtaacagcctaatctgtacattcttaccatcatctttgtcttgttgattgatcgagtcgcagacctcctgcgtttatttgcattcctcctggtggtgcc

SEQ ID NO: 57862 - DNA, 1928 bp, Zea Mays
tttgattcgttttattcggttggaaacatggcccggcgtcccggccaactggcttgagctgtttccagaccagagagaagctggttccagtgttctttggtggtggccttgctttgcccgaaaaggttggcatttcgagtgctgagacatcggcttcattgaatcctaaagcacggttgagccatggctggctcccttgctgcctcagccttcttccctggcccaggggcgtctccagcagcatccgcgaagaacttggctggtgaagtaccggatagtttgagcgtccgtggtattgtcgcaaagcctaatgccaattctgggaacatgcaagtgaaggctcaagcacaaacccttcccaaggttaatggcaccaaggttaacctcaagaatgcaagctcagacacagaggaggcgataccctacactgctcccaagacattctacaaccaactgccagattggagcatgcttcttgcggctgtcactaccatcttcctggcagcagagaagcagtggacactgcttgactggaagccgaagaaacccgacatgcttgttgatacatttggttttggtgggatcatccaggatgggatggtgtttaggcaaaacttcattattcggtcctatgagattggtgccgatcgtactgcttctatagagacattaatgaatcacttacaggaaacagctcttaaccatgtgaagacagctggccttcttggagatggttttggcgccacgccagagatgagcaaacgaaacttgatctgggttgtcagcaaaattcagcttcttgttgagaagtaccccttgtgggaagacacggttcaagtggacacgtgggtagctgccgctgggaaaaatggcatgcgtcgagactggcatgtcctcgactgcaagtctggatgtacgatcttgagagctacaagtgtttgggtgatgatgaataagaacactagaaggctttcaaaaatgccggacgaagtaagggctgagataggcccgtatttcaacgcccgcgcagccataacagatgagcagagcgagaaactggctaagccagggagcactgctggtggcgatgctatgaagcagttcatgagaaaggggctcactcctaggtggtggggtgaccttgatgtcaaccagcacgtgaataacgtcaagtacatcggttggattcttgagagtgctccgatcgcgatcctggagaagcacgagctcgcaagcatgacgctggattacaggaaggagtgcggacgcgacagcgtgctgcagtcgctcaccaccgtcgcgggtgaatgcgtagacggcgacacagactccaccatccagtgcgaccacctgctccagctggaaacaggagccgatattgtgaaggcgcacacggagtggcgcccgaagcgggcgcatggtgaggggacccccatggggggtttcccggcggagagcgcgtgaatccatatttggcagggtgagggggacggctgtgaagcacagatcctatgtttatgggtacactaacgcccaactgagttgagtgtgttttggttggttggttggtcgcgacaagtatggcaggcacatgggggagcgccgcattacccacacccaacctggggatttggccaagacaaaagcccagcggtatgaggatcgaggaagcagaccagagttgttgcggagcgagaggactggggatcagtgtgtgttgtgggttgctgggcaaggatacatgcagggggagctgatggttttgcaggggatgatgttgtgtagctggttggttggttggggtgtgtagaaggcattcattcccctttgtaacagcctaatctgtacattcttaccatcatctttgtcttgttgattgatcgagtcgcagacctcctgcgtttatttgcattcctcctggtggtgcc

SEQ ID NO: 57863 - DNA, 1836 bp, Zea Mays
ggggagaaccgtggttgttgtgttcctttcaaggttggcatttcgagtgctgagacatcggcttcattgaatcctaaagcacggttgagccatggctggctcccttgctgcctcagccttcttccctggcccaggggcgtctccagcagcatccgcgaagaacttggctggtgaagtaccggatagtttgagcgtccgtggtattgtcgcaaagcctaatgccaattctgggaacatgcaagtgaaggctcaagcacaaacccttcccaaggttaatggcaccaaggttaacctcaagaatgcaagctcagacacagaggaggcgataccctacactgctcccaagacattctacaaccaactgccagattggagcatgcttcttgcggctgtcactaccatcttcctggcagcagagaagcagtggacactgcttgactggaagccgaagaaacccgacatgcttgttgatacatttggttttggtgggatcatccaggatgggatggtgtttaggcaaaacttcattattcggtcctatgagattggtgccgatcgtactgcttctatagagacattaatgaatcacttacaggaaacagctcttaaccatgtgaagacagctggccttcttggagatggttttggcgccacgccagagatgagcaaacgaaacttgatctgggttgtcagcaaaattcagcttcttgttgagaagtaccccttgtgggaagacacggttcaagtggacacgtgggtagctgccgctgggaaaaatggcatgcgtcgagactggcatgtcctcgactgcaagtctggatgtacgatcttgagagctacaagtgtttgggtgatgatgaataagaacactagaaggctttcaaaaatgccggacgaagtaagggctgagataggcccgtatttcaacgcccgcgcagccataacagatgagcagagcgagaaactggctaagccagggagcactgctggtggcgatgctatgaagcagttcatgagaaaggggctcactcctaggtggtggggtgaccttgatgtcaaccagcacgtgaataacgtcaagtacatcggttggattcttgagagtgctccgatcgcgatcctggagaagcacgagctcgcaagcatgacgctggattacaggaaggagtgcggacgcgacagcgtgctgcagtcgctcaccaccgtcgcgggtgaatgcgtagacggcgacacagactccaccatccagtgcgaccacctgctccagctggaaacaggagccgatattgtgaaggcgcacacggagtggcgcccgaagcgggcgcatggtgaggggacccccatggggggtttcccggcggagagcgcgtgaatccatatttggcagggtgagggggacggctgtgaagcacagatcctatgtttatgggtacactaacgcccaactgagttgagtgtgttttggttggttggttggtcgcgacaagtatggcaggcacatgggggagcgccgcattacccacacccaacctggggatttggccaagacaaaagcccagcggtatgaggatcgaggaagcagaccagagttgttgcggagcgagaggactggggatcagtgtgtgttgtgggttgctgggcaaggatacatgcagggggagctgatggttttgcaggggatgatgttgtgtagctggttggttggttggggtgtgtagaaggcattcattcccctttgtaacagcctaatctgtacattcttaccatcatctttgtcttgttgattgatcgagtcgcagacctcctgcgtttatttgcattcctcctggtggtgcc

SEQ ID NO: 57864 - DNA, 1011 bp, Zea Mays
tttcatctggttttgcattgtttgggtgatgatgaataagaacactagaaggctttcaaaaatgccggacgaagtaagggctgagataggcccgtatttcaacgcccgcgcagccataacagatgagcagagcgagaaactggctaagccagggagcactgctggtggcgatgctatgaagcagttcatgagaaaggggctcactcctaggtggtggggtgaccttgatgtcaaccagcacgtgaataacgtcaagtacatcggttggattcttgagagtgctccgatcgcgatcctggagaagcacgagctcgcaagcatgacgctggattacaggaaggagtgcggacgcgacagcgtgctgcagtcgctcaccaccgtcgcgggtgaatgcgtagacggcgacacagactccaccatccagtgcgaccacctgctccagctggaaacaggagccgatattgtgaaggcgcacacggagtggcgcccgaagcgggcgcatggtgaggggacccccatggggggtttcccggcggagagcgcgtgaatccatatttggcagggtgagggggacggctgtgaagcacagatcctatgtttatgggtacactaacgcccaactgagttgagtgtgttttggttggttggttggtcgcgacaagtatggcaggcacatgggggagcgccgcattacccacacccaacctggggatttggccaagacaaaagcccagcggtatgaggatcgaggaagcagaccagagttgttgcggagcgagaggactggggatcagtgtgtgttgtgggttgctgggcaaggatacatgcagggggagctgatggttttgcaggggatgatgttgtgtagctggttggttggttggggtgtgtagaaggcattcattcccctttgtaacagcctaatctgtacattcttaccatcatctttgtcttgttgattgatcgagtcgcagacctcctgcgtttatttgcattcctcctggtggtgcc

SEQ ID NO: 57865 - DNA, 980 bp, Zea Mays
agcccgatgcgaaaatgcttgaagcctccaagaatctgggtgcaccgctgaggcgctgaccaccacgcaccacctcaccagatctttcttcctgttgcttcctcggctggtttccttctctcgccgcgtcgcctgcttcttcccccaaccaaagacacgaatcagccatggcgctcgcctccgccacgtcccgccccctcctcggtcgcccccgccggcaccgcgcggccccacctcgccgtttcctcatcctcccccgcctcctcgatccgcttcccccgcggcgccgacggcggcgccagcagagcggccgtctctctccgcgcccccacgcctccagcaacatctggtagcattgctccagcaatttcattgactgaaaaggccttgaaacatctgaaccaaatgagagctgaacggaatgaagttttgtgcttgagaattggagtgaaacagggtggatgctcaggcatgtcttacaccatggaatttgaaaatcgagagaatgccagccctgatgattctgttgtagagtatgatggttttgcaatagtctgtgaccccaaaagccttcttttcatgtttggaatggagctggactacagcgacgccctcattggtggcggcttcttgttccagaatccaaacgcaacaaaaacctgtgggtgcggcaaatctttcgcgactggaaaggagaccgaggccgcggcaaccacttgcaacaactagagtagagaaatattgttagctaaacgtgatgtggcatgttgtatagcttgctcatgttgaagccctgtggctacaccacagatacataaagaggcatagttcaaaggaattacaccattaccaatggcctaattcagattttcttgtttggtgatcattccgaagtccttaaacttgtggtatggtctctcaaaatgcattgtattttcaggtatccaaacttgtcttgacgtgtcgtccaggcctacaag

SEQ ID NO: 57866 - DNA, 3218 bp, Zea Mays
cgaaactatagatgacactatttagagtaatgttttgaaatataaaggatgaaataagagataagatagagaatctgctgaagataacctaattagtattaattaccggccgccatttctttagagatcagaattccaagctgtttgcaactcgacgaagacaagtctcacaagaatcttcaccaaagtttgcaatcggttaattatgtaaaaatcgtttgcaacttgacgaagcttagcatcagaggcaacagaaacaaccatattactcccagaagtgactctcctaggcggcgaagagatccatacatgcaggttagtccacgaacgaaaccaaagcagcgaagagatccatatgcttcaacacaccagttgaaatgacccactagcgatcaagacattaccttatttatatctgatgcatacatgcacacactgtagcacaaaaaaaaacccaaggatggcaacgatccggtttgattcccttactgacgcccactgccgaggaagtaatgtctgtcatgagtggacaaccttccaagatttgctgcctccagtattctcagaatctacagacttgccaccacttctatttcagatgaaggaattgtgtctgcagctgtattaaataatatatctacaaagcctgatcctcggtacccagcacccttgatgctgacgacaattcgcctgtttcataaaaatatgcaatttgtagctcgaagaccagacccattatgatgcagtctgtagctccaaccgtcttgccatattaaaataagtgatgagtatggctcagttagcagttgccgtagtggaaggtcagcaatgaactgattactgatatagagcaaaagccgcaacccgactttgtgcttcctgttcataaaattggttcaataatagcaatttagataagatataggataatattctgtgatttgttacgctgttacgcactgatatctcagtatatcatgcacatataatgataattattatcatggagacaagtgccttaccagaataataattagctgaaccaaagtatttgtgagaagatatatcatacaaagtaacagaaaaagttataacctgaacatatccatattcttcatccagttcaggtaactggattctccagccttcctactttcacccacagccagtacctccccataacacattaacagagaatatacaaatttgccatctctctcggatattttgtggtgctctccaaccaagtttttgacaactttttcgtagaacagctttcagcattttaccagtatccctctgcagttgaggaaaaaaaagatagaaattagtgcatagtagcacaacaaatcaaacatgaaacaagtgcacttggacattcttccatacatcacgtttccaagaagatggccataaccatcatgtaataatttctctatttattgctgtttcaagatttctggagccactgtctctcaaacagatgtgtcttcaaagaacatgttatcaagatctaccacctcttcatctacctcctttctacaagttctattgacatccttagaaatcgacttcgtcaaatcagatccttcatctatattgcctagactctcagtattacctcgctctacaaaaaactacacattggagaccataccaacatctgaaactgcggtgaggatagtttaacagattcaaacaaaaggtgaaccatgaacggaaggagagacctgatttgttgtgaaactgaaacagatttctcagtgaacaatagtttcaatcttgtataaccattttgagttatttttttcaaacagtaaaaacattgggctacttagattaacacaccaaatcaattatttgtctcctgcacaagttcatgatatagaggctcttcgtatccatgggaagttcagtacaacttcagagaaatatgaaacagaacaatacaacaaaatccaatggttcttcgaagagtactaaagatgactcaattcaagtgataaattttcattgataccacctcttgctgttccctgtattgaccaatccatgcaacttgcgacaacagcccatcatccggtgacacattctcttctctccggccaccgattctaacttccaacaactcagtgcacaccttcacctcctaaggttcacaactctgtgacacccaattgtccttgactatggacgatacaacaacagaaccttcagctcctgcatcacataccaacaatgtaatcatcacatgattctaacataaaaaaagcaacacctgattaatcaaccaatcagcacctgtataagtggaaaagaagagacaaactcaacacttcaacatttatacaatattggaaaagaagagacaaaccagcaagttcatgaatcatcaatagtattggccgaaataacatctgaagaggaagcctaaggtctaggctacataatggatccacatcagggaaagaagcatcaaacagaagagaaatatataagacaaacaaaggaaaggaagcaaaccttcctgctccctatcgagatccacttctccgattatccatgtgattgctcacatagtcaggttgatctcaccagtggccttgggtgtgacagccacgtcacatataaacaagtaaatcacagaatgcaggcaaaggatcaatgatgtaaactttgctctgtacacacatttaggagaaaagtcacatattgcaaatgagcaccctggtagactgatgagaacacaagcacacatggagagaaatatgtataatcatgttgaaccaccatcgcctaataaaccttaaaccctttaagtttcatacctgcaagagaggaagtggtgctggtgccagcgttggattacttgagggggagttcattgccaggcagattaaagaatagccagtccaacaccgattcaaacgtcattgaatcctaccacaataaaatacaagacacacaaaaggacatgagaacacaagctggaccgaaaagatttctacacaaacaaggacggcgattcctgatccacagtgtacaaaatacagagttcttgttcagatgaacaagcaaaagctggcctcacaccacaaacagcagccaccaacgactaatttgatgaaccctgtaatctgcgtatcataaaaaaggtaaacaaatcctcttgtatgaattcatgaatcaaatagtatgattgattggattttagattc

SEQ ID NO: 57867 - DNA, 1294 bp, Zea Mays
aaaaatttagctttgagcgaggtccccgtgtccgttcacctctccggctctccctcccagcctcgccctcccaccgtcccacgttgttcctcccgaccctcgccgtccctcccgccgcgacccgccctcctcctcccgaccacgccgcccagcccgtgtaccactccctcccagcctcgccctcccacgccgtccctcccgccgtgacccttcctcctcctcccgacctcgccgcctagcccgtgtcgccgccgtcgcccgtgccactctgctgctgcgaccacgacaatggggatgtggaaggtggtgtgcgtcaccgacgcatcagcgtacatcgcgtcctggatcgtcaggctcctcctcgaccgtggctacaccgtccgcgccaccgtgcgagacacagagaggagtcaccaagccaattgtactctctataggcttctttcctctccccggaagataaaggattgtagctgtcttttcttaatagaatggagaaagatctgtactgtgagtatttgtgtacgttgttggtcgatggctcaaatcgtctgaccaaatcttttattcagcgagaatggcaagcaaaatatatttgatcttttgtgttgtgtttttagacatgtgtggattctcacagttcatttggttgcatttttacttgcctttaaacctgatccctgatgctggtcgtcaaatactcagcttgttggctgcaatctgtgtttatcttggtatatccttgaaagttgatagtacagaaccaaagcatattaaggcatactgctattatttatcattcatgtttcaaacacacttgatactgcatatctctacagtttgtttacatgctcagatgttgaactcgatctattccttgccatatttatttatgattgacaaaccaatattcattgaccatgacatcaatgttccctagagtaaatgcatcaaaagtcggaaggagtgatctttgagtagttctatttgttgctggtagtatactgaaagtttcgttagttctcatctctctgatgttttttctttcagttctccacaacctacattcacttaacaaggcactttttcttgagaataataaaaaatgtactcctttcagtgttgctatcatcataaagtgttgcttgtggacttcctttttgtaatattcgtctaatgttgatgagaatctaccggttggtgatgtgaatgaccaaataacattgctaaacactttgttaatgtaacatacatgactggtataggggatccacgagagagaaagcactgggcg

SEQ ID NO: 57868 - DNA, 439 bp, Zea Mays
ctcccagcctcgccctcccaccgtcccacgttgttcctcccgaccctcgccgtccctcccgccgcgacccgccctcctcctcccgaccacgccgcccagcccgtgtaccactccctcccagcctcgccctcccacgccgtccctcccgccgtgacccttcctcctcctcccgacctcgccgcctagcccgtgtcgccgccgtcgcccgtgccactctgctgctgcgaccacgacaatggggatgtggaaggtggtgtgcgtcaccgacgcatcagcgtacatcgcgtcctggatcgtcaggctcctcctcgaccgtggctacaccgtccgcgccaccgtgcgagacacaggtgtttgttcggcctccaagagtacctctagaggcacaatatcgtcacaggtccaagatctttagattaccttgagaatgagaagcaat

SEQ ID NO: 57869 - DNA, 2366 bp, Zea Mays
attctggatccgaaaatacctgttcacataatccactcggaaaacattgtcaaatcatgtttttgaggaccttcggaggacgaaggcccccaacagtccacgacatcatcctcaccgcttcctcgtctgccctcctacacggctacaccggactatctcggccctacagcaggagttcgccatgaaggatctcggtgctgtgcatcacttcattgatatgcatgttcagccctgaggagatggccttcttctctctcagaagcagtacatggttgagcttcttgatcgcgtagggatttcatattgcaagccttgtctgacaccggttgacaccaacccgaaggttgcctctgcagatggtgaacaaggaccgacgcttcatacttccgcagtcttgatggtgccttacaatggctgacattcacccgacctgatattgcctatgttgttcagcaagtttgtcttcatatgcatgctctccgggagccacaccttgctgccctcaccgctgtcgttgttgatgctcgctcgtgttcttgtgctgcgacgacctcggcctcctgctggcaccgcgcactcaaagtggtcgagcgtagggacatggtgctagtgtggggtcgctgcgtgtggaagaggctgcctcagacgaaaggctgctcgtccaagcaggagaggaaggaacagttggaactcttgctaccgactgagtgtgtggagaggcgtgggaaggagatgagcaagagatgtttaggctgcaggatagtttggctttgataccaattgtaagcaacgagactcttactctcatcgagaggatgacactacgagttagggcaattttctgtttattttctcaaacactacacaatgtcatacccatctaagggttggggatacatatttataaccctaggcactacacactacacggtgaacacgctgcactacactccctgcgaggacagtcaaaaagctcatgttgtcctctagatgctaaaggagatgttgtcctgcagcacgctgtcctccacaagaccatgtgttgtcctttgtcctacagcacgttgtcctccacaagaccatgtgttgtcctctagtcaaaagaaactgcagcaaagaaaggtgttgtcctgcctgttgtcctcaaagcagtcaaaaactacagtaaagaccaacaacagatgctctgtccttcccatagaccacgagacttattccaacagcgacagcccagagcatggaggccgggataggctcaggattaggattagtggataaagattagattagattagataagattgggctaattacttgggattagattagataagattaagttagttacttgggggccaagtcttcctatctataaaaggatgagttgtacctccttaagggggaatgaatcagtgaagaagaattagtcccagacctctctaatactagtctcccccaagccgactccggctatcttctcgacgttgtttatccccttacgaactaggaagatagccgggcggaatcggcttgggggagactagagtattagagaggtctgggactaattcttcttcattgattgattcccccttaaggaggtacgacccatccttatatagataggaagacttggcccccaagtaactaactcaggccctgtttgaaacctctaaaaccgatagttagctactaaaaattagttgtttggttccaaacaccatcagctaataccacagctaactgttagctacctcagctaacaattagttcattagctggctcaacccagctaataatttattagctggctaactattagctctaggggttgcaaacagggcctcaatcttatctaatctaatctaattccaagtaactaactcgatttatctaatctaatcccaaataattaactcaatattatctaatataatctcaagtaactaactcaatcttatctaatctaatctttatccactaatcctaatcctgagcctatccctatgggcctccatgctctggggtgccgccccatgacagttccccgtgagggtctcagctaactagtgtggtcatctttaaagcaaacataaaataatttgtagatagcatttctactcgatttactatacatgcctatcattgagagacacagtgatatggggcttctagttctactcaaaagtgagatgatatattaatagttagtgtccataataactgacagcactactgaaacaaaagcagaatgtagatgatcttaccttcttgatcccttcatgtatccaacagcccagactctctcaaggccatagtttagtgtgttctcaagtctacaaaaatagttcaaagtataaaacaaa

SEQ ID NO: 57870 - DNA, 1300 bp, Zea Mays
ctgggttttgcttggaggtgcagtgagagggagagccatgacagccacgctagtggaaactctgcacatggttcccggagacggagatacaagctacgctcgcaactccactattcagggtgggcagcaaagcaacctaaagcccatgatcgaagaagccgtggtaagcctccttaacgacaatgatggtgcgaccggcctggcgatcgccgacctgggctgttcctccggcccaaacacgcttgtgctcgtgtcgacggccgtcgccgccgtccgccgccgctgctcggagctccggcggcagccaccggagctctgcgtgcacctcaacgacctcccaaacaacgacttcaacctggtaaccaagagcctggccacgtacgcgaaagcccaagaaagcttgggccctcctgtcctgaccagcatcgttcccggctcgttccacgcccggctcttcagcaagcgtagccttcacctggtctgctcaaacgcgagcttgcagtggctctcaaaggcacctgaagagctggtgcagaacgggatcccgttctacgacagggacgagtcggcgaggcgtgctcggcgtcctgcagtcatccaggcctatgcccggcagtttcgcagcgacttcacccagatcctgcgcctgcgagctcaggagatggttcccggaggaaagatggtgttctccctccttgggcagcgccccgacgacaaaccggagaacgccctccagcttttcgaatttataaatgccgtcctacacgaaatggcgtccaagggtttgatcgacgaggagagactccactctttctacataccggtgtatgggccatcagagaaagagctgagggagatcgtagaagctgagggctcgttttcgatcgacaagatggcgatccatgaacctcctccttctcggaatgccaatctcactcccaaggcaagggcgggcgggttgagagctgcaatggaaccgatcatagtgcggcatttcggagcatctccaccagccatggacgagttcttgaggatcgcggagaagctcatcaaaatgtcacatgtagaggatgagtatccaaacaaacccagggctttcgttgctgcgtccctcaccaggagggcatgaccgcatcacgggaatacatgcatgcatataaactatggttcttggtttaccatacaaataaggagcagtagaggcagaagcctcggtcggaggcacctcgtcatcattgtgcagttgtgtttctccatgcccaagtccaccagaattgggcctcctacgccagccactgtg

SEQ ID NO: 57871 - DNA, 564 bp, Zea Mays
caagtgaccaaggagcccggagcacaacaggttgaagaatctgagcaggagctcactgaagatatgtcgaaggacagtatagcagtgaagcaaggaacacaaagaatgcaacagagctttgacaagaatcagggcttcggcttaagatggtcctgaaggtcatataagaaattaaatcaatagtgaaaagacccatttacccttagcacccgtattagaacaatgtatagatatcaaggtcataattgttcttttgcttgggctgtgtcccatgcctataaatagagtactgttcatgctttcatcgaaatccattctcacattatctccttcgagtaagccaaaggtactaatgtaatgtaatgcttgtaatatttcattagcatgtaatttagattatgacatcattctcacatgcaaagtgaaataaatatgtaatataatattacattgtaatattaactttatgaaagatgaagactcgttcttcattaccttcgtccaagaaccattatctctgaaagaagataattcttcaaagggcgaaggtccttaatatttcat

SEQ ID NO: 57872 - DNA, 463 bp, Zea Mays
gttgtttttcagccgcgttgctagttcccgaatccaagctcccccgtcccctcttcctcctctccgacgccgcggcgatcaattccgaatcgagcgcgagacgggcttgatcgaagagtcgactatggacggcgagaacgaaccctacgttatctccgacctcaacgcctccctccccgcggccgctgcagcccttagcgccgaggaccgcgccggcctcgtcaatgctcttaaggataagctgcagagcctggcgggccagcatgccgatgtgctagagacgctttcgcccaatgttaggaagcgtgttgagtttttgagagggatccaggtcgtcaagcacaaaattgtcatcgtcttcattttcatcactctcatcaacaccatcttcatcatcctcaagaattggcacttgagtaccatgagctctcctaggaaagtaggggccttgaagttggattaa

SEQ ID NO: 57873 - DNA, 652 bp, Zea Mays
caggaccaccataagggataagattatccctcatgctgtttcctggttcactggtgaggctgttcaaggtgaggattttgctaacttgggtgatgatgaggatgacgacgataaggatgacgacgacgaagaagaggacgaggatgaggagggagaaagcaagccagcaaggaagttaggcttgcagttgaccagcaatatgtttagatatgggaattgaacctttcctcttgctaatacatcccatttctaattgtctcaacagttgggatccggtcacaaacagaaggaagtgttgcagggaaatgccgaacaaccagcgtagtgcaagcagcagtaaattggctggtggccattttttgcctgttgatgttggtgcttggttgatgcagtattttccattgatctggagcactctgctgcgttagtggatggaaatcggtttgcaacttgtctcctagtgatctcggggttttcgctacgtgcaatcggatgatattatatggttgtgtaattatctttgcactcagcagataatggcgctttatttgtcctaggtctatattggctatcttaaattgatttgtagttagcttagagcatctacaatcgaccacccaaatcagggggtctatttttgatttgatgccca

SEQ ID NO: 57874 - DNA, 453 bp, Zea Mays
taagggataagattatccctcatgctgtttcctggttcactggtgaggctgttcaagttgggatccggtcacaaacagaaggagccgcaggaagtgttgcagggaaatgccgaacaaccagcgtagtgcaagcagcagtaaattggctggtggccattttttgcctgttgatgttggtgcttggttgatgcagtattttccattgatctggagcactctgctgcgttagtggatggaaatcggtttgcaacttgtctcctagtgatctcggggttttcgctacgtgcaatcggatgatattatatggttgtgtaattatctttgcactcagcagataatggcgctttatttgtcctaggtctatattggctatcttaaattgatttgtagttagcttagagcatctacaatcgaccacccaaatcagggggtctatttttgatttgatgccca

SEQ ID NO: 57875 - DNA, 663 bp, Zea Mays
cctgcattttgtgttgggcatccacgtgtattcaccatgcaatgttggcaccttgagagttatctccaccatgtgttgaacaaattcagtgaaccactgctctgtcttcttgtctattgctttagggcacaatctagtgaagagatccctgctctcgagctcttgctggtcccttggtacctctgcagtttgtgttacggtttgagttcccctctcaatccccaggtcgatttgcccttgttcatgtggttctcgttccgtgctctccaaagaacaccaagaagaagaattggttttttaaagaaggaacctgctccagtgctattgatccagtgatggactccatctaactgcgtatcgtgatagaagatctcatattcctctcgtaataagggaggattcttgctatctttagctcctaatagttgctttgtacggaggccttgaagattttaatgcttagtttatttcttatggaaaggcttcacctttcccaattgtgtattaagtcatgcacttgagtactatcaggacttgtaataattacaactctttctatgatgtaaaacttgagatttggaattgtaaaagtatgttttgtaaagtcttctgttctatctccgaagtgtttgtgtatcaaatgtgattactgtaatgtacatg

SEQ ID NO: 57876 - DNA, 4794 bp, Zea Mays
cgtgtattcaccatgcaatgttggcaccttgagagttatctccaccatgtgttgaacaaattcagtgaaccactgctctgtcttcttgtctattgctttagggcacaatctagtgaagagatccctgctctcgagctcttgctggtcccttggtacctctgcagtttgtgttacggtttgagttcccctctcaatccccaggtcgatttgcccttgttcatgtggttctcgttccgtgctctccaaagaacaccaagaagaagaattggttttttaaagaaggaacctgctccagtgctattgatccagtgatggactccatctaactgcgtatcgtgatagaagatctcatattcctctcgtaataaggcaagccctcgtgcatttgccccttccttgtgttttaaatgctttatcacctgatatgatgcattaggtgataggagttgtgtgataaacaatttatacattaccattacttggaaattcctaaattcctattttataaaaagaattatcactgcttagtcctgttcagaaactcaaaaatcatttgtttttcaaaaggatgatgtgtaacattggttatgggcatttgattcaaaagtgaaagaaaacttatgatgttgagtccatcagggctccggatgggttcatcatccgaaaagagtacccctattgggtaccaaaaatgggaaaatgggttgaataaatggagaccagacgctgagcagacaaggtcgcctgtttgtgtcgattaaggactgtactgttgactggcctgttgtggttgagactttacaactagcctcataccctggtatgggacagggtaagcttgaacccggctattccatacgtgaagagacaatcgcgcactgggagtggagagatggcgggagtagcatgtaccctcctagcatagtagcacgcctagtagggtaatgagctctcgggtggcgcggacctattcatgtagtggaaaactccatgggaacggttgacatatgcaagggttaagtgctacatatgttgtgtggttagagatccctagctgggtataatcggttcgaatcgtcattgctgctcggttattgtcacacccgggttttaggggtccaaagcccgggcgcgaacataatcaacaggtgtgctaggaccaagtctaacacatatgatgaatcatggcactggatcgaatgccacatctttactatataataggagttctgtacaaaataaataaataattacattataaggagacaacggtctagcaacccaaagttgactgggagacgacgacctagaccactcacgaactcgtcacagcatcctccatgcttctcatcctgtggtacctgttcttgacatgtgggggtgtgagatatcaagagtgagctcacatacgttcatagctcaacaagttgtggggaataatgtgcatgactcgccaaaggtgggagctcacgtgaagtgtaaggcttaccaaagaggatggttgaagctgagcattgcttttaaagttggtcaaaattttattagcaattactaagtataagtaaatagcaacccaattaagtagtaaaacaaaagtaataacaacacctgcgatgcaatgcatatgacaaattgaatttatgtttcataaattaatcatgtgagggtccaagctgctcattaccgtgagcacggctagtataccagttttacactctgcagaggttgcgcatctttacccacaagtcatgttacccatttgccacggggttgtacgggccccatacacctctaccaagaaagcgaggcagggtaacactacgaggcctttacaaagttccactagcttcagaaaaccagctacagtttataggaagctccaatgtagggatcccttgcctgaccgccatcacagcaaaatcaaccaaggacctccccacactgaccactcccctactgcccttgcccctttcgggtaaggtagtcctccactagctttcctaattaatcagccaagggcgtcccattaaacccttgtggtagcactattttcctgggtggtcgctccatgttccaattaacataatgatcttatcatgaacagtaaataacaactgataacaaaagtataatcatgaataatgtgtatctcaatgcccaaaaccacatatagcactagcaagtactacccaaaaagtccagtgacaaacaaggcataaagatagacaaactagggtaacctattaggtcccatcaaaattaacctatgcagatcattatgattaattagaacatgagtgggtaaaagaagtgatcaagggcacaacttgcctgggacttgagattccaggtatcaacttgctcacgtgtcctcaatgctaaacgtagcaatacagacaaacatggtataggcaaaattaacatcataccaaacataataataaactatgcaataacaatctacgctgcgtaacgagatcgtaggaacaagaatcactaaatttggagttatagttatttagttatgaatttctgaagttattgagcacctagaatagattaattcaaatgaacaattttaattcaagttttatggttaaacaaaggtactaggtaataaacaatacttaaattaatgccacttgaatgaatcaatttggagctaaattcatcaagttatgaatttcctaagtttggggcatcattttgcattaaaaagaatttctgtatttaatttaatagatttctgagttacttggactgctgacactatttaatagaaacccaggggggttctgcgcaaaagaaccaagactcagaactcccacagtgtggactgcaggttgtttatagtcaaataggaggtctcttttgcaaaacgcgcaggtcgaaagggtattggttaattcgggtcgttggatcctgcatcaagggccacgattagagcggggaaggttataatccgatatgcgttcattgccctaggatcaaagatcaatggcccaaaatcgtccacgctacagatttagcccggaccctcagattgatgatctacgacccagacctatcctagccgaaagggtacgcgaggtctaatctgtgtcgtccatccatcgatcaacggcgcacgacccttctccttaccccgacgctcccaaggcagagtcgccggaatccctgcggccgtggagctcaccggcgcaccaaagtcggccacccagagctcaaaaccaaatcggataggactacacgatgcttatgctattgcgaacctgggtggagggtactcaccgtaaatcgggggtcgaaggatgccggccacgacgcatggtggctccgtcgtggaccatctgtcccggtgagcaattgggctcgcccggacggccgtcttcccccaacacgaccacggacacatccccggtgatgggatgaagccccctgggttaacatccagggcccattggcgacgagagcggggatgcgcggtggccacgagagtatcgcacaacagctatctcactgattctctctcatctcttgcaatggcggaactgggtgcattgggttggggagaacgaggagactgcgacacccgatttatactctagtagcgaagtccgagcgaggcacgaggagcgagatccccggcgaggtaatcggcgttctgttgcaacggcatcggagagacgggtctgacagatgtggcccgcaaactagtggtgcagacacggagaaggaaagaggaagggctgacgcgagggccccacaaaccagagtcacggtgcaaatattggtgagcggggtcgacctgctgtgatgggccgaggggagggaaaggcaatgtgggccagaagcagggagtcggcccaagcgagttttctttctttttctttttattttccttttctatttccatttctaatttgaatcccaaatctgctctaaattcaagtctaaggtacaattggaatgcctaacataatgtgcaataattatactaatctatttaattactttatttagtattattattttattttaggtaatactttcagcatgagattcacaccttattttatattattattatttttaaatgcacaagcaattaactccaacatgatgcaccattttctttatttaatatatttaatgcaaagatgagaaaatcatcacaagtagccaattaaataaattttgatatgtttcccaattcctatacattttatttctttcaaaatttgggtattacagttatggagactcatcccggtgaccatcatcgtagttaggcaaatctagattcaggtaaatctagattcaggtaaatatctaacttgtgaaatgaaacttggcatagggatcaactggtagtaagcttttctgccaaaaagggtcttcgataattgataagctttaccttgagtcccaaaatccagcatacccttgagagtcttttctttagtcgggtaagtcttgctgagtaattgcatactcagggttttattccctatgttgttgtagggaggattcttgctatctttagctcctaatagttgctttgtacggaggccttgaagattttaatgcttagtttatttcttatggaaaggcttcacctttcccaattgtgtattaagtcatgcacttgagtactatcaggacttgtaataattacaactctttctatgatgtaaaacttgagatttggaattgtaaaagtatgttttgtaaagtcttctgttctatctccgaagtgtttgtgtatcaaatgtgattactgtaatgtacatg

SEQ ID NO: 57877 - DNA, 483 bp, Zea Mays
ccaataagttcacggtgctgaagtagcaaagaatatgtccggtatttcatcacataaagcaaccaaaagaagtgtgccctactgtgtttcagagtaacaccagcaatccactttctaactggcactaccggactatgctacaccaattcaacggaacggaagcccagcaatgaaccccatgcactttctaactggcaccgaccacactatgctacaccaacccaaactagccaagtccttgacctacaacaatactctaatctaaataactgcctactgtcagatttcctaaaccaggcatcttgtacgcctacatcaaccttggggcctaaacacggtatttataagctgcttcaggttgctgcagggcaagatctcaatgtcaatatcaagtggtctgagcaacttctcggaggttttgggaacgacgcacttcttgtatcccagctttgaaatagcaatcactcgcttgtccattcttgg

SEQ ID NO: 57878 - DNA, 3217 bp, Zea Mays
gaagaatataagaaaaatagaacattactatattgtctcaaaaaaaacaaaattagcaaattaagcaattcagtaaacatggtcacaattatgccattatcatatcacatactcctagatacattcagagtgtgtgtcaatgcaccaaacaggtcagaatatcaacaaaccgcatgctctaatgttagtgcaaattagatcatcaaaccacattgatgcaagtaataaccctatatatagtggcagccaactgattgtatctcagagttaattaacaccaacaacaaaatgcaaagaaatatatattgcctgacatagtaatatgtatatatgtggacttacattatcctggagttttaggcctgcttgcttgatgaggacctagaacacaagaaagtatataccatttaacaaagtttaagtaagaaactcttggccaatcggttgaattgtgcctcacgggtgtatggctcattggctccaaccagggatcaaattttggttgtgcaacttggtgtgagcatgtcttagagaaaagtatgtacttctgctccttgaggtcatgaatttatgcctggtcgatgtaaaatcaacgcaagtaccagcacatgagtgtgcagaggcatgtgtgctttgtgtgattgtatcaatgggttgttgtgtcaaaaaaacattcacattccaggcctgtttggtttactacctagcttgccacactttgcctaacttttctgtctaaggttagttcttcaattcggatgactaaccttaagcaaagtgtggcacagttagccgtgaaccaaacagaccctccatatgttgattcctgtcaaacaataacccccttttttctcttattcaagcagaaatgcaaaaaaaacatgcaaacctaattctgcaagaggaaatgttttcaagtcgtccggctaatcgcgattagacggcctagtcgatagcttgtaaccaaccagccccaccgatgcgactagtccgaccagaatattagtcatccgattagtcgtccgattaggcatgggacgactaatttagacatgactgtagatgggctgggatgtaatcggatcgaatacggattgatatcactgaaaccatatttgtttttatatttttattcggattcgaattcgaatacgaatagcttcggatacgaatacgaatgttctcggatacaaatacggatagttgtgtcgaatatagagctagtcgaacacggatattgtcggtaacgaattttgtcggataccatataagacatcattccacacatatcatggttgtaatcatctatccactccttgagtccaaacattttttagcgttatatgtgtacatatttgtgtttttgtaaaaaatcatgaattattttgcataaaatcatcaaaatgcaaataagttaccaagactaataaacattctgtaaggatataacctcaagtctccacatgaaaatgataaagtgaagtattgattatcttgaaacttggatacttagagtgatttcacatgtaattcacgcaacaagtgaaagtgaaataaaaggaacactagcatattgtggattttatggtccaaatatttcggaggattatatgtggacatatgttatgcctccataaaatttcattaattactgaggctatttgtgcattattaatttctttctacaaaaaatcaacaaaatgcacacagctatcaggacaagatgtccaaatatccgagaagatttatccgagaaaatatccagatattcggtatccgaaagatatcagacatattgtattcgaattcgatatccgaacataatatccgtattcatatccgttatccgaaaaaaagtccggacatccaaaaattccaaccgaaccagtgttcaccatctttgaatccgaatccgaacggatattttccgaaccatattacatccctagatgggcatgggcttttggagctggggaacttgtgggctgcaatttgctttgtgggcatctagggttgagaacgctcaggcaacaactccagtctcagtctgcacagcgcacagccgccctccagtccgcataggcgcacatctaccctccagtgttgcacagctgccgacgaacggggaccaggagcatccggcacacacggttgcagccccttgccgacgaacacgagtgaagctcccgccgtcgccccaagacagagtcgccgcccaacccaaggtagagccaccacccaaggaggagccaccgtactccttgaccttgtgcagtgccctactccctgaccttatgtagcgcccctcgccatcaagatgagcacatcctcagataagtatatatgcatactatatcactatattactatacactatataagtatatattgttagagtgtttatgtactagaccctatctgggccttatgttagctggcccattagggttccccatatttgtacccttgtcctcctagggtttctaacactatccaacatatatgtccagaaacatatggacgactagctcgactagggtcgattagtagatctggtcgccgactaatcgactggtcagtagctatacgactaggttcgactagatgactagaaaacattggaaagagggccaaaatacataggataaactcaacagaggattgtccacattcataataagctaaactcattctaacaagatgtgttgttgaaatgagatgacacctaacccagtaactcagcttaaggtgttatggcagcaaaaagtcctctagctaagttggttaggtggtttgagtagcacacttcaggttcaaggttcgactccccgtgggactgaatttcagactgtgattaaaaaaatcccctcgtctgtcccacaccaaagcacaggtctaaagcctggtcccagtcgcgatcgtattctcacatgggctacggtgccgttgtgtatgagtggggcaagggttcgggggttttctcgacctgcgtgagctatcttaccccccacaggtcgagtttttttatggtgctgtggcaaagggttatgcaaccatgatcaaactaagcgaactcgactgacaaaatgatctaacgagatggatacgtaaaccaggtctggtgctagttatgcagctctaatggcaaaaattaataaaataacatttatgctaggtgtgctttattggttgagatgtattaacacttacagagatt

SEQ ID NO: 57879 - DNA, 454 bp, Zea Mays
cttaatgtatgcttggctgaaaggtaaagattgtgttcaaccagtgccataaaatttaagtgatggtttaccaggaacaataccaccaccaagcactcgagatatctccatcccgaaactcccccacctacaaaaaaaaatcgatagatccatatgtcatctactcataatgaaagaagaaagaacaaaattcttcaaagagttgcccattattgaattgcatggagataatatattcaggctgactcctacgtaagcaacagaacaaccacaaatttcaacatcataacttcgtctatctattcaattacttccctgatgcattagataagaagccactgaatacggccttcaaaaatttcccatgatgacaaaatattgatctgggtgagaaatgttacagaggtatgcgccactgtgcctgatcgacccccttgttcacctcctgaaggct

SEQ ID NO: 57880 - DNA, 2757 bp, Zea Mays
atgcccagaccccggcctccatcgtgcttgtctgcctcggcagcaagtacttcgtgtcggagcagcggcagcaacgccctcctttgcgtcgtgctcactagatcgggcctcgcatcggcgatctgtgcaattcctgttcggctatcggtttcatcggttgtcgatttcctattcgccattgtcatcctgtcggttgttcctatccgagctagcccagctcgccagccgtcgcgccctctttacccgttgagccgtgcgttgccgcgttcaccttgttgtgtcgtcgtggacttgtcggcgtgctgctgtggtacctggatcgcgctcgcctcaactcgaacgcgtcgtacgaccatcctcttcgtcgaatggaaatcgtcgcgctggcacgtcgaggtcgtcgatcgccatcctcatctacaccaagtcccaagccgtgaagacgctcttgtgctggcccgtgtcatcatcattcttatcgtggattgccaacgtcaatcgcctcgacaacaaccacatccacgactccgccgttccaataattttgccgcgccgctcttcaaatccgagtcctcgtccgtaggatcgtcgttgacctcgcaacttcagctcgagttaattatggtgagttgatctgttattcccgtcaactaaataaatggttggattaaatagatgcatctattgcgatgattctcttgtctattatttgatgtggaggttaaagttgaatttcgggtttatgtgatcagtgtattggtaaaatatatgtggtgtgacgatgctctacttgatagattaagtatagtgtgatgttttattagttaggatattttaaggattaattcaaaagagtggtttaaatagttagttaagttatttcggtccatacttcgagtttcgtgttccaaaataatgagtctaagtaattagtcttctagtattacgctttagtcaaatagaaaggtggaactcatatggtctattgttttcctaataaatgaatctaggtttgatagtcttctgttgttgggccttagctaaggaaagtagacgtgcgtataatttattgttccttgatgtttgagttaaatttggtaaaactagaaaattgtgattgttgtgtttagtgagttataggtgtctagtgcttacgtaggattgtgtcgatgtcttgccgctaagtatttgattctcttttctacatcatccggttactttatgctcatacatgtgcatcgtgcatctcatgaggtacgataaataatcgcgtgatgcggaagacgagccaagtcgacctcaagtgtgggctactccgcatggtgatactgatggacgaacctgcctgatcaagtgctaggacaaggatgatcatcaagtggacgtcgcctaacaacactaacctagtgttactcaggcaagccccggtgcatttgccacctccttgctgttttaaaatctttatcaccttatatgatgcattaggtgataggagttgtgtgctaaaccgttgatgcatttccttccttggaacattgatttcccttccttgataccctttttgaaaagaattttatgatgcttagccttgctttagcaaacaaaactattttattttaaaacaaaagtgatgcttcaatgggtgggaatgttttcaaaaagaaaaacttgtgatggtggatccatcagggccatgatgggttcaacatcggaaaagatgtacctctgtcaggtaccaaactttgggttgaaaataataaagctgagaccggacggttgacttgcacgagaagggagtctcggtgtagtgtctccgtctgagtcgatcaaggaccgtctcgatgtaggcttgctgatcgaggaccttttaactggtcacatgcctcatcatgggtaaactttgcctcgggcagactaataccagaataagataacacataatgggagtggagagatggcgagagtagcgtgtaccctcggtggcaagaggctggacggtggtgtatctgtgctctcggttggcgtgaacctgatctgatcttaagaaacccggtggcgagttgacatatgcaagggttaagtgctacatatgtcgtgtgattggagatccccagctggatattaatcgattcagatcgccgttacttcttggacatgaacacttggtcactgccctacacgtagcaatccagtgaactgaagggttgataaaaagacggctagtataggccaagtgcttgaactagggtagaaagaactctagatgcagataactttacttaacctgacaagtaaaaatggatttttaaggatccactcatagtaagcttttcggcaaacagagtccttgattcttgataagccataccttgaacccttttgtaaccagcatacccttgagagtcttttctttagtcgggtaagtcttgctgagtacttgtgtacttagggttttacccattgttgctgcaggtcgcgagtcactttggttgtgattggtgttaagcgccggtgggcacgaccttcttataagtataagtttttgtgcatggaagatgacaatgaggtcacttgagagtcacctgtggctgatgaatgggatatgctatccctgacttcatcaatatatgctagcccattattccgaagaggatttgatccaattaatttgcctagatatgggaatgtgattaatattcaggaaggcacacaaactggattagtcatataaatggagtgactacactctgcccagtt

SEQ ID NO: 57881 - DNA, 1517 bp, Zea Mays
gtctgctcgcccctctctgtctctctgcgagcagcagcatgccggagaagacctgtgtcctcgacgcgcgccaggtgtttgatgggagttattacgcaactcgtaggaagtgggacggggcagtaattccgcaactggccgtatatcattttttatttattaagcttcaaaaccaaagcgcaacaatcttcatgttcttcgctcagggtgcagatggttctcggggacgtggtttacacggctgtgccgttctacaagagggtgctgatggtcgaagaagacgcatttggcttgttggtgctgctcctcgtgcgagagaaggagccagtagtgccaccactgtccagcagcttgaggacttcaagatggccctagaactcattcagtttgatgccatgtttgatccttatgttaaatgtcggtctccaccaaagatacttgtcatcttgaatcctcgatctggacatggtagatctagcaaagtttttcatggaaaagtggaacccatatttaagaggtggcagcaggaccattggcaccttcatcaatttaagttcagtgtcagcggtgagaaattactaaaataaatggtaatatcccctaggtagctaagtttactttccttctttatttcagagaaactttgacccattttttttgaataaaattcatctaagatttgtgcagccaaccattagggttttgctatgcaaataaaattcatctaagattggtggccactgtaaagggctcgagtctggtactagcaaatgtgaaggttttgtagtttcttgaggacttcattatatagcatagagtcgtaccttgtgtttcaaaactttaaatagtactctgggttactttattgctgttaattgggaaaaaactgaatcagtctaatttttcactttgatgtcgtctttaaatccagttttcatcgtcgcgtgtatgcgtaataaaatgtcacttctgtactttgtgctattatgggaaaatccatcaccagcatgggataagttggtatttaacaaaataaaaggtagaccctgtggacgagtgagacttatgagtttagtcgcttctccgctatcagcagatgtcagatttgcatttgctttttcttgagcactttgttgctcatttgctcttgttttattgcttgattgtggccttatgtgcgctttgttgctgcatttctcaggttcgacatgccccgtgcctactatcactctcgatttgaagaagagtctcaagattctgcaagtgttgtgttactcctaattcagttaccttactggcaataggatgccattgcaacttctgaaagtgcaaccatctgattgaagcggatttaattatacaagatagatctagaattgctttacttgagattcaagcaatgttggatgcttttgtgacttatcatctctagagcttttgtaaatgatctagctagctatctgtaaatgatctagttgtgaatgatattataattgtgatgcttttgtgaatatata

SEQ ID NO: 57882 - DNA, 1549 bp, Zea Mays
tagcaaccctaggttgcctttctcccccaccattcagctgctgctgcccccgatttcgccgccgccacctcagattcgccgccgccgacaattcggatgctgccgccaacgattcagatgtcgccgcccccgattcagcctccgtcgccctggatttggcctccctgctcccgattcggcactgctgccccgaaacggcgccgccccttcccctctgccctatgccctcttgctgattcttacctagtcgacggggacaccttggatcttttgggcgcctggacgcctaggcgacgcctttaaaaacaatgcattgtacagatcacagctacatgggaacaatttttgatccggagagtggcgaccgtttgcacattgagctagctaaatcaacttcacgcagacctcgtggaggtgtcgaaggctaccgagttattgacaaacgggctaacaaaacagaaggaaatgctgaccatgaaaacgttggtgatgaagatgatgacgaagtatggggggaagatgaggatggaggcaatgacaataatggtgatggaggatcagatgagccatcgggcacagaaaatgaaaatcccagtgataagaatgaattgcctacggatcagagtgatcaaccagggcacaagcagcagaatgggcaatctctctcaaatgaaggacgagacaaatcttcaagtgatataccaccttgctctactatcttcattgcaaatttgggacatacatgcacagaggacgaactcaaggaagttttatccaaggaacctggatttcatgtccttaaaatgcgtcgccgtggtggaatgcctgtagcttttgctgattttacggatattgaatcgtctaccgctgctatgaatagactccaaggcactgtactggcatcttctgataacgatggattgcacattgagtacgcaaggtcgaagatgaggaaaagctaagttgttggactgcaaggattggcagtgtcatctcctgtctgtcttcctggaggctaccagtaggcatccctgcacacgtagctgcgtgtagctgcttgctaagcgtgagaatccagaacggtgctaattgtcctgtatgccattatacaatactccctcttttaaatcatgagatactctcttcgtttcaaattcaaattacagcccgtttggataattggaattgaattctattctaataatagtaatttagtcacatatcaattaagctaatacggttttatacaaaatatatttatatattattattagtaagatattagaaatatttgtgttatgttttactaaagacgagtgagctgaaaagcgtcctgtaaattgtagagtgaaaatatattgtactgatatataaaattatttttcatcctctatataggtttatatctaaactttagaaagtgacggaatattaaatttcaaattaaagaggttactttattaaataaattctaatttcttaagatcaaaacgcctcattataagatttctcggcacttcaaagtacatatatctaaaaaaacaaaaga

SEQ ID NO: 57883 - DNA, 1141 bp, Zea Mays
tttcagggaacaatttttgatccggagagtggcgaccgtttgcacattgagctagctaaatcaacttcacgcagacctcgtggaggtgtcgaaggctaccgagttattgacaaacgggctaacaaaacagaaggaaatgctgaccatgaaaacgttggtgatgaagatgatgacgaagtatggggggaagatgaggatggaggcaatgacaataatgtgatcaaccagggcacaagcagcagaatgggcaatctctctcaaatgaaggacgagacaaatcttcaagtgatataccaccttgctctactatcttcattgcaaatttgggacatacatgcacagaggacgaactcaaggaagttttatccaaggaacctggatttcatgtccttaaaatgcgtcgccgtggtggaatgcctgtagcttttgctgattttacggatattgaatcgtctaccgctgctatgaatagactccaaggcactgtactggcatcttctgataacgatggattgcacattgagtacgcaaggtcgaagatgaggaaaagctaagttgttggactgcaaggattggcagtgtcatctcctgtctgtcttcctggaggctaccagtaggcatccctgcacacgtagctgcgtgtagctgcttgctaagcgtgagaatccagaacggtgctaattgtcctgtatgccattatacaatactccctcttttaaatcatgagatactctcttcgtttcaaattcaaattacagcccgtttggataattggaattgaattctattctaataatagtaatttagtcacatatcaattaagctaatacggttttatacaaaatatatttatatattattattagtaagatattagaaatatttgtgttatgttttactaaagacgagtgagctgaaaagcgtcctgtaaattgtagagtgaaaatatattgtactgatatataaaattatttttcatcctctatataggtttatatctaaactttagaaagtgacggaatattaaatttcaaattaaagaggttactttattaaataaattctaatttcttaagatcaaaacgcctcattataagatttctcggcacttcaaagtacatatatctaaaaaaacaaaaga

SEQ ID NO: 57884 - DNA, 1216 bp, Zea Mays
tttcagggaacaatttttgatccggagagtggcgaccgtttgcacattgagctagctaaatcaacttcacgcagacctcgtggaggtgtcgaaggctaccgagttattgacaaacgggctaacaaaacagaaggaaatgctgaccatgaaaacgttggtgatgaagatgatgacgaagtatggggggaagatgaggatggaggcaatgacaataatggtgatggaggatcagatgagccatcgggcacagaaaatgaaaatcccagtgataagaatgaattgcctacggatcagagtgatcaaccagggcacaagcagcagaatgggcaatctctctcaaatgacgagacaaatcttcaagtgatataccaccttgctctactatcttcattgcaaatttgggacatacatgcacagaggacgaactcaaggaagttttatccaaggaacctggatttcatgtccttaaaatgcgtcgccgtggtggaatgcctgtagcttttgctgattttacggatattgaatcgtctaccgctgctatgaatagactccaaggcactgtactggcatcttctgataacgatggattgcacattgagtacgcaaggtcgaagatgaggaaaagctaagttgttggactgcaaggattggcagtgtcatctcctgtctgtcttcctggaggctaccagtaggcatccctgcacacgtagctgcgtgtagctgcttgctaagcgtgagaatccagaacggtgctaattgtcctgtatgccattatacaatactccctcttttaaatcatgagatactctcttcgtttcaaattcaaattacagcccgtttggataattggaattgaattctattctaataatagtaatttagtcacatatcaattaagctaatacggttttatacaaaatatatttatatattattattagtaagatattagaaatatttgtgttatgttttactaaagacgagtgagctgaaaagcgtcctgtaaattgtagagtgaaaatatattgtactgatatataaaattatttttcatcctctatataggtttatatctaaactttagaaagtgacggaatattaaatttcaaattaaagaggttactttattaaataaattctaatttcttaagatcaaaacgcctcattataagatttctcggcacttcaaagtacatatatctaaaaaaacaaaaga

SEQ ID NO: 57885 - DNA, 2041 bp, Zea Mays
gccgaggactgtcatttcgtctggacctagttctgaccgaacccaaccgttcccacttcccacaccgtctgcggtctgcctgaccgaaaccgaaccccccagcctacaccacccgctgtcctgatggcgacggaccccgcgccggtgccggcgatgcgctgctactcgctgccgccagtccgcctccccgcggaggacattctcttctgcgtcgacgttgacctcgaggcccgcgccgagatgaagtccgccgccgccgccgcagcgtcctcgggctccacctccaccgcttcgccgcagccgacgcagcccgcgggggccgggggtgccccggcggcggggccccggaccgtggtcaggcggatggacgcggtcaggcaggcgctgctgctgttcgtccacagcaagctcaccatgtgcccagagcaccgcttcgccttcgcctccctcggcgagacgttctccatgggcttcagcagtgatgctggtttcgcaatggaggcaatccattccttgtctgcttcagaaacaagatatgctatggctgatctgacccagctctttatgacagcttgccaggaagggaaaagagcagaatcgcaaggccggattctccgggtggtgctcatatactgccgttcctctacaaagccacagcatcagtggcccgtgaagccaaagaatttcaccctcgacataatctatctccacgacaagccaaatcctgacaactgcccacagaaggtatatgatgccttggtcgatgttcttgagcatgtcagccagtatgaggggtacattctcgagactggtcaagggcttgctcgcgtgctctttcgtcagatgtgcattcttgtatcccatcctttgcaacgttgcatgcaagatgaccttgatattcccaaacaagtcgctaagaaaatcgtggcagccgaacctgcacagaatgaagatgccgctccagtctccagccaacagtagggtcttctagttgaacggtatgcaaacatgaagttactcgcaagcggttggcattaccgttctactagatcagaatgcctgttctgtgtgatggagattccatcccagaatttgtgtactatgctttaactgtccaaggagtcatcctcttgcccccgtcccttgtttgcttgggtattcagcatgtagttgcacatgatacaaataactcaaatctttggcacttgaatttcatttgtttgcgaactttaagttgtgctgcaggtcgtatcatgttcagctcatctgagagaactctgctgaattttgtgttgtgctaggggaaccttctctgccgtgtaaccattaagccagagttatcttacatcatgaggcccctgtgattttcctagttgtttacatccagattgaggtcatgttagcaaagtaggaggatcattacaactccactttcagaactgaactgtagatggcattcattatagaagcgtcgaaattgacttggaattgttcagtgtctccatagtacataaaaagatcgtttgcaccgccagtgaagcaagtaagccattctgaattcgacatacatacatatatatacttccttgcattgcaagaacctccaacaccatctttgtacccggaaaccccttgcccttacacttaccctcacatttcctcgcaccctaacgcccaagtggctatttacagagacatcatgctggccgctgcattttgcttgcttatcagcagcaggggaagcaggagaacaagccgccctttcctgcctccggtttgcttcttgtctccggctgcggctccgccttcgcttcaactactggcggtgctggcgcggccttgaccgcctccgtcgttgctgctgctgcttccggctggtggtctcgatgagactgcttcttggagtagttcctcttgtcctctatcaaactgcgccatcagattttgttcatcagttggtccggtcgagaagattcagctttctaaaacaacaagaacgtgtcgcatggaacgaggtggcggtatgcgtagtactttggga

SEQ ID NO: 57886 - DNA, 1831 bp, Zea Mays
gccgaggactgtcatttcgtctggacctagttctgaccgaacccaaccgttcccacttcccacaccgtctgcggtctgcctgaccgaaaccgaaccccccagcctacaccacccgctgtcctgatggcgacggaccccgcgccggtgccggcgatgcgctgctactcgctgccgccagtccgcctccccgcggaggacattctcttctgcgtcgacgttgacctcgaggcccgcgccgagatgaagtccgccgccgccgccgcagcgtcctcgggctccacctccaccgcttcgccgcagccgacgcagcccgcgggggccgggggtgccccggcggcggggccccggaccgtggtcaggcggatggacgcggtcaggcaggcgctgctgctgttcgtccacagcaagctcaccatgtgcccagagcaccgcttcgccttcgcctccctcggcgagacgttctccatggtgaagaagggcttcagcagtgatgctggtttcgcaatggagcttgccaggaagggaaaagagcagaatcgcaaggccggattctccgggtggtgctcatatactgccgttcctctacaaagccacagcatcagtggcccgtgaagccaaagaatttcaccctcgacataatctatctccacgacaagccaaatcctgacaactgcccacagaaggtatatgatgccttggtcgatgttcttgagcatgtcagccagtatgaggggtacattctcgagactggtcaagggcttgctcgcgtgctctttcgtcagatgtgcattcttgtatcccatcctttgcaacgttgcatgcaagatgaccttgatattcccaaacaagtcgctaagaaaatcgtggcagccgaacctgcacagaatgaagatgccgctccagtctccagccaacagtagggtcttctagttgaacggtatgcaaacatgaagttactcgcaagcggttggcattaccgttctactagatcagaatgcctgttctgtgtgatggagattccatcccagaatttgtgtactatgctttaactgtccaaggagtcatcctcttgcccccgtcccttgtttgcttgggtattcagcatgtagttgcacatgatacaaataactcaaatctttggcacttgaatttcatttgtttgcgaactttaagttgtgctgcaggtcgtatcatgttcagctcatctgagagaactctgctgaattttgtgttgtgctaggggaaccttctctgccgtgtaaccattaagccagagttatcttacatcatgaggcccctgtgattttcctagttgtttacatccagattgaggtcatgttagcaaagtaggaggatcattacaactccactttcagaactgaactgtagatggcattcattatagaagcgtcgaaattgacttggaattgttcagtgtctccatagtacataaaaagatcgtttgcaccgccagtgaagcaaagacatcatgctggccgctgcattttgcttgcttatcagcagcaggggaagcaggagaacaagccgccctttcctgcctccggtttgcttcttgtctccggctgcggctccgccttcgcttcaactactggcggtgctggcgcggccttgaccgcctccgtcgttgctgctgctgcttccggctggtggtctcgatgagactgcttcttggagtagttcctcttgtcctctatcaaactgcgccatcagattttgttcatcagttggtccggtcgagaagattcagctttctaaaacaacaagaacgtgtcgcatggaacgaggtggcggtatgcgtagtactttggga

SEQ ID NO: 57887 - DNA, 2478 bp, Zea Mays
gccgaggactgtcatttcgtctggacctagttctgaccgaacccaaccgttcccacttcccacaccgtctgcggtctgcctgaccgaaaccgaaccccccagcctacaccacccgctgtcctgatggcgacggaccccgcgccggtgccggcgatgcgctgctactcgctgccgccagtccgcctccccgcggaggacattctcttctgcgtcgacgttgacctcgaggcccgcgccgagatgaagtccgccgccgccgccgcagcgtcctcgggctccacctccaccgcttcgccgcagccgacgcagcccgcgggggccgggggtgccccggcggcggggccccggaccgtggtcaggcggatggacgcggtcaggcaggcgctgctgctgttcgtccacagcaagctcaccatgtgcccagagcaccgcttcgccttcgcctccctcggcgagacgttctccatggtaccacggttcccctcatctgatcccttaatttctcggcaacatctagtcggtcttcgcgttctttgctcttgtcgacgagaaatttaggggacgattattcctatttgtgcagaactgttactagatgactacctgctgtctcatacagacatacagtcatactaccaatcacgatttgttctgtgacgtggtaatgtttgagcgcccaattcgaggtatgatgaggggatctacgtgagggagttctgtttaggctggatttaagttaagcgtggagtgagatattcgcccccaaatttccccaatcatcgtgcattattgttctgtagtttgctctgagagttattggtaaatcaaggtgcttattgtattttagtgtgcgataatatattggttaatataatctgtcccctttcaattttaaggtgaagaagggcttcagcagtgatgctggtttcgcaatggaggcaatccattccttgtctgcttcagaaacaagatatgctatggctgatctgacccagctctttatgacagcttgccaggaagggaaaagagcagaatcgcaaggccggattctccgggtggtgctcatatactgccgttcctctacaaagccacagcatcagtggcccgtgaagccaaagaatttcaccctcgacataatctatctccacgacaagccaaatcctgacaactgcccacagaaggtatatgatgccttggtcgatgttcttgagcatgtcagccagtatgaggggtacattctcgagactggtcaagggcttgctcgcgtgctctttcgtcagatgtgcattcttgtatcccatcctttgcaacgttgcatgcaagatgaccttgatattcccaaacaagtcgctaagaaaatcgtggcagccgaacctgcacagaatgaagatgccgctccagtctccagccaacagtagggtcttctagttgaacggtatgcaaacatgaagttactcgcaagcggttggcattaccgttctactagatcagaatgcctgttctgtgtgatggagattccatcccagaatttgtgtactatgctttaactgtccaaggagtcatcctcttgcccccgtcccttgtttgcttgggtattcagcatgtagttgcacatgatacaaataactcaaatctttggcacttgaatttcatttgtttgcgaactttaagttgtgctgcaggtcgtatcatgttcagctcatctgagagaactctgctgaattttgtgttgtgctaggggaaccttctctgccgtgtaaccattaagccagagttatcttacatcatgaggcccctgtgattttcctagttgtttacatccagattgaggtcatgttagcaaagtaggaggatcattacaactccactttcagaactgaactgtagatggcattcattatagaagcgtcgaaattgacttggaattgttcagtgtctccatagtacataaaaagatcgtttgcaccgccagtgaagcaagtaagccattctgaattcgacatacatacatatatatacttccttgcattgcaagaacctccaacaccatctttgtacccggaaaccccttgcccttacacttaccctcacatttcctcgcaccctaacgcccaagtggctatttacagagacatcatgctggccgctgcattttgcttgcttatcagcagcaggggaagcaggagaacaagccgccctttcctgcctccggtttgcttcttgtctccggctgcggctccgccttcgcttcaactactggcggtgctggcgcggccttgaccgcctccgtcgttgctgctgctgcttccggctggtggtctcgatgagactgcttcttggagtagttcctcttgtcctctatcaaactgcgccatcagattttgttcatcagttggtccggtcgagaagattcagctttctaaaacaacaagaacgtgtcgcatggaacgaggtggcggtatgcgtagtactttggga

SEQ ID NO: 57888 - DNA, 2268 bp, Zea Mays
gccgaggactgtcatttcgtctggacctagttctgaccgaacccaaccgttcccacttcccacaccgtctgcggtctgcctgaccgaaaccgaaccccccagcctacaccacccgctgtcctgatggcgacggaccccgcgccggtgccggcgatgcgctgctactcgctgccgccagtccgcctccccgcggaggacattctcttctgcgtcgacgttgacctcgaggcccgcgccgagatgaagtccgccgccgccgccgcagcgtcctcgggctccacctccaccgcttcgccgcagccgacgcagcccgcgggggccgggggtgccccggcggcggggccccggaccgtggtcaggcggatggacgcggtcaggcaggcgctgctgctgttcgtccacagcaagctcaccatgtgcccagagcaccgcttcgccttcgcctccctcggcgagacgttctccatggtaccacggttcccctcatctgatcccttaatttctcggcaacatctagtcggtcttcgcgttctttgctcttgtcgacgagaaatttaggggacgattattcctatttgtgcagaactgttactagatgactacctgctgtctcatacagacatacagtcatactaccaatcacgatttgttctgtgacgtggtaatgtttgagcgcccaattcgaggtgaagaagggcttcagcagtgatgctggtttcgcaatggaggcaatccattccttgtctgcttcagaaacaagatatgctatggctgatctgacccagctctttatgacagcttgccaggaagggaaaagagcagaatcgcaaggccggattctccgggtggtgctcatatactgccgttcctctacaaagccacagcatcagtggcccgtgaagccaaagaatttcaccctcgacataatctatctccacgacaagccaaatcctgacaactgcccacagaaggtatatgatgccttggtcgatgttcttgagcatgtcagccagtatgaggggtacattctcgagactggtcaagggcttgctcgcgtgctctttcgtcagatgtgcattcttgtatcccatcctttgcaacgttgcatgcaagatgaccttgatattcccaaacaagtcgctaagaaaatcgtggcagccgaacctgcacagaatgaagatgccgctccagtctccagccaacagtagggtcttctagttgaacggtatgcaaacatgaagttactcgcaagcggttggcattaccgttctactagatcagaatgcctgttctgtgtgatggagattccatcccagaatttgtgtactatgctttaactgtccaaggagtcatcctcttgcccccgtcccttgtttgcttgggtattcagcatgtagttgcacatgatacaaataactcaaatctttggcacttgaatttcatttgtttgcgaactttaagttgtgctgcaggtcgtatcatgttcagctcatctgagagaactctgctgaattttgtgttgtgctaggggaaccttctctgccgtgtaaccattaagccagagttatcttacatcatgaggcccctgtgattttcctagttgtttacatccagattgaggtcatgttagcaaagtaggaggatcattacaactccactttcagaactgaactgtagatggcattcattatagaagcgtcgaaattgacttggaattgttcagtgtctccatagtacataaaaagatcgtttgcaccgccagtgaagcaagtaagccattctgaattcgacatacatacatatatatacttccttgcattgcaagaacctccaacaccatctttgtacccggaaaccccttgcccttacacttaccctcacatttcctcgcaccctaacgcccaagtggctatttacagagacatcatgctggccgctgcattttgcttgcttatcagcagcaggggaagcaggagaacaagccgccctttcctgcctccggtttgcttcttgtctccggctgcggctccgccttcgcttcaactactggcggtgctggcgcggccttgaccgcctccgtcgttgctgctgctgcttccggctggtggtctcgatgagactgcttcttggagtagttcctcttgtcctctatcaaactgcgccatcagattttgttcatcagttggtccggtcgagaagattcagctttctaaaacaacaagaacgtgtcgcatggaacgaggtggcggtatgcgtagtactttggga

SEQ ID NO: 57889 - DNA, 2018 bp, Zea Mays
cggccacgcctccacaggccgcgtcgttcccgccggcatctcattcgctcgtctccgccggtcgacgttacgccgcgtcgccacacgcccccccggccgctcctatcgctaccacctctcctctcctgaagccacccggacgccggacgcaatggatttttcaaccgcatctacctcctctccccatggcgccgccgcccgcgccgcctgctgactggacccctgatctaaggcccgtagccagcgtgcccgtgcccatcaccgttccgagcccgcgggaccacactcaccaccaccaccacctagtcgatcgtcgggacacgccgcggggccgcgcgtgggagccggagcggaaccggcgcggagaggcgatggacggtgctgcagtggtcaagctgatgtccggcgaggctgggtatgtcttagaagacgtgccgcacgtgtcagactacctccccgatctcccgacctacccaaatccattacaagataacccggcatactccgttgtgaagcaatactttgtaaacccagacgacactgtctgccagaaggtatattttgaaccggatgaggtccatgcatgcattgtcacttgtggaggattgtgcccgggacttaatactgtgattagggaaattgtatgtggattatctgacatgtatggtgtcaccaagatacttgggattcagggtgggtatagaggcttctatgctcgcaacaccatcaccttgactccaaagattgtaaatgacattcacaaaaggggtggaactgttctcggatcatctcgaggaggccatgacaccgtgaagatagttgacagtatccaagatcgtggcataaatcaggtctatgtaattggtggtgacggtactcagaggggtgctggagtgatattcgaagaagttagaagacgcggcctcaaagtttctgttgctggcattccaaagactattgataatgacatccctgtaattgacaagtcatttggtttcgacacagcagttgaggaggctcaacgtgcaataaatgctgctcatgtggaagctgtaagtgctgagaatggtataggtctcgtcaagctaatgggccggcacagtggattgctgcttgatcccagaatcaccattctatctggaaggtgaaggcggactttttagatatatagaaagacgtttgaaggacaatggtcatatggttatcgttgtcgcggagggtgctggacagaaacttatcgctgaaaccatgcagtcaattgggaaagatgcttcaggcaatcagctgcttcttgatgttggtctttggttatctcagaagataaatgaatatttcaagaaaaacaagatgaccattaatctgaagtacatagatccaacgtacatgatacgtgccattcctagcaacgcctctgataatgtctactgcacactgctagctcacagtgtggtccatggagccatggctggatacactggtttcaccatcggtcaagtgaatggtcggcattgctatatccccttctacaggataacagagaagcagaacagggtctcgataaccgacaggatgtgggcaaggcttctgtcgtcgaccaaccagccgagcttcctctgcaacaaagtcatcgaagaggcaaagaaggagcaggaaagagcggcgcagcttttagatggctcgccttcccatcggaaggttgacgacgaggttgcagcttccaacttgggtcgtaccaagtgaggtgaacctttttttcctgtccaaagtttcagtagctatggcgaccggtgttgctgctgctcagtggtctgtgctccctgtccattttttttctaaaaaaagaacacgttatccctttctagtttaaacagagtgttgaataatatcgtgtgtataatttggctggcacatggctgactatctgaacatgccattttcagtgctattcaagtagattcttttgtaaatatatgtagacgcggaagtggaagagaataaaatatctgatatattaaaac

SEQ ID NO: 57890 - DNA, 1889 bp, Zea Mays
gctttttataagataaataaatcctattccgtctgctcatcttcaaagaacatttcaatgaaacaaatatttgggaaaaccaatggaaaaagaataaaaataaaaattgaaaaagagaagtggaggaaaagtagggttccattccacggcctgtcgagtgtcgacccacaaaccacgcaaccgatatattccccagcacccccagtctccagccgtccaaccgagacaccgcgtgcgaaccaagcagaccacaacaagaagaagcgtagtcgtcgccggaaggaaaggcgcggagcaagatgtcgtggcaggcgtacgtcgacgagcacctgatgtgcgagatcgaaggacagcatctcagcgccgccgccatcgtcggtcacgacggcagcgtttgggcgcagtccgagagcttccccgagttaaagcctgaggaggttgctggtatcataaaggactttgatgaacctggtactcttgcaccaactggtcttttcgttggaggtacaaagtacatggtgatccaaggtgaacctggagttgtcatccgaggaaagaaggtacagtggggaacagattgtctgatagaagaaatgctttgatcattccctttttcgtatgcttatgttaattttaccgaaaaaacaaactcaattcatatttgtagtactccctccattcttttttatttgttgcgttttagctcaaaaatgaactaacggtcgacaaatattcgaaagcggaggaagcactatattagtgttatgatatctaaatggatcaagctcttatagaattattacgcaagaggaatactgtatcaaatatgcctggatacatggtcatgatcactttcagttaattaatattcctgctgaactctgttagctgcatctgcaagtttttgtagcatgtattcaagatcactctacgcagtgggcagtaatttgtactgtaggccgtatcaccttgtggtttgtgtacgttgtcattaaatcatggttgcatccattaaataatgaaaactgacttgtaacatggcacactagttagcagcgaatccttagactgccactagttgatgtacaataatctactccggagtggtatttcttagtcatataagaaatgtttaaatacttccctcccacatctcagtaaacatgtgaaaacacactcttgaaaacgccttttgatttaccctgttgtttccatatccattacagggcactgggggcattactatcaagaaaaccggcatgtccttgattattggtgtctacgacgagccaatgactccagggcaatgcaacatggtggtggagaggctcggcgattacctgatcgagcagggcttctaaaagttcgtcatgttctgttttggtcatttgggcaccaaagtttgcgcctcatttggttctgtaatccgtgagctcgtgcatgtacttggcgtattgcatgcagtgaataatttagcttgggtttgtttgttgggggcagtgttggggacggatttggattggggtttatgcttggcatcgcgtcgtatcgaaactcagctgctgtttcgctgagtaatgtacatttccctggtaatggtacttgtggactctgatgcttttatgggaacgagtgcattttactgccgtgcttggccgtgctgttgaattattcccgtagtgtattaaatattggatgcaccagattgtttgtcccatttacgcataattttcccgtcatatgttgaattatttacgaattataaaatatgtaatttatatttatttttatgaagtatataaaattttacttttttgttatataattaaatattttttgttttgataaaatggtatgttttattttaaataaaaatctataaaaaaaga

SEQ ID NO: 57891 - DNA, 711 bp, Zea Mays
gagatccaccagcactctccagcttagcgttatcaccctgtagagagagaacaatagtctgcctttaaagtatttcaagtgaatgagcaaatcagatactatgctaaaatgaagtgcttatcatcatgtcacaatccacaaagcctagcacaataacagcacaaatctgaaactctagtgcaccatcagccagttaacagaggatagattaattttcaacttaaatttttccacaacggtaagaccgaattccattacttctgcaacgaaatcacaaagttcagtaactcagttctgcaacaaactaaagcgaaacatatgtcgacatgtctctgatcaccaagggatcagcaaatatgtgtcccaaaacaattttcaacctaaatatcttatgcattaattttctctacgtagatgccagaaagaatgtcactcttataggctcttaaacatgtttgcaacaacaatctgaatattcatcatcaaaggtcataagtttaagtgtatgaagccaatcaaccatgaactatgcaagaaataaacgcatgcatatcaagaaacgatgcctatgtttatcagcagtctaaaagaccttaaagttgaagctagtaggctattaatgatatggaggaaaaagagataaaaaaagaaaatgtatacgtggcaacttgccttagaagaaccatgctcggagaagcctaagtttggaac

SEQ ID NO: 57892 - DNA, 257 bp, Zea Mays
cgcacggctcgtgtctgtgagctagagctttttgagtacgtgcgcgcttggcgaggagtgagatacctagctgcgaggaagcgagcgctgttgcgttttgagtaggtgcgcgcttggtgggggtgcggtacggttggcggttgcttccgggcttccggtagggatcgggggggagaagaattagacgacagacgaagcggtggtcaaagctcaggccgcaggcgtgcagtgctgcgtgggagagggagtgtgggacg

SEQ ID NO: 57893 - DNA, 1701 bp, Zea Mays
tttgtactcagatttccgctgaaattatattggttctaaacaattacaagtgagaaatatacttttgtatacttttcttggaccgcgtcccaccatccgatcttatggaccgcgtccaccgaaccgcgcagacaagtagtgtcaacaccgaagacacatcccgatacaccgcgtccatgcagcagaactcctttcccctccgcccttccctctccagctccctcccgccacgagccccttatcctccaacggccaacgatcaccccggcatcctcccgcccatgtccgccgcggccgatgaccgcgcgcgccgcgccgccgcgttccgccccgccccgctccctccgcctgcgcagaagcagcagctctccggcgtggccgccgccgtgctcgacgccgggggacgcctgggccgcgccgtgggcgacgtcttccgccgcctccgcatcgacgacaccttctactccggcggcggcggcggcggcggcggcgcgccgaatcggagctggcgcgacgccgggaacaatggcgggaggccggcggccgccggagccccggctgcggccagcagggaggaggccacaggcggcggcgcctcctccgggcggttcgcgcgggcgcaggggagcatgaacctgtcggcgacgtacgacagcaggacgcacgacgtggagagctcggtggtggccagaggcgacctgtggcgcgcggaggcgtcgcacagcagcagcagcagcgccggcgccggcggcaatggagccaataacaacctgttcctcgtgcagctcggtcctgtcctcttcgtccgcgacacgacgctactcttcccggtgcacctctccaagcggcacctcatctggtacggattcgagcgcaagaacggagtgcactcggtctgccccgcgtactggtcggcccacaagagatggttcttcatgtccatgctatgcctgaacccgttcgctttttcgttcatggacatgcaattcccaaacgggcaactgaggtacgtcgccggcgacggcttcacggcgcgtgctttcctgcccctccgtggcggggtcttgcaagcccacggaaagttcccgggggagaagaggctcagcttctctttcaaggaatggcggcagcgtcgtcccgatggttcagtggccggataagtcactctcggtgggggtcgtccaggcgttgtcttggaggagatccggcctgatgctgcagccagcaacacagatcagcatatgtcctacgatcggcgggcgccatcctggggtgtgcgtggagctgatccactcggcggacgacaacgtcggcgtagtctgcggctactcccacaccgcttcttcccctgcttccgcatacgcctccatatcgatcggaaggtcgaagctgaacggcggagcggcaaggtcagggttagcgttcagagtagacgctccactactccacggttttggccggccatggttctcggtccagatgaacagcggcatcgagttctgattccccactgtcttgccgttgccatgactgaacgaacgaacttactgtacagtagttgatgttgtgtataaagcttgacgacgactcactgatgccatgagtatacgcagtaaacgctacaacactatatgtttggtcgctggctaacttatcataatatgtctattttttattgagaaattagacattttctaaatt

SEQ ID NO: 57894 - DNA, 1682 bp, Zea Mays
tttgtactcagatttccgctgaaattatattggttctaaacaattacaagtgagaaatatacttttgtatacttttcttggaccgcgtcccaccatccgatcttatggaccgcgtccaccgaaccgcgcagacaagtagtgtcaacaccgaagacacatcccgatacaccgcgtccatgcagcagaactcctttcccctccgcccttccctctccagctccctcccgccacgagccccttatcctccaacggccaacgatcaccccggcatcctcccgcccatgtccgccgcggccgatgaccgcgcgcgccgcgccgccgcgttccgccccgccccgctccctccgcctgcgcagaagcagcagctctccggcgtggccgccgccgtgctcgacgccgggggacgcctgggccgcgccgtgggcgacgtcttccgccgcctccgcatcgacgacaccttctactccggcggcggcggcggcggcggcggcgcgccgaatcggagctggcgcgacgccgggaacaatggcgggaggccggcggccgccggagccccggctgcggccagcagggaggaggccacaggcggcggcgcctcctccgggcggttcgcgcgggcgcaggggagcatgaacctgtcggcgacgtacgacagcaggacgcacgacgtggagagctcggtggtggccagaggcgacctgtggcgcgcggaggcgtcgcacagcagcagcagcagcgccggcgccggcggcaatggagccaataacaacctgttcctcgtgcagctcggtcctgtcctcttcgtccgcgacacgacgctactcttcccggtgcacctctccaagcggcacctcatctgaacggagtgcactcggtctgccccgcgtactggtcggcccacaagagatggttcttcatgtccatgctatgcctgaacccgttcgctttttcgttcatggacatgcaattcccaaacgggcaactgaggtacgtcgccggcgacggcttcacggcgcgtgctttcctgcccctccgtggcggggtcttgcaagcccacggaaagttcccgggggagaagaggctcagcttctctttcaaggaatggcggcagcgtcgtcccgatggttcagtggccggataagtcactctcggtgggggtcgtccaggcgttgtcttggaggagatccggcctgatgctgcagccagcaacacagatcagcatatgtcctacgatcggcgggcgccatcctggggtgtgcgtggagctgatccactcggcggacgacaacgtcggcgtagtctgcggctactcccacaccgcttcttcccctgcttccgcatacgcctccatatcgatcggaaggtcgaagctgaacggcggagcggcaaggtcagggttagcgttcagagtagacgctccactactccacggttttggccggccatggttctcggtccagatgaacagcggcatcgagttctgattccccactgtcttgccgttgccatgactgaacgaacgaacttactgtacagtagttgatgttgtgtataaagcttgacgacgactcactgatgccatgagtatacgcagtaaacgctacaacactatatgtttggtcgctggctaacttatcataatatgtctattttttattgagaaattagacattttctaaatt

SEQ ID NO: 57895 - DNA, 1435 bp, Zea Mays
cctcccgcccatgtccgccgcggccgatgaccgcgcgcgccgcgccgccgcgttccgccccgccccgctccctccgcctgcgcagaagcagcagctctccggcgtggccgccgccgtgctcgacgccgggggacgcctgggccgcgccgtgggcgacgtcttccgccgcctccgcatcgacgacaccttctactccggcggcggcggcggcggcggcggcgcgccgaatcggagctggcgcgacgccgggaacaatggcgggaggccggcggccgccggagccccggctgcggccagcagggaggaggccacaggcggcggcgcctcctccgggcggttcgcgcgggcgcaggggagcatgaacctgtcggcgacgtacgacagcaggacgcacgacgtggagagctcggtggtggccagaggcgacctgtggcgcgcggaggcgtcgcacagcagcagcagcagcgccggcgccggcggcaatggagccaataacaacctgttcctcgtgcagctcggtcctgtcctcttcgtccgcgacacgacgctactcttcccggtgcacctctccaagcggcacctcatctggtacggattcgagcgcaagaacggagtgcactcggtctgccccgcgtactggtcggcccacaagagatggttcttcatgtccatgctatgcctgaacccgttcgctttttcgttcatggacatgcaattcccaaacgggcaactgaggtacgtcgccggcgacggcttcacggcgcgtgctttcctgcccctccgtggcggggtcttgcaagcccacggaaagttcccgggggagaagaggctcagcttctctttcaagaacaggaatggcggcagcgtcgtcccgatggttcagtggccggataagtcactctcggtgggggtcgtccaggcgttgtcttggaggagatccggcctgatgctgcagccagcaacacagatcagcatatgtcctacgatcggcgggcgccatcctggggtgtgcgtggagctgatccactcggcggacgacaacgtcggcgtagtctgcggctactcccacaccgcttcttcccctgcttccgcatacgcctccatatcgatcggaaggtcgaagctgaacggcggagcggcaaggtcagggttagcgttcagagtagacgctccactactccacggttttggccggccatggttctcggtccagatgaacagcggcatcgagttctgattccccactgtcttgccgttgccatgactgaacgaacgaacttactgtacagtagttgatgttgtgtataaagcttgacgacgactcactgatgccatgagtatacgcagtaaacgctacaacactatatgtttggtcgctggctaacttatcataatatgtctattttttattgagaaattagacattttctaaatt

SEQ ID NO: 57896 - DNA, 944 bp, Zea Mays
ttttttccctttccatttcgtctcgtactcgtcccggctcgttgctggagggagacgaggagaggaaatctcccgctgacttttcccgtgtccgtgtcgtgttgcctgcgtccgccgttggccagccgcgacccgtcggcatctcctctcgggtctcctcacccgcgcgggagcgggtggttgctgcggcggttgacgacttgacgtttagtagtagagagggacccggccggcagttaaagccgacgcgagagaaccgaggcgagaggggatatggggaaccaggtcgggggccggcggcggacgagcgctacacgcgcccgcaggggctgtacccgcacccggacatcgacctcaggaagctccgccgcctcatcctcgaggccaagctcgcgccctgccaccctggcgccgacgacgcgcgcgctgacctcgacgagtgccccatctgcttcctgttctaccccagccttaaccgctccaagtgctgcgccaaggggatttgcacggagtgcttcctccagatgaagtcccccacctcgtgcaggccgacgcagtgtccatattgcaagacgctgaattacgcagtggagtaccgcggcgtgaagaccatggaggagaagggcatagagcagcttgaggagcagagggtcatcgaggcgcagatcaggatgcggcggcaggagctacaggacgatgcagagcggatgaagaacaagcaggctgcgcctttgagtgacgtagtagcatctgcacaagttgattcttgcagtactgacggtgcatcaacagtagctgcaagcagtccgcgaggcaacgatgctctctcgtccgaagtgcagcgttcggagttgatattgaggaattctgaagtcttccaacagaggagattcagttttgttggaagcattgtgattattgttgcattgaattattggggatga

SEQ ID NO: 57897 - DNA, 1599 bp, Zea Mays
ttttttccctttccatttcgtctcgtactcgtcccggctcgttgctggagggagacgaggagaggaaatctcccgctgacttttcccgtgtccgtgtcgtgttgcctgcgtccgccgttggccagccgcgacccgtcggcatctcctctcgggtctcctcacccgcgcgggagcgggtggttgctgcggcggttgacgacttgacgtttagtagtagagagggacccggccggcagttaaagccgacgcgagagaaccgaggcgagaggggatatggggaaccaggtcgggggccggcggcggacgagcgctacacgcgcccgcaggggctgtacccgcacccggacatcgacctcaggaagctccgccgcctcatcctcgaggccaagctcgcgccctgccaccctggcgccgacgacgcgcgcgctgacctcgacgagtgccccatctgcttcctgttctaccccagccttaaccgctccaagtgctgcgccaaggggatttgcacggagtgcttcctccagatgaagtcccccacctcgtgcaggccgacgcagtgtccatattgcaagacgctgaattacgcagtggagtaccgcggcgtgaagaccatggaggagaagggcatagagcagcttgaggagcagagggtcatcgaggcgcagatcaggatgcggcggcaggagctacaggacgatgcagagcggatgaagaacaagcaggctgcgcctttgagtgacgtagtagcatctgcacaagttgattcttgcagtactgacggtgcatcaacagtagctgcaagcagtccgcgaggcaacgatgctctctcgtccgaagtgcagcgttcggagttgatattgaggaattctgaagtcttccaacagaggaggggaaataattttgatgtggatcttgaagaagtaatgcttatggaggcaatttggctctctgtacaagatcaggaagctttgggaaatccaggatgtgttagcactaccccgtcatcaattccttcgagacctttggatggcgctatgacaacggctggtgaagcagcttctcccggtggatttgcttgtgcagttgcagctttagctgaacagcagcatatgcatggacagtcttctagtgcatcggcttgccaaacaacaaggtttgacatccttagcagatcagacagatcatttacggaggatctgagtgtagttgggaacagttcttcagactccagagtcgacgaaccgtcaagcagcagtacgcaccgaacagtagagggttcaaacggctggtggtccgaggtggctgaggctggaaccaggatcgctgaatctgatgttacagtggaggctggtgttggcaattcgtccacttcagctgtgtccaacattggctcgggcagtgttcctgatagcttcgaggagcagatgatgctagccatggctctttcgctggtcgatgcgcgtgctagggcaggttctccagggttagcttggcggtagcgtttgttagtaggccatttcactccctttatttgttctttttcggtttgtgctgcgttttgttcttattgccatttaaaacgcaggattagatgaggaa

SEQ ID NO: 57898 - DNA, 969 bp, Zea Mays
gccgtcaacgggtgccgctccagcttcagtccgacggtagccctcccccaaccatcttcggtggtttcatcatcgacgtccccgaacaacctccccgaggttctcccgaaccctagcgagccgcagtacccacgatcgtcgtcgaccgtgaacaaagttttgactaaaaaccatgaagcacgtggaccgtcctccgaataatcccaaaggtataacaattcagtcaagccaggagtgtttcagtgttgacattccgtgcgcagaacagtcaaatccaagtcaaattatgggaaatcctccaaatgctgacagtcaaactttgatcaatgagacagtagaggtggattctgatgacaatgactttatgccagctgttaagaagcgtaatgtttctgtaagccatacaagagttctaagaaaagttgtgaccaagaggataaaagcgaaggatcttccccgccagaggctcaatgtcaggtgcaaccctcaagatgtaattgcaagcattcacatattgaatgacagacaacgtcaggccataagacgtaaagggttctctaacattcttgatatgacattagatgctttgtgtggtagatcccacctttgctggttgatggataagcttgactacaaggacatgacaattcgtcctggtccaggaaaggaattaaaaatcacaaaggacattgtgcatcttatacttggtgtaccaaatcatggcggtggaaaaccattggggattgatgaagcagttgtagcaagtaatttgagggcagagcttggtttggctaaagacgagttcaatgtgacattgttacagtatcgtttaaggaaaggggaggatgatgaccttaccatcagatgtttcttccttatcttattcaaccatctgttgtttccaactgctagctggggcataacaaaccatgaagtgcttttttgacagaagaaatgcaccgtttccac

SEQ ID NO: 57899 - DNA, 2464 bp, Zea Mays
aaccgctacccatcgcaaacgctttccctccactcgtccgctccggccgcgcgcctccgccccacgccgatgccgcccccgcccccaccgcctctcggcctccgcctccgtctctccctcctcccgccccaccctatcgctccttctatccgtcatgccttctgctcaccctccgtcgtgtcctgccatctttcggtgcgccccctcgcccaacgccgcggtgggcgcccgcgccccctctgcgccgcgcggggcgaggccgaggcggagggcttcgcgtggccggatgggtccgaggaggagctgcggcggctcctggagctgctccctagggagctgagtcggcgggtggagacccacccagagctcccggcgctcgtggaggtggtcatggacctcggccggcccccgctcgcgcgcttcccgtccggagacttcctcctctcccaacgccccatctccttcgacgacctccgtcacgctacctcccactcccaggttggggactttggagcggataatcgtgctggaatcagccgcacgctgcaccggatcagcgccattaggaatcggaagggcgtcattgtcggcctcacatgccgtgttgggcgtgcagtgcccgggagcgctaatttgcttcaggatttggttaaggacggtggctcattgctgctcatcggcccacctggggtggggaagactactgtcataagagaaattgcccgtatgttagctgatgactataagaagcgcgtgatgattgtcgacacatctaatgagattggtggggatggtgatattcctcacccaggaataggcaatgcacgtaggttgcaagtgcctaaccaagacatgcagcataaggtactgatagaagctgtggaaaaccatatgcctcaggcgattgttattgatgaaattggaactaaactagaggccatggctgcaagcaccattgcacagaggggcatacagcttgtggcaactgcccatggggtaacgatagagaatctgatcatgaacccatcactagagatgcttgtgggaggaatacagagtgtcacacttggtgatgaagaagctaaccggagaggagttcaaaaaactgttctggagcgcaagggcccatcaacatttacatgtgctgcagagatcgtctccaaaaaagaattacgtgtccatcgtagtttggaagccacggtagatgctttactcgcaggtaagctgcctaattttgaaattcgaaagttgggttcaaagggatctatgcaggaagtttctgtgcaaaaggaacaatcacatcttggtatttatgatgcaactgaatttggcagtgactctctaaggaatgccagaagaagcttagactctgcatttagtcttgactctgctgaagggcatatagtgaggtcagatggagctgattcaagctttaatctttatgcatatggggatgttctagatctccgagtcgactgccttgcaagccattcatcagctggagttggacgacagtgttactttaacttataatatcagtgaagctgatgcagtgatcgcgttacattcaaagctcaagaagaactatcagattcaggctgtgctgaaatctcaagatataccggttttcctcgtaaagacaaactccctgcctcaaatcaccagggcactccgtgctcttgtcgacgatcacatggacgaagtgatagactacaatgataaagaagaagcaaggtcatcagaagaaaccgatgctctggaggaggcaaggctggcaatcgagcaagtagtgattccgaaaggcgagagcgtgcagctactgccaaggccatcaagcatcatctcgtcccaagtgggtctcgtcgaaagcttcagcctcaagtgggaggtcgtaggccaggagcctaaggcatgcgtgaggatccttccgcactttgcgccaaaacaagtcgaagctgtcgcgcgagaaaccccagcggagcccgccgactcggactgggagagccacgatgactcggatcatacccagagtggcatcaccaggctacctttcctaccggattagcgcggcgtctggcgtatcctttcagttcttcgtggccctgccgcctgctgtgtatgtattccatttatttatcttggtaataacttgcaccagaaagcacttgcgtggttgcgtctatctacctacgtaatataagtggatagtgctccgatccggcctctacgcgcgcgtacagatatatacagtatctaatctgttgtcgacccgtacagtcatatcatccatgcatctcttcccattttttacatgctctgccaattccccaagtgctgcgtatccgttctaatctagtactaccgaacaagataaagcagcaagctagcatataatcgggtcgttgtgtttgtgccttttgactagttgtccaataatataattaagctccatccttgtacttgt

SEQ ID NO: 57900 - DNA, 2349 bp, Zea Mays
aaccgctacccatcgcaaacgctttccctccactcgtccgctccggccgcgcgcctccgccccacgccgatgccgcccccgcccccaccgcctctcggcctccgcctccgtctctccctcctcccgccccaccctatcgctccttctatccgtcatgccttctgctcaccctccgtcgtgtcctgccatctttcggtgcgccccctcgcccaacgccgcggtgggcgcccgcgccccctctgcgccgcgcggggcgaggccgaggcggagggcttcgcgtggccggatgggtccgaggaggagctgcggcggctcctggagctgctccctagggagctgagtcggcgggtggagacccacccagagctcccggcgctcgtggaggtggtcatggacctcggccggcccccgctcgcgcgcttcccgtccggagacttcctcctctcccaacgccccatctccttcgacgacctccgtcacgctacctcccactcccaggttggggactttggagcggataatcgtgctggaatcagccgcacgctgcaccggatcagcgccattaggaatcggaagggcgtcattgtcggcctcacatgccgtgttgggcgtgcagtgcccgggagcgctaatttgcttcaggatttggttaaggacggtggctcattgctgctcatcggcccacctggggtggggaagactactgtcataagagaaattgcccgtatgttagctgatgactataagaagcgcgtgatgattgtcgacacatctaatgagattggtggggatggtgatattcctcacccaggaataggcaatgcacgtaggttgcaagtgcctaaccaagacatgcagcataaggtactgatagaagctgtggaaaaccatatgcctcaggcgattgttattgatgaaattggaactaaactagaggccatggctgcaagcaccattgcacagaggggcatacagcttgtggcaactgcccatggggtaacgatagagaatctgatcatgaacccatcactagagatgcttgtgggaggaatacagagtgtcacacttggtgatgaagaagctaaccggagaggagttcaaaaaactgttctggagcgcaagggcccatcaacatttacatgtgctgcagagatcgtctccaaaaaagaattacgtgtccatcgtagtttggaagccacggtagatgctttactcgcagtgactctctaaggaatgccagaagaagcttagactctgcatttagtcttgactctgctgaagggcatatagtgaggtcagatggagctgattcaagctttaatctttatgcatatggggatgttctagatctccgagtcgactgccttgcaagccattcatcagctggagttggacgacagtgttactttaacttataatatcagtgaagctgatgcagtgatcgcgttacattcaaagctcaagaagaactatcagattcaggctgtgctgaaatctcaagatataccggttttcctcgtaaagacaaactccctgcctcaaatcaccagggcactccgtgctcttgtcgacgatcacatggacgaagtgatagactacaatgataaagaagaagcaaggtcatcagaagaaaccgatgctctggaggaggcaaggctggcaatcgagcaagtagtgattccgaaaggcgagagcgtgcagctactgccaaggccatcaagcatcatctcgtcccaagtgggtctcgtcgaaagcttcagcctcaagtgggaggtcgtaggccaggagcctaaggcatgcgtgaggatccttccgcactttgcgccaaaacaagtcgaagctgtcgcgcgagaaaccccagcggagcccgccgactcggactgggagagccacgatgactcggatcatacccagagtggcatcaccaggctacctttcctaccggattagcgcggcgtctggcgtatcctttcagttcttcgtggccctgccgcctgctgtgtatgtattccatttatttatcttggtaataacttgcaccagaaagcacttgcgtggttgcgtctatctacctacgtaatataagtggatagtgctccgatccggcctctacgcgcgcgtacagatatatacagtatctaatctgttgtcgacccgtacagtcatatcatccatgcatctcttcccattttttacatgctctgccaattccccaagtgctgcgtatccgttctaatctagtactaccgaacaagataaagcagcaagctagcatataatcgggtcgttgtgtttgtgccttttgactagttgtccaataatataattaagctccatccttgtacttgt

SEQ ID NO: 57901 - DNA, 2372 bp, Zea Mays
aaccgctacccatcgcaaacgctttccctccactcgtccgctccggccgcgcgcctccgccccacgccgatgccgcccccgcccccaccgcctctcggcctccgcctccgtctctccctcctcccgccccaccctatcgctccttctatccgtcatgccttctgctcaccctccgtcgtgtcctgccatctttcggtgcgccccctcgcccaacgccgcggtgggcgcccgcgccccctctgcgccgcgcggggcgaggccgaggcggagggcttcgcgtggccggatgggtccgaggaggagctgcggcggctcctggagctgctccctagggagctgagtcggcgggtggagacccacccagagctcccggcgctcgtggaggtggtcatggacctcggccggcccccgctcgcgcgcttcccgtccggagacttcctcctctcccaacgccccatctccttcgacgacctccgtcacgctacctcccactcccaggttggggactttggagcggataatcgtgctggaatcagccgcacgctgcaccggatcagcgccattaggaatcggaagggcgtcattgtcggcctcacatgccgtgttgggcgtgcagtgcccgggagcgctaatttgcttcaggatttggttaaggacggtggctcattgctgctcatcggcccacctggggtggggaagactactgtcataagagaaattgcccgtatgttagctgatgactataagaagcgcgtgatgattgtcgacacatctaatgagattggtggggatggtgatattcctcacccaggaataggcaatgcacgtaggttgcaagtgcctaaccaagacatgcagcataaggtactgatagaagctgtggaaaaccatatgcctcaggcgattgttattgatgaaattggaactaaactagaggccatggctgcaagcaccattgcacagaggggcatacagcttgtggcaactgcccatggggtaacgatagagaatctgatcatgaacccatcactagagatgcttgtgggaggaatacagagtgtcacacttggtgatgaagaagctaaccggagaggagttcaaaaaactgttctggagcgcaagggcccatcaacatttacatgtgctgcagagatcgtctccaaaaaagaattacgtgtccatcgtagtttggaagccacggtagatgctttactcgcaggtaagctgcctaattttgaaattcgaaagttgggttcaaagggatctatgcaggaagtttctgtgcaaaaggaacaatcacatcttggtatttatgatgcaactgaatttggcagtgactctctaaggaatgccagaagaagcttagactctgcatttagtcttgactctgctgaagggcatatagtgaggtcagatggagctgattcaagctttaatctttatgcatatgggctgatgcagtgatcgcgttacattcaaagctcaagaagaactatcagattcaggctgtgctgaaatctcaagatataccggttttcctcgtaaagacaaactccctgcctcaaatcaccagggcactccgtgctcttgtcgacgatcacatggacgaagtgatagactacaatgataaagaagaagcaaggtcatcagaagaaaccgatgctctggaggaggcaaggctggcaatcgagcaagtagtgattccgaaaggcgagagcgtgcagctactgccaaggccatcaagcatcatctcgtcccaagtgggtctcgtcgaaagcttcagcctcaagtgggaggtcgtaggccaggagcctaaggcatgcgtgaggatccttccgcactttgcgccaaaacaagtcgaagctgtcgcgcgagaaaccccagcggagcccgccgactcggactgggagagccacgatgactcggatcatacccagagtggcatcaccaggctacctttcctaccggattagcgcggcgtctggcgtatcctttcagttcttcgtggccctgccgcctgctgtgtatgtattccatttatttatcttggtaataacttgcaccagaaagcacttgcgtggttgcgtctatctacctacgtaatataagtggatagtgctccgatccggcctctacgcgcgcgtacagatatatacagtatctaatctgttgtcgacccgtacagtcatatcatccatgcatctcttcccattttttacatgctctgccaattccccaagtgctgcgtatccgttctaatctagtactaccgaacaagataaagcagcaagctagcatataatcgggtcgttgtgtttgtgccttttgactagttgtccaataatataattaagctccatccttgtacttgt

SEQ ID NO: 57902 - DNA, 2262 bp, Zea Mays
aaccgctacccatcgcaaacgctttccctccactcgtccgctccggccgcgcgcctccgccccacgccgatgccgcccccgcccccaccgcctctcggcctccgcctccgtctctccctcctcccgccccaccctatcgctccttctatccgtcatgccttctgctcaccctccgtcgtgtcctgccatctttcggtgcgccccctcgcccaacgccgcggtgggcgcccgcgccccctctgcgccgcgcggggcgaggccgaggcggagggcttcgcgtggccggatgggtccgaggaggagctgcggcggctcctggagctgctccctagggagctgagtcggcgggtggagacccacccagagctcccggcgctcgtggaggtggtcatggacctcggccggcccccgctcgcgcgcttcccgtccggagacttcctcctctcccaacgccccatctccttcgacgacctccgtcacgctacctcccactcccaggttggggactttggagcggataatcgtgctggaatcagccgcacgctgcaccggatcagcgccattaggaatcggaagggcgtcattgtcggcctcacatgccgtgttgggcgtgcagtgcccgggagcgctaatttgcttcaggatttggttaaggacggtggctcattgctgctcatcggcccacctggggtggggaagactactgtcataagagaaattgcccgtatgttagctgatgactataagaagcgcgtgatgattgtcgacacatctaatgagattggtggggatggtgatattcctcacccaggaataggcaatgcacgtaggttgcaagtgcctaaccaagacatgcagcataagagtgtcacacttggtgatgaagaagctaaccggagaggagttcaaaaaactgttctggagcgcaagggcccatcaacatttacatgtgctgcagagatcgtctccaaaaaagaattacgtgtccatcgtagtttggaagccacggtagatgctttactcgcaggtaagctgcctaattttgaaattcgaaagttgggttcaaagggatctatgcaggaagtttctgtgcaaaaggaacaatcacatcttggtatttatgatgcaactgaatttggcagtgactctctaaggaatgccagaagaagcttagactctgcatttagtcttgactctgctgaagggcatatagtgaggtcagatggagctgattcaagctttaatctttatgcatatgggatctccgagtcgactgccttgcaagccattcatcagctggagttggacgacagtgttactttaacttataatatcagtgaagctgatgcagtgatcgcgttacattcaaagctcaagaagaactatcagattcaggctgtgctgaaatctcaagatataccggttttcctcgtaaagacaaactccctgcctcaaatcaccagggcactccgtgctcttgtcgacgatcacatggacgaagtgatagactacaatgataaagaagaagcaaggtcatcagaagaaaccgatgctctggaggaggcaaggctggcaatcgagcaagtagtgattccgaaaggcgagagcgtgcagctactgccaaggccatcaagcatcatctcgtcccaagtgggtctcgtcgaaagcttcagcctcaagtgggaggtcgtaggccaggagcctaaggcatgcgtgaggatccttccgcactttgcgccaaaacaagtcgaagctgtcgcgcgagaaaccccagcggagcccgccgactcggactgggagagccacgatgactcggatcatacccagagtggcatcaccaggctacctttcctaccggattagcgcggcgtctggcgtatcctttcagttcttcgtggccctgccgcctgctgtgtatgtattccatttatttatcttggtaataacttgcaccagaaagcacttgcgtggttgcgtctatctacctacgtaatataagtggatagtgctccgatccggcctctacgcgcgcgtacagatatatacagtatctaatctgttgtcgacccgtacagtcatatcatccatgcatctcttcccattttttacatgctctgccaattccccaagtgctgcgtatccgttctaatctagtactaccgaacaagataaagcagcaagctagcatataatcgggtcgttgtgtttgtgccttttgactagttgtccaataatataattaagctccatccttgtacttgt

SEQ ID NO: 57903 - DNA, 2339 bp, Zea Mays
aaccgctacccatcgcaaacgctttccctccactcgtccgctccggccgcgcgcctccgccccacgccgatgccgcccccgcccccaccgcctctcggcctccgcctccgtctctccctcctcccgccccaccctatcgctccttctatccgtcatgccttctgctcaccctccgtcgtgtcctgccatctttcggtgcgccccctcgcccaacgccgcggtgggcgcccgcgccccctctgcgccgcgcggggcgaggccgaggcggagggcttcgcgtggccggatgggtccgaggaggagctgcggcggctcctggagctgctccctagggagctgagtcggcgggtggagacccacccagagctcccggcgctcgtggaggtggtcatggacctcggccggcccccgctcgcgcgcttcccgtccggagacttcctcctctcccaacgccccatctccttcgacgacctccgtcacgctacctcccactcccaggttggggactttggagcggataatcgtgctggaatcagccgcacgctgcaccggatcagcgccattaggaatcggaagggcgtcattgtcggcctcacatgccgtgttgggcgtgcagtgcccgggagcgctaatttgcttcaggatttggttaaggacggtggctcattgctgctcatcggcccacctggggtggggaagactactgtcataagagaaattgcccgtatgttagctgatgactataagaagcgcgtgatgattgtcgacacatctaatgagattggtggggatggtgatattcctcacccaggaataggcaatgcacgtaggttgcaagtgcctaaccaagacatgcagcataaggtactgatagaagctgtggaaaaccatatgcctcaggcgattgttattgatgaaattggaactaaactagaggccatggctgcaagcaccattgcacagaggggcatacagcttgtggcaactgcccatggggtaacgatagagaatctgatcatgaacccatcactagagatgcttgtgggaggaatacagagtgtcacacttggtgatgaagaagctaaccggagaggagttcaaaaaactgttctggagcgcaagggcccatcaacatttacatgtgctgcagagatcgtctccaaaaaagaattacgtgtccatcgtagtttggaagccacggtagatgctttactcgcagtgactctctaaggaatgccagaagaagcttagactctgcatttagtcttgactctgctgaagggcatatagtgaggtcagatggagctgattcaagctttaatctttatgcatatgggatctccgagtcgactgccttgcaagccattcatcagctggagttggacgacagtgttactttaacttataatatcagtgaagctgatgcagtgatcgcgttacattcaaagctcaagaagaactatcagattcaggctgtgctgaaatctcaagatataccggttttcctcgtaaagacaaactccctgcctcaaatcaccagggcactccgtgctcttgtcgacgatcacatggacgaagtgatagactacaatgataaagaagaagcaaggtcatcagaagaaaccgatgctctggaggaggcaaggctggcaatcgagcaagtagtgattccgaaaggcgagagcgtgcagctactgccaaggccatcaagcatcatctcgtcccaagtgggtctcgtcgaaagcttcagcctcaagtgggaggtcgtaggccaggagcctaaggcatgcgtgaggatccttccgcactttgcgccaaaacaagtcgaagctgtcgcgcgagaaaccccagcggagcccgccgactcggactgggagagccacgatgactcggatcatacccagagtggcatcaccaggctacctttcctaccggattagcgcggcgtctggcgtatcctttcagttcttcgtggccctgccgcctgctgtgtatgtattccatttatttatcttggtaataacttgcaccagaaagcacttgcgtggttgcgtctatctacctacgtaatataagtggatagtgctccgatccggcctctacgcgcgcgtacagatatatacagtatctaatctgttgtcgacccgtacagtcatatcatccatgcatctcttcccattttttacatgctctgccaattccccaagtgctgcgtatccgttctaatctagtactaccgaacaagataaagcagcaagctagcatataatcgggtcgttgtgtttgtgccttttgactagttgtccaataatataattaagctccatccttgtacttgt

SEQ ID NO: 57904 - DNA, 2104 bp, Zea Mays
aaccgctacccatcgcaaacgctttccctccactcgtccgctccggccgcgcgcctccgccccacgccgatgccgcccccgcccccaccgcctctcggcctccgcctccgtctctccctcctcccgccccaccctatcgctccttctatccgtcatgccttctgctcaccctccgtcgtgtcctgccatctttcggtgcgccccctcgcccaacgccgcggtgggcgcccgcgccccctctgcgccgcgcggggcgaggccgaggcggagggcttcgcgtggccggatgggtccgaggaggagctgcggcggctcctggagctgctccctagggagctgagtcggcgggtggagacccacccagagctcccggcgctcgtggaggtggtcatggacctcggccggcccccgctcgcgcgcttcccgtccggagacttcctcctctcccaacgccccatctccttcgacgacctccgtcacgctacctcccactcccaggttggggactttggagcggataatcgtgctggaatcagccgcacgctgcaccggatcagcgccattaggaatcggaagggcgtcattgtcggcctcacatgccgtgttgggcgtgcagtgcccgggagcgctaatttgcttcaggatttggttaaggacggtggctcattgctgctcatcggcccacctggggtggggaagactactgtcataagagaaattgcccgtatgttagctgatgactataagaagcgcgtgatgattgtcgacacatctaatgagattggtggggatggtgatattcctcacccaggaataggcaatgcacgtaggttgcaagtgcctaaccaagacatgcagcataagagtgtcacacttggtgatgaagaagctaaccggagaggagttcaaaaaactgttctggagcgcaagggcccatcaacatttacatgtgctgcagagatcgtctccaaaaaagaattacgtgtccatcgtagtttggaagccacggtagatgctttactcgcagtgactctctaaggaatgccagaagaagcttagactctgcatttagtcttgactctgctgaagggcatatagtgagatctccgagtcgactgccttgcaagccattcatcagctggagttggacgacagtgttactttaacttataatatcagtgaagctgatgcagtgatcgcgttacattcaaagctcaagaagaactatcagattcaggctgtgctgaaatctcaagatataccggttttcctcgtaaagacaaactccctgcctcaaatcaccagggcactccgtgctcttgtcgacgatcacatggacgaagtgatagactacaatgataaagaagaagcaaggtcatcagaagaaaccgatgctctggaggaggcaaggctggcaatcgagcaagtagtgattccgaaaggcgagagcgtgcagctactgccaaggccatcaagcatcatctcgtcccaagtgggtctcgtcgaaagcttcagcctcaagtgggaggtcgtaggccaggagcctaaggcatgcgtgaggatccttccgcactttgcgccaaaacaagtcgaagctgtcgcgcgagaaaccccagcggagcccgccgactcggactgggagagccacgatgactcggatcatacccagagtggcatcaccaggctacctttcctaccggattagcgcggcgtctggcgtatcctttcagttcttcgtggccctgccgcctgctgtgtatgtattccatttatttatcttggtaataacttgcaccagaaagcacttgcgtggttgcgtctatctacctacgtaatataagtggatagtgctccgatccggcctctacgcgcgcgtacagatatatacagtatctaatctgttgtcgacccgtacagtcatatcatccatgcatctcttcccattttttacatgctctgccaattccccaagtgctgcgtatccgttctaatctagtactaccgaacaagataaagcagcaagctagcatataatcgggtcgttgtgtttgtgccttttgactagttgtccaataatataattaagctccatccttgtacttgt

SEQ ID NO: 57905 - DNA, 2416 bp, Zea Mays
aaccgctacccatcgcaaacgctttccctccactcgtccgctccggccgcgcgcctccgccccacgccgatgccgcccccgcccccaccgcctctcggcctccgcctccgtctctccctcctcccgccccaccctatcgctccttctatccgtcatgccttctgctcaccctccgtcgtgtcctgccatctttcggtgcgccccctcgcccaacgccgcggtgggcgcccgcgccccctctgcgccgcgcggggcgaggccgaggcggagggcttcgcgtggccggatgggtccgaggaggagctgcggcggctcctggagctgctccctagggagctgagtcggcgggtggagacccacccagagctcccggcgctcgtggaggtggtcatggacctcggccggcccccgctcgcgcgcttcccgtccggagacttcctcctctcccaacgccccatctccttcgacgacctccgtcacgctacctcccactcccaggttggggactttggagcggataatcgtgctggaatcagccgcacgctgcaccggatcagcgccattaggaatcggaagggcgtcattgtcggcctcacatgccgtgttgggcgtgcagtgcccgggagcgctaatttgcttcaggatttggttaaggacggtggctcattgctgctcatcggcccacctggggtggggaagactactgtcataagagaaattgcccgtatgttagctgatgactataagaagcgcgtgatgattgtcgacacatctaatgagattggtggggatggtgatattcctcacccaggaataggcaatgcacgtactgatagaagctgtggaaaaccatatgcctcaggcgattgttattgatgaaattggaactaaactagaggccatggctgcaagcaccattgcacagaggggcatacagcttgtggcaactgcccatggggtaacgatagagaatctgatcatgaacccatcactagagatgcttgtgggaggaatacagagtgtcacacttggtgatgaagaagctaaccggagaggagttcaaaaaactgttctggagcgcaagggcccatcaacatttacatgtgctgcagagatcgtctccaaaaaagaattacgtgtccatcgtagtttggaagccacggtagatgctttactcgcaggtaagctgcctaattttgaaattcgaaagttgggttcaaagggatctatgcaggaagtttctgtgcaaaaggaacaatcacatcttggtatttatgatgcaactgaatttggcagtgactctctaaggaatgccagaagaagcttagactctgcatttagtcttgactctgctgaagggcatatagtgaggtcagatggagctgattcaagctttaatctttatgcatatgggatctccgagtcgactgccttgcaagccattcatcagctggagttggacgacagtgttactttaacttataatatcagtgaagctgatgcagtgatcgcgttacattcaaagctcaagaagaactatcagattcaggctgtgctgaaatctcaagatataccggttttcctcgtaaagacaaactccctgcctcaaatcaccagggcactccgtgctcttgtcgacgatcacatggacgaagtgatagactacaatgataaagaagaagcaaggtcatcagaagaaaccgatgctctggaggaggcaaggctggcaatcgagcaagtagtgattccgaaaggcgagagcgtgcagctactgccaaggccatcaagcatcatctcgtcccaagtgggtctcgtcgaaagcttcagcctcaagtgggaggtcgtaggccaggagcctaaggcatgcgtgaggatccttccgcactttgcgccaaaacaagtcgaagctgtcgcgcgagaaaccccagcggagcccgccgactcggactgggagagccacgatgactcggatcatacccagagtggcatcaccaggctacctttcctaccggattagcgcggcgtctggcgtatcctttcagttcttcgtggccctgccgcctgctgtgtatgtattccatttatttatcttggtaataacttgcaccagaaagcacttgcgtggttgcgtctatctacctacgtaatataagtggatagtgctccgatccggcctctacgcgcgcgtacagatatatacagtatctaatctgttgtcgacccgtacagtcatatcatccatgcatctcttcccattttttacatgctctgccaattccccaagtgctgcgtatccgttctaatctagtactaccgaacaagataaagcagcaagctagcatataatcgggtcgttgtgtttgtgccttttgactagttgtccaataatataattaagctccatccttgtacttgt

SEQ ID NO: 57906 - DNA, 2421 bp, Zea Mays
aaccgctacccatcgcaaacgctttccctccactcgtccgctccggccgcgcgcctccgccccacgccgatgccgcccccgcccccaccgcctctcggcctccgcctccgtctctccctcctcccgccccaccctatcgctccttctatccgtcatgccttctgctcaccctccgtcgtgtcctgccatctttcggtgcgccccctcgcccaacgccgcggtgggcgcccgcgccccctctgcgccgcgcggggcgaggccgaggcggagggcttcgcgtggccggatgggtccgaggaggagctgcggcggctcctggagctgctccctagggagctgagtcggcgggtggagacccacccagagctcccggcgctcgtggaggtggtcatggacctcggccggcccccgctcgcgcgcttcccgtccggagacttcctcctctcccaacgccccatctccttcgacgacctccgtcacgctacctcccactcccaggttggggactttggagcggataatcgtgctggaatcagccgcacgctgcaccggatcagcgccattaggaatcggaagggcgtcattgtcggcctcacatgccgtgttgggcgtgcagtgcccgggagcgctaatttgcttcaggatttggttaaggacggtggctcattgctgctcatcggcccacctggggtggggaagactactgtcataagagaaattgcccgtatgttagctgatgactataagaagcgcgtgatgattgtcgacacatctaatgagattggtggggatggtgatattcctcacccaggaataggcaatgcacgtaggttgcaagtgcctaaccaagacatgcagcataaggtactgatagaagctgtggaaaaccatatgcctcaggcgattgttattgatgaaattggaactaaactagaggccatggctgcaagcaccattgcacagaggggcatacagcttgtggcaactgcccatggggtaacgatagagaatctgatcatgaacccatcactagagatgcttgtgggaggaatacagagtgtcacacttggtgatgaagaagctaaccggagaggagttcaaaaaactgttctggagcgcaagggcccatcaacatttacatgtgctgcagagatcgtctccaaaaaagaattacgtgtccatcgtagtttggaagccacggtagatgctttactcgcaggtaagctgcctaattttgaaattcgaaagttgggttcaaagggatctatgcaggaagtttctgtgcaaaaggaacaatcacatcttggtatttatgatgcaactgaatttggcagtgactctctaaggaatgccagaagaagcttagactctgcatttagtcttgactctgctgaagggcatatagtgaggatgttctagatctccgagtcgactgccttgcaagccattcatcagctggagttggacgacagtgttactttaacttataatatcagtgaagctgatgcagtgatcgcgttacattcaaagctcaagaagaactatcagattcaggctgtgctgaaatctcaagatataccggttttcctcgtaaagacaaactccctgcctcaaatcaccagggcactccgtgctcttgtcgacgatcacatggacgaagtgatagactacaatgataaagaagaagcaaggtcatcagaagaaaccgatgctctggaggaggcaaggctggcaatcgagcaagtagtgattccgaaaggcgagagcgtgcagctactgccaaggccatcaagcatcatctcgtcccaagtgggtctcgtcgaaagcttcagcctcaagtgggaggtcgtaggccaggagcctaaggcatgcgtgaggatccttccgcactttgcgccaaaacaagtcgaagctgtcgcgcgagaaaccccagcggagcccgccgactcggactgggagagccacgatgactcggatcatacccagagtggcatcaccaggctacctttcctaccggattagcgcggcgtctggcgtatcctttcagttcttcgtggccctgccgcctgctgtgtatgtattccatttatttatcttggtaataacttgcaccagaaagcacttgcgtggttgcgtctatctacctacgtaatataagtggatagtgctccgatccggcctctacgcgcgcgtacagatatatacagtatctaatctgttgtcgacccgtacagtcatatcatccatgcatctcttcccattttttacatgctctgccaattccccaagtgctgcgtatccgttctaatctagtactaccgaacaagataaagcagcaagctagcatataatcgggtcgttgtgtttgtgccttttgactagttgtccaataatataattaagctccatccttgtacttgt

SEQ ID NO: 57907 - DNA, 2411 bp, Zea Mays
aaccgctacccatcgcaaacgctttccctccactcgtccgctccggccgcgcgcctccgccccacgccgatgccgcccccgcccccaccgcctctcggcctccgcctccgtctctccctcctcccgccccaccctatcgctccttctatccgtcatgccttctgctcaccctccgtcgtgtcctgccatctttcggtgcgccccctcgcccaacgccgcggtgggcgcccgcgccccctctgcgccgcgcggggcgaggccgaggcggagggcttcgcgtggccggatgggtccgaggaggagctgcggcggctcctggagctgctccctagggagctgagtcggcgggtggagacccacccagagctcccggcgctcgtggaggtggtcatggacctcggccggcccccgctcgcgcgcttcccgtccggagacttcctcctctcccaacgccccatctccttcgacgacctccgtcacgctacctcccactcccaggttggggactttggagcggataatcgtgctggaatcagccgcacgctgcaccggatcagcgccattaggaatcggaagggcgtcattgtcggcctcacatgccgtgttgggcgtgcagtgcccgggagcgctaatttgcttcaggatttggttaaggacggtggctcattgctgctcatcggcccacctggggtggggaagactactgtcataagagaaattgcccgtatgttagctgatgactataagaagcgcgtgatgattgtcgacacatctaatgagattggtggggatggtgatattcctcacccaggaataggcaatgcacgtaggttgcaagtgcctaaccaagacatgcagcataaggtactgatagaagctgtggaaaaccatatgcctcaggcgattgttattgatgaaattggaactaaactagaggccatggctgcaagcaccattgcacagaggggcatacagcttgtggcaactgcccatggggtaacgatagagaatctgatcatgaacccatcactagagatgcttgtgggaggaatacagagtgtcacacttggtgatgaagaagctaaccggagaggagttcaaaaaactgttctggagcgcaagggcccatcaacatttacatgtgctgcagagatcgtctccaaaaaagaattacgtgtccatcgtagtttggaagccacggtagatgctttactcgcaggtaagctgcctaattttgaaattcgaaagttgggttcaaagggatctatgcaggaagtttctgtgcaaaaggaacaatcacatcttggtatttatgatgcaactgaatttggcagtgactctctaaggaatgccagaagaagcttagactctgcatttagtcttgactctgctgaagggcatatagtgagatctccgagtcgactgccttgcaagccattcatcagctggagttggacgacagtgttactttaacttataatatcagtgaagctgatgcagtgatcgcgttacattcaaagctcaagaagaactatcagattcaggctgtgctgaaatctcaagatataccggttttcctcgtaaagacaaactccctgcctcaaatcaccagggcactccgtgctcttgtcgacgatcacatggacgaagtgatagactacaatgataaagaagaagcaaggtcatcagaagaaaccgatgctctggaggaggcaaggctggcaatcgagcaagtagtgattccgaaaggcgagagcgtgcagctactgccaaggccatcaagcatcatctcgtcccaagtgggtctcgtcgaaagcttcagcctcaagtgggaggtcgtaggccaggagcctaaggcatgcgtgaggatccttccgcactttgcgccaaaacaagtcgaagctgtcgcgcgagaaaccccagcggagcccgccgactcggactgggagagccacgatgactcggatcatacccagagtggcatcaccaggctacctttcctaccggattagcgcggcgtctggcgtatcctttcagttcttcgtggccctgccgcctgctgtgtatgtattccatttatttatcttggtaataacttgcaccagaaagcacttgcgtggttgcgtctatctacctacgtaatataagtggatagtgctccgatccggcctctacgcgcgcgtacagatatatacagtatctaatctgttgtcgacccgtacagtcatatcatccatgcatctcttcccattttttacatgctctgccaattccccaagtgctgcgtatccgttctaatctagtactaccgaacaagataaagcagcaagctagcatataatcgggtcgttgtgtttgtgccttttgactagttgtccaataatataattaagctccatccttgtacttgt

SEQ ID NO: 57908 - DNA, 2157 bp, Zea Mays
aaccgctacccatcgcaaacgctttccctccactcgtccgctccggccgcgcgcctccgccccacgccgatgccgcccccgcccccaccgcctctcggcctccgcctccgtctctccctcctcccgccccaccctatcgctccttctatccgtcatgccttctgctcaccctccgtcgtgtcctgccatctttcggtgcgccccctcgcccaacgccgcggtgggcgcccgcgccccctctgcgccgcgcggggcgaggccgaggcggagggcttcgcgtggccggatgggtccgaggaggagctgcggcggctcctggagctgctccctagggagctgagtcggcgggtggagacccacccagagctcccggcgctcgtggaggtggtcatggacctcggccggcccccgctcgcgcgcttcccgtccggagacttcctcctctcccaacgccccatctccttcgacgacctccgtcacgctacctcccactcccaggttggggactttggagcggataatcgtgctggaatcagccgcacgctgcaccggatcagcgccattaggaatcggaagggcgtcattgtcggcctcacatgccgtgttgggcgtgcagtgcccgggagcgctaatttgcttcaggatttggttaaggacggtggctcattgctgctcatcggcccacctggggtggggaagactactgtcataagagaaattgcccgtatgttagctgatgactataagaagcgcgtgatgattgtcgacacatctaatgagattggtggggatggtgatattcctcacccaggaataggcaatgcacgtaggttgcaagtgcctaaccaagacatgcagcataagagtgtcacacttggtgatgaagaagctaaccggagaggagttcaaaaaactgttctggagcgcaagggcccatcaacatttacatgtgctgcagagatcgtctccaaaaaagaattacgtgtccatcgtagtttggaagccacggtagatgctttactcgcagtgactctctaaggaatgccagaagaagcttagactctgcatttagtcttgactctgctgaagggcatatagtgaggtcagatggagctgattcaagctttaatctttatgcatatggggatgttctagatctccgagtcgactgccttgcaagccattcatcagctggagttggacgacagtgttactttaacttataatatcagtgaagctgatgcagtgatcgcgttacattcaaagctcaagaagaactatcagattcaggctgtgctgaaatctcaagatataccggttttcctcgtaaagacaaactccctgcctcaaatcaccagggcactccgtgctcttgtcgacgatcacatggacgaagtgatagactacaatgataaagaagaagcaaggtcatcagaagaaaccgatgctctggaggaggcaaggctggcaatcgagcaagtagtgattccgaaaggcgagagcgtgcagctactgccaaggccatcaagcatcatctcgtcccaagtgggtctcgtcgaaagcttcagcctcaagtgggaggtcgtaggccaggagcctaaggcatgcgtgaggatccttccgcactttgcgccaaaacaagtcgaagctgtcgcgcgagaaaccccagcggagcccgccgactcggactgggagagccacgatgactcggatcatacccagagtggcatcaccaggctacctttcctaccggattagcgcggcgtctggcgtatcctttcagttcttcgtggccctgccgcctgctgtgtatgtattccatttatttatcttggtaataacttgcaccagaaagcacttgcgtggttgcgtctatctacctacgtaatataagtggatagtgctccgatccggcctctacgcgcgcgtacagatatatacagtatctaatctgttgtcgacccgtacagtcatatcatccatgcatctcttcccattttttacatgctctgccaattccccaagtgctgcgtatccgttctaatctagtactaccgaacaagataaagcagcaagctagcatataatcgggtcgttgtgtttgtgccttttgactagttgtccaataatataattaagctccatccttgtacttgt

SEQ ID NO: 57909 - DNA, 1703 bp, Zea Mays
gaagttctcacggagtccatatgcatgagcacgcacacgtggacgctcggggtgcaacgtggggccgatacaatatatagacgtccgtgcatggacagacatggccgtgccggcatttctgatccgtacgtggaagcggtacgtatacgtagacggatagatacatacagtgtacacagctagtacaccacgagcggtcaagcgccatggattcccgagccctgggcaccgttggcctcctgctcgtctcctgtttcctcctcgctgccggcggcgcccagaggttcgaggccatgttcaacttcggggactcgctgggcgacacgggcaacctctgcgtcaacaagtcggcggcgaaccagctcctgctcaccttcgcgcagccgccctacggcatgacgtatttcggccaccccacctgccgctgctccgacggccgcctcgtcgtcgacttcctcggagctggggctaccgctcctcccgccgtcgaagcagcaggacggcgcggacttccgcaggggtgcgagcatggccatcgtcggcgccacggccctcgacttcgagttcctcaagtccatcggcctcggctacccgatctggaacaacggcgccatgaacgtccagatccagtggttcagggacctgctgccgtccatctgcggcgccgcgccgccggcggaagggcaaggctgcaaggactacctggccagatccctgttcgtcttcggccccttcggagggaacgactacaatgccatgctcttcttcgggctcaccgtggatcaggcaaggaactacacgcccaagatcgtcgacaccgtcgccagcggcgtcgagcaactcatccagttgggcgcagtggacatcgtcgtcccgggagcgctgcccgtggggtgcttcgccatctacctcacgtttctcccgagcgacgacccggccgactacgacgggcacgggtgcctgagggcgctcaacgagctgtccgtctaccagaactccctgctccagagcaggctcgccgccctccaggcaaggtatccctcggcgaggatcgtgtacgccgactactacacccacatcgaccggctggtgcgcagcccggcgcgcttcggcttcacaactggcgccgtcccggcgtgctgcggcgctggtggcggcaagtacaacttcgagctcgacgcgcggtgcggcatgaagggcgccaccgcgtgccgggacccgtcgaggcacgagtcctgggacggcgtccacctgacggaggccgtgaacaggctcatcgccgagggatggctcagaggcccgtactgccatcctcccattgcgactcagtcgatagcgtaggtcacccccggcccatgcggggctgcgcccatggtaagactggcacgggccttccctgacatacagtggcatgatggcgtagtgttgtaccgtatttacgaagtgaaaatctaaaagcttaaatcataaaaaaaaactccctaagctccgatttagtaagttgctaaatacatattaggaataaaatccactttagtctccaacagttttcaataaataattttaaattatgctaactcggattttctagttattacttacaactttaaacttggtttcatttgtacaataaagtttaataatcattgttcttctcgttatattattaatattttcattctatatgaattatggtttgttgt

SEQ ID NO: 57910 - DNA, 1947 bp, Zea Mays
cggcatttctgatccgtacgtggaagcggtacgtatacgtagacggatagatacatacagtgtacacagctagtacaccacgagcggtcaagcgccatggattcccgagccctgggcaccgttggcctcctgctcgtctcctgtttcctcctcgctgccggcggcgcccagaggttcgaggccatgttcaacttcggggactcgctgggcgacacgggcaacctctgcgtcaacaagtcggcggcgaaccagctcctgctcaccttcgcgcagccgccctacggcatgacgtatttcggccaccccacctgccgctgctccgacggccgcctcgtcgtcgacttcctcgctcaggagctggggctaccgctcctcccgccgtcgaagcagcaggacggcgcggacttccgcaggggtgcgagcatggccatcgtcggcgccacggccctcgacttcgagttcctcaagtccatcggcctcggctacccgatctggaacaacggcgccatgaacgtccagatccagtggttcagggacctgctgccgtccatctgcggcgccgcgccgccggcggaagggcaaggctgcaaggactacctggccagatccctgttcgtcttcggccccttcggagggaacgactacaatgccatgctcttcttcgggctcaccgtggatcaggcaaggaactacacgcccaagatcgtcgacaccgtcgccagcggcgtcgagcaactcatccagttgggcgcagtggacatcgtcgtcccgggagcgctgcccgtggggtgcttcgccatctacctcacgtttctcccgagcgacgacccggccgactacgacgggcacgggtgcctgagggcgctcaacgagctgtccgtctaccagaactccctgctccagagcaggctcgccgccctccaggcaaggtatccctcggcgaggatcgtgtacgccgactactacacccacatcgaccggctggtgcgcagcccggcgcgcttcggcttcacaactggcgccgtcccggcgtgctgcggcgctggtggcggcaagtacaacttcgagctcgacgcgcggtgcggcatgaagggcgccaccgcgtgccgggacccgtcgaggcacgagtcctgggacggcgtccacctgacggaggccgtgaacaggctcatcgccgagggatggctcagaggcccgtactgccatcctcccattgcgactcagtcgatagcgtaggtcacccccggcccatgcggggctgcgcccatggtaagactggcacgggccttccctgacatacagtggcatgatggcgtagtgttgtaccgtatttacgaagtgaaaatctaaaagcttaaatcataaaaaaaaactccctaagctccgatttagtaagttgctaaatacatattaggaataaaatccactttagtctccaacagttttcaataaataattttaaattatgctaactcggattttctagttattacttacaactttaaacttggtttcatttgtacaataaagtttaataatcattgttcttctcgttatattattaatattttcattctatatgaattatggtttgttgtttttctctaattttttggatgggtcatcccgagacttctcaaatcattcagagtgtatcatatgtatagggtgctaactcgatggtggacaaatgattttccagtgtgattaacgtgctaaataatctattaggagtgtaaaataggtcccaagtcttggaagtaactagggatatttaagaatttggtatatttggggacctcatttaagaaattgttggtggatgattttttttgttaataacaccctaaattaattttagggacttcttttgggaactagtggagatgttcgaagagaacatttattatgtagctatttactcaaattaaagaattgtttaaatag

SEQ ID NO: 57911 - DNA, 2040 bp, Zea Mays
aacgagcctccaagagaaaaagaaggcgccgcaccaatcgccgccccagtcccaggctccggcgctcgtgttccaaacggccgtgctcccgttccacccacccccatccctcctccactcacccggcctccgtccgatccgcccacgcagccgtgtcggcctcgtgcgcaacgaagaccggccggccggctcacccgccctcccgcccgccgccatgcctggctcgcccaaggtcttctttgcttcctccgcctcgcgccgctccggggcactgcgccggctgctctcctcgccggccttctctgcggcctgcctcttcttcggcctcgccggctttctcgccgccacgctcaccctctcgcgctccccgtccatcactcacagccgctgccccgactcctcgcgcccgctctccgtctccgtcgcgtgggaccgtcgtccaggggatggctccgccgcgggctccgcggagctcccggcctcgctcgccaccggatcgcgcggccgtcacaaggtggccttcgtcgggatcttcaccgggtttggctccatcggccgccgccgcgcgctgcgccggacgtggctccccgcggatcgccagggtctacttcgactggaggaagccactggtctggcattccggtttgtgattgggaaaagcaattcaaagaacaagatggccgctcttaacagagaagttgaagaatatgatgattttgtgcttttagatctcgaggaggagtatagcaggctcccatacaaaacctttctttaaggcggcctatgcattgtatgattctgatttctatgttaaagcggacgatgacatttacttgagaccagatagactttccttacttttggctaaagagcggtcacatccacaaacatacattggatgcatgaagaaggggcctgtttttactgatcctaaattgaaatggtatgagccccaatcctttttactcggatcagaatacttccttcatgcgtatgggccaatttatgctttatcagctgacgtggtggctagcttggttgcattgcgaaacaacagtttccgtatgttcagcaacgaggacgttacaattggatcgtggatgcttgctatgaacgtcaaccatgagaacacacatgcactttgtgaacctgactgcacggagtcttcaattgctgtttgggacatcccaaaatgctcaggtctatgccacccagaggtaaaaatgctagagctccatgaaagaaaagaatgcacaggtggtccaactgtggcagctgaggtgtccgagtctgaggattgatgattcttggttgggggacaaactacggatctgatagttgacctgtgtcctcacccaatagatgtgtttggagtattcatttgattcatcaggcgcaatcattgcgggagcactgctcaaggaacctatagttggctggcgtcgtaacctagcgctgtagcaaaggcattctcattcagcattcttgtcacagcagccttcattgcttctcttgcaattggaaccgtggtcgacgtctggaacgttcaatcctgtatcgtagcagaaattaaaggagttttgttgtatagaaattagaaggaaagaatgcattggcaattaattgataagaccatgcgtacacctgatgctgtggctgattgagattagggatattccttgaggttctctttttggagtaaattattttctgagccgtcgtctacttattttctgatccataactaagcgagcaagctgagtcttgaggatgataacaagcaacgcattctcattctgcattcttatgatcagtgtttttacttgtggcttcgaaattattttctctctcgaaaatatatatggcaagagccttgccggtgattattatactgctattaaagatgaatccttttgttatggggagcgatattgagtgtctctctccagctgtgtaagtagcatggatctgagattgggacaataaacatttaaatacgaaagtgattggccactctagctgttcctaccgtgaagtcac

SEQ ID NO: 57912 - DNA, 2048 bp, Zea Mays
cgagcctccaagagaaaaagaaggcgccgcaccaatcgccgccccagtcccaggctccggcgctcgtgttccaaacggccgtgctcccgttccacccacccccatccctcctccactcacccggcctccgtccgatccgcccacgcagccgtgtcggcctcgtgcgcaacgaagaccggccggccggctcacccgccctcccgcccgccgccatgcctggctcgcccaaggtcttctttgcttcctccgcctcgcgccgctccggggcactgcgccggctgctctcctcgccggccttctctgcggcctgcctcttcttcggcctcgccggctttctcgccgccacgctcaccctctcgcgctccccgtccatcactcacagccgctgccccgactcctcgcgcccgctctccgtctccgtcgcgtgggaccgtcgtccaggggatggctccgccgcgggctccgcggagctcccggcctcgctcgccaccggatcgcgcggccgtcacaaggtggccttcgtcgggatcttcaccgggtttggctccatcggccgccgccgcgcgctgcgccggacgtggctccccgcggatcgccagggtctacttcgactggaggaagccactggtctggcattccggtttgtgattgggaaaagcaattcaaagaacaagatggccgctcttaacagagaagttgaagaatatgatgattttgtgcttttagatctcgaggaggagtatagcaggctcccatacaaaacgttagctttctttaaggcggcctatgcattgtatgattctgatttctatgttaaagcggacgatgacatttacttgagaccagatagactttccttacttttggctaaagagcggtcacatccacaaacatacattggatgcatgaagaaggggcctgtttttactgatcctaaattgaaatggttaggtatgagccccaatcctttttactcggatcagaatacttccttcatgcgtatgggccaatttatgctttatcagctgacgtggtggctagcttggttgcattgcgaaacaacagtttccgtatgttcagcaacgaggacgttacaattggatcgtggatgcttgctatgaacgtcaaccatgagaacacacatgcactttgtgaacctgactgcacggagtcttcaattgctgtttgggacatcccaaaatgctcaggtctatgccacccagaggtaaaaatgctagagctccatgaaagaaaagaatgcacaggtggtccaactgtggcagctgaggtgtccgagtctgaggattgatgattcttggttgggggacaaactacggatctgatagttgacctgtgtcctcacccaatagatgtgtttggagtattcatttgattcatcaggcgcaatcattgcgggagcactgctcaaggaacctatagttggctggcgtcgtaacctagcgctgtagcaaaggcattctcattcagcattcttgtcacagcagccttcattgcttctcttgcaattggaaccgtggtcgacgtctggaacgttcaatcctgtatcgtagcagaaattaaaggagttttgttgtatagaaattagaaggaaagaatgcattggcaattaattgataagaccatgcgtacacctgatgctgtggctgattgagattagggatattccttgaggttctctttttggagtaaattattttctgagccgtcgtctacttattttctgatccataactaagcgagcaagctgagtcttgaggatgataacaagcaacgcattctcattctgcattcttatgatcagtgtttttacttgtggcttcgaaattattttctctctcgaaaatatatatggcaagagccttgccggtgattattatactgctattaaagatgaatccttttgttatggggagcgatattgagtgtctctctccagctgtgtaagtagcatggatctgagattgggacaataaacatttaaatacgaaagtgattggccactctagctgttcctaccgtgaagtcac

SEQ ID NO: 57913 - DNA, 1229 bp, Zea Mays
atcagctagctagccagcagcaggtagtaccttggccaaacgacttagctatcaagctcgaccgaagctaagctaccaagctagtagccttcttggtcacgtaccggccgttgttgattgcagcggtcaagcacacacaagctaggcagctagctagctagagctagggtcgtcggatagatcgacatggccggcagggacagggagccgctggtggttggtagggtggtcggcgacgtgctggaccccttcgtccggaccaccaacctcagggtcagctacggggccaggaccgtgtccaacggctgcgagctcaagccgtccatggtggtgcaccagcccagggtcgaggtcgggggacctgacatgaggaccttctacaccctcgtgatggtggacccggatgctccgagcccaagcgacccgaaccttagggagtacctacactggctggtgacggatattccgggaactactggggcagcattttggcaagaggtgatctgctacgagagccctcggccgaccatggggatccaccgcttcgtgctggtgctgttccagcagctggggcggcagacggtgtacgccccgggctggcgccagaacttcaacaccagggacttcgccgagctctacaacctgggcccgcccgtcgccgccgtctacttcaactgccagcgtgaggccggctctgggggcaggaggatgtactcgtgatcggatgcatggttacataccatgcacactactcactccatcgtctccatacatgtagacggacgatggtgcatgcatcgatcgtcaactactcaacaattacgaactagaaatacacgcgtatatatacatatataaatatgcatatataccggtactgtacatgtcgccgtacacgcgcaggtggctgctgctagcttgctataccggccggtggtactgagcaggcagcatgcgctatatacttgcttggcgacgacgtgcagtgtgtgtatacaataatgagcggccggccggctagcagggcgacgagccgtggctttagcaatacgtatacatatgcatgctggttaattaaggcgctatctttgtgcgtacgtgcttggtgtaataatattacaagtcctcagtggagaatataataataaattaagagctatagcttttgtgtggacaaaccagcagggttgttggtatacatttcatgcatgattctctccataatatat

SEQ ID NO: 57914 - DNA, 1320 bp, Zea Mays
gcaggtagtaccttggccaaacgacttagctatcaagctcgaccgaagctaagctaccaagctagtagccttcttggtcacgtaccggccgttgttgattgcagcggtcaagcacacacaagctaggcagctagctagctagagctagggtcgtcggatagatcgacatggccggcagggacagggagccgctggtggttggtagggtggtcggcgacgtgctggaccccttcgtccggaccaccaacctcagggtcagctacggggccaggaccgtgtccaacggctgcgagctcaagccgtccatggtggtgcaccagcccagggtcgaggtcgggggacctgacatgaggaccttctacaccctcgatggtggacccggatgctccgagcccaagcgacccgaaccttagggagtacctacactggctggtgacggatattccgggaactactggggcagcattttggcaagaggtgatctgctacgagagccctcggccgaccatggggatccaccgcttcgtgctggtgctgttccagcagctggggcggcagacggtgtacgccccgggctggcgccagaacttcaacaccagggacttcgccgagctctacaacctgggcccgcccgtcgccgccgtctacttcaactgccagcgtgaggccggctctgggggcaggaggatgtactcgtgatcggatgcatggttacataccatgcacactactcactccatcgtctccatacatgtagacggacgatggtgcatgcatcgatcgtcaactactcaacaattacgaactagaaatacacgcgtatatatacatatataaatatgcatatataccggtactgtacatgtcgccgtacacgcgcaggtggctgctgctagcttgctataccggccggtggtactgagcaggcagcatgcgctatatacttgcttggcgacgacgtgcagtgtgtgtatacaataatgagcggccggccggctagcagggcgacgagccgtggctttagcaatacatataccatgcaggcatgtgtgtgtgcagtgcgtgccaaggtacggtaacgtattaattattgtgcacatacacatatgtatacgtacatatgcgtaaatatgaatgtgtacgtatacatatgcatgctggttaattaaggcgctatctttgtgcgtacgtgcttggtgtaataatattacaagtcctcagtggagaatataataataaattaagagctatagcttttgtgtggacaaaccagcagggttgttggtatacatttcatgcatgattctctccataatatat

SEQ ID NO: 57915 - DNA, 2610 bp, Zea Mays
ccaccaccgctgctgccagtctgccacagcccacagccaagcgccaacccccactacgcccgcctcgggcgtgccggcccgagcgactgggactagcgctcaagcgctgggcagctgggcgtgcgagcgaataaacaacgccgccacgagaagagaggagagcagagggcagtggggagctcggagaccgagggaggcgaggaaagcggcgggtgccgggccgcccgcgccggtgccgaggtcctcgagtcgaccccttacgtctgtcccccgcttgccgccacccgctcgtggtccttccatttccgtttcctcccccgcatccctttttaatgctcgtcgtcctccattctgtcgccgctgtgttcgtgtctctcctcgctccccgatcgctgcccctgggcgccgcgttcgccgccggatctgggggcgggacggtgccccagacgaaccgatggcgcgggcggcgcttcgattgggcgtgcgcgcgctcgcgctcctcgtcttcgtatcagtggctctgcttccacttgtcagttccgacgatgggtacagacactgcgagggtgtcgtcaggggctgggcggatgcctcgtctgggcgcgtgaaggacggggacaaactgagcctcaaggatttgctcttcttcctccacattcctaggactggaggccgcacctactttcactgcttcctcaaaaagctgtatacgaacgcgcaggaatgcccgcgttcttacgacaaactacggttcgatccaagccatcctgattgcaagctggttgttagtcatgatgactatagcttaacttccaagctgccaagggagagaacttctgttgtaacgatactaagaaacccagttgatcgtgtatttagcacatatgagttctcagttgaagttgcagctagattccttgtgcatccaaacttaacttctgcaaagttaatgactacccgtgtgttaacaaagtctcgtgctgtcagtactttggacatctggccttggaagtacttggttccatggatgagggaagatctgtttgcaaggagagatgccaggggtgtttacaaagttcatagtagtaagaaggttaatgcatatgatgtggacgatatggttatgccattacatcggtacatcaatgatccagttgcccatgaaatcattcataatggggctacctttcagattactgggttaacgaacaactcatattttgatggagcacatgaggttcgacattgtgtcaggaagcatccagatcttggtcgtattgtgcttgaagttgctaagaataggctggaccagatgctatatgtaggacttacggaggatcatgaagaatcagcgaggttgtttgctcatatggtaggagcacaggtgctttcacaatctgggacattgactttagatctcaaggaagatctgcccattgagactgattctcacccatccatggagcctgaggacgaagaaacaaacggacatctgaatagcacacatggttggcagaataatgaagcgatgaactctaccaacgacgaacatggaaaaggaaatatgactgttggtaaactgatggaagcttatgaaacttgcattgccaaactgtggaaatctcaatctggccgacgtaaaatatccctaaagaaagttcaggaagcgaacttttcaaaagaggcacggaagctggtatctgaggcaattctgaaccaaatcatctcattgaacagacttgatatggaactttatgaccatgctaagaaaatttttactcaggaacatctgatgctaaaagctcagcaatccatggtggggcagcacagacagtttggagaacaaaaggtttgttcaaactcaaagagcacatcttcgttatgcattttattttagttttgacaaagcttttcccgcaagagttcagaacctcagtgatgtatggtgaacatgggttaggtccggagcgtgtaccgtgctaattgttgaactacaatctagataaatttgacaaatagggaacctgcttcgtatcaacagccatcaagtgcttgattgcgttattagttttccaatctatttgacattgcgttaacattacacatgctagtgtttgatgcatgcgcacatgccagagaggaggaaacacgataagatggttggatcggcgtaatgtgcagcgtcgggatttgccctccttggatggtggtcttggttgttctagggatctccacgatcatagttttggtcacgttagctgtaacgacgagaaaaagaacgtctaaacttaaggtttaaccggaattcatgaggcagtctatagattatgatgtatagcctgggaggctgggacaggcgttagagcaactccaataagtataataaaatatagctcctaaaacatagaaattgagatcttaaaaatattaaatccaataaaaaaagtagtactccaacactccatatttttctaaaattcttttgaataggtcaatatcggttgattccgaagttcttgctctcgtctcctcgcgccgccaggaaagtgcaccatacatccgccgagaagagtgttgaataattagacaaattccaaattaaattccgaa

SEQ ID NO: 57916 - DNA, 2285 bp, Zea Mays
cccgcctcgggcgtgccggcccgagcgactgggactagcgctcaagcgctgggcagctgggcgtgcgagcgaataaacaacgccgccacgagaagagaggagagcagagggcagtggggagctcggagaccgagggaggcgaggaaagcggcgggtgccgggccgcccgcgccggtgccgaggtcctcgagtcgaccccttacgtctgtcccccgcttgccgccacccgctcgtggtccttccatttccgtttcctcccccgcatccctttttaatgctcgtcgtcctccattctgtcgccgctgtgttcgtgtctctcctcgctccccgatcgctgcccctgggcgccgcgttcgccgccggatctgggggcgggacggtgccccagacgaaccgatggcgcgggcggcgcttcgattgggcgtgcgcgcgctcgcgctcctcgtcttcgtatcagtggctctgcttccacttgtcagttccgacgatgggtacagacactgcgagggtgtcgtcaggggctgggcggatgcctcgtctgggcgcgtgaaggacggggacaaactgagcctcaaggatttgctcttcttcctccacattcctaggactggaggccgcacctactttcactgcttcctcaaaaagctgtatacgaacgcgcaggaatgcccgcgttcttacgacaaactacggttcgatccaagccatcctgattgcaagctggttgttagtcatgatgactatagcttaacttccaagctgccaagggagagaacttctgttgtaacgatactaagaaacccagttgatcgtgtatttagcacatatgagttctcagttgaagttgcagctagattccttgtgcatccaaacttaacttctgcaaagttaatgactacccgtgtgttaacaaagtctcgtgctgtcagtactttggacatctggccttggaagtacttggttccatggatgagggaagatctgtttgcaaggagagatgccaggggtgtttacaaagttcatagtagtaagaaggttaatgcatatgatgtggacgatatggttatgccattacatcggtacatcaatgatccagttgcccatgaaatcattcataatggggctacctttcagattactgggttaacgaacaactcatattttgatggagcacatgaggttcgacattgtgtcaggaagcatccagatcttggtcgtattgtgcttgaagttgctaagaataggctggaccagatgctatatgtaggacttacggaggatcatgaagaatcagcgaggttgtttgctcatatggtaggagcacaggtgctttcacaatctgggacattgactttagatctcaaggaagatctgcccattgagactgattctcacccatccatggagcctgaggacgaagaaacaaacggacatctgcacacatggttggcagaataatgaagcgatgaactctaccaacgacgaacatggaaaaggaaatatgactgttggtaaactgatggaagcttatgaaacttgcattgccaaactgtggaaatctcaatctggccgacgtaaaatatccctaaagaaagttcaggaagcgaacttttcaaaagaggcacggaagctggtatctgaggcaattctgaaccaaatcatctcattgaacagacttgatatggaactttatgaccatgctaagaaaatttttactcaggaacatctgatgctaaaagctcagcaatccatggtggggcagcacagacagtttggagaacaaaagtgtttgatgcatgcgcacatgccagagaggaggaaacacgataagatggttggatcggcgtaatgtgcagcgtcgggatttgccctccttggatggtggtcttggttgttctagggatctccacgatcatagttttggtcacgttagctgtaacgacgagaaaaagaacgtctaaacttaaggtttaaccggaattcatgaggcagtctatagattatgatgtatagcctgggaggctgggacaggcgttagagcaactccaataagtataataaaatatagctcctaaaacatagaaattgagatcttaaaaatattaaatccaataaaaaaagtagtactccaacactccatatttttctaaaattcttttgaataggtcaatatcggttgattccgaagttcttgctctcgtctcctcgcgccgccaggaaagtgcaccatacatccgccgagaagagtgttgaataattagacaaattccaaattaaattccgaa

SEQ ID NO: 57917 - DNA, 1181 bp, Zea Mays
acactacttgaagggctcaattatttatgactgttggtaaactgatggaagcttatgaaacttgcattgccaaactgtggaaatctcaatctggccgacgtaaaatatccctaaagaaagttcaggaagcgaacttttcaaaagaggcacggaagctggtatctgaggcaattctgaaccaaatcatctcattgaacagacttgatatggaactttatgaccatgctaagaaaatttttactcaggaacatctgatgctaaaagctcagcaatccatggtggggcagcacagacagtttggagaacaaaaggtttgttcaaactcaaagagcacatcttcgttatgcattttattttagttttgacaaagcttttcccgcaagagttcagaacctcagtgatgtatggtgaacatgggttaggtccggagcgtgtaccgtgctaattgttgaactacaatctagataaatttgacaaatagggaacctgcttcgtatcaacagccatcaagtgcttgattgcgttattagttttccaatctatttgacattgcgttaacattacacatgctagtgtttgatgcatgcgcacatgccagagaggaggaaacacgataagatgtaagatatatgaattcattctcgtacgcggtggaaatgtggaaatgaagaattgtacttcttctgttagcaatcctcatgtgacttgccttatctctttctctttcagggttggatcggcgtaatgtgcagcgtcgggatttgccctccttggatggtggtcttggttgttctagggatctccacgatcatagttttggtcacgttagctgtaacgacgagaaaaagaacgtctaaacttaaggtttaaccggaattcatgaggcagtctatagattatgatgtatagcctgggaggctgggacaggcgttagagcaactccaataagtataataaaatatagctcctaaaacatagaaattgagatcttaaaaatattaaatccaataaaaaaagtagtactccaacactccatatttttctaaaattcttttgaataggtcaatatcggttgattccgaagttcttgctctcgtctcctcgcgccgccaggaaagtgcaccatacatccgccgagaagagtgttgaataattagacaaattccaaattaaattccgaa

SEQ ID NO: 57918 - DNA, 952 bp, Zea Mays
atatatatttagtgacccatatagaagcccattagttcagcacagcacatcttcctcgcagcgccggcgctccatcttccgctccctcccccaccttcgatcggcacgcaggctcggcgtcgtcgtcagcggttcctcctcccgcctctcgccagtagcctcgcgccctcgccgactggcgaccctgccttgaaggggctggcaagatgatcggcgtagggaaggcgaagcagtacgccaacgtccttgacaagcccctcagccgtggcaggcaggagtttgagtgcatttgcattcttgttctctgagttggttcagtacaaccagactcaagttgacaacattactgagctggaacggaggctggaggatgctggttatgctgttggtgcaagggtgcttgaactactctgtcacagggagaagggaaatagacgagagacacgacttctgggcattttatcattcatccacagtactgtttggaaagtgttgtttggaaaggtggctgactcacttgaaaagggaacagaacacgaggatgaatacatgatcagtgaaaaggagcttcttgttaaccgtttcatttctgtgccaaaagacatgggagcattcaactgtggagcttttgttgcgggcattgtaaagggtgtattagataatgccggctttcctgccgtagttactgcacattttgtgccaattgaaggccagcaaaggccaagaacgacaatcctgataaagtttgctgaagaggtattacacagagaagcaagactgggctgagtttttatgtatgtacacaaaacctttgactagcctatttgtaaggtgagatcgcaggtgcttcatcagtcttattgaaatccgaccgaaactgctgtattaatgcttttccttgcattcaccttgtattaaaggaatccttcatcttttgatttttcgtattttg

SEQ ID NO: 57919 - DNA, 1043 bp, Zea Mays
atatatatttagtgacccatatagaagcccattagttcagcacagcacatcttcctcgcagcgccggcgctccatcttccgctccctcccccaccttcgatcggcacgcaggctcggcgtcgtcgtcagcggttcctcctcccgcctctcgccagtagcctcgcgccctcgccgactggcgaccctgccttgaaggggctggcaagatgatcggcgtagggaaggcgaagcagtacgccaacgtccttgacaagcccctcagccgtggcaggcaggaggtcagtttgagtgcatttgcattcttgttctctgagttggttcagtacaaccagactcaagttgacaacattactgagctggaacggaggctggaggatgctggttatgctgttggtgcaagggtgcttgaactactctgtcacagggagaagggaaatagacgagagacacgacttctgggcattttatcattcatccacagtactgtttggaaagtgttgtttggaaaggtggctgactcacttgaaaagggaacagaacacgaggatgaatacatgatcagtgaaaaggagcttcttgttaaccgacatgggagcattcaactgtggagcttttgttgcgggcattgtaaagggtgtattagataatgccggctttcctgccgtagttactgcacattttgtgccaattgaaggccagcaaaggccaagaacgacaatcctgataaagtttgctgaagaggtattacacagagaagcaagactgggctgagtttttatgtatgtacacaaaacctttgactagcctatttgtaaggtgaatcgttactggagtttggtgatttcttgtatttgagtagttcggtgatttcttgtatttgagttatgtaatagcagtgtgactgagaataaaagttatgtaggtgagatcgcaggtgcttcatcagtcttattgaaatccgaccgaaactgctgtattaatgcttttccttgcattcaccttgtattaaaggaatccttcatcttttgatttttcgtattttg

SEQ ID NO: 57920 - DNA, 563 bp, Zea Mays
catggttcatctggtataacatgtgcaatgatttcaaggaaatagacgagagacacgacttctgggcattttatcattcatccacagtactgtttggaaagtgttgtttggaaaggtggctgactcacttgaaaagggaacagaacacgaggatgaatacatgatcagtgaaaaggagcttcttgttaaccgtttcatttctgtgccaaaagacatgggagcattcaactgtggagcttttgttgcgggcattgtaaagggtgtattagataatgccggctttcctgccgtagttactgcacattttgtgccaattgaaggccagcaaaggccaagaacgacaatcctgataaagtttgctgaagaggtattacacagagaagcaagactgggctgagtttttatgtatgtacacaaaacctttgactagcctatttgtaaggtgagatcgcaggtgcttcatcagtcttattgaaatccgaccgaaactgctgtattaatgcttttccttgcattcaccttgtattaaaggaatccttcatcttttgatttttcgtattttg

SEQ ID NO: 57921 - DNA, 1610 bp, Zea Mays
atgagccgccactgtgtgactctccctgtgatcatctttggattactgcagatggctgtggctctctactctaatccaagttcaacgcatccgaactgcacggagagatgtggcaacgtcagtatccaatatcctttcggcatcggatccggctgcttccggcagcccgatttcagcctcacctgcgacgacggcggcggcggcggcggcaaccagccgcccaagatctttctgcatgacggcatcaccgaggtcttgcccgattccggtggcacggatatagtccaaatcaactgaaggagaactgctcgaggtcctgtggtaatatcagtgttccatatccctttggtttagaggaaggctgctctgcaaggaagctatttaaactcaactgcacaaatgcgacagcgtctatgctccaattcgatgacgaccgtgttgtggcgtttataaatgttacagggagtctcgtgggcatcaggtttacctcacaattcgaagatggtcagcttgggatatatgtatcaggtgaacccgatctctttatgggtcttggggaatcagtggtctcaatgcactgggcagctgccaatcttacatgcgacgaggccctgaaaaataaatcacaatatgcatgttgttcaaacagcaaatgtttaggagtcaattcaaaggatggttatattggatacagatgcaaatgcttagatggtttccaaggaaatccatatagcatcagtgatggttgtgaagatatcgatgaatgtaaaacacaacacatttgcaaagagaacgaggtatgcaacaatgttgcagggagctactactgcaccaaaacaacaaaacagcagggtcttgttttgggtgtgattattgggctttgtgttggctttggcattctagtatcttgcttgggcgggatgcttgtcatccgtagatggaaaagggacattcaaaagcaactacggagaaaatactttagaaaaaaccaaggacttctcctagaacaactaatatcatctgatgagaatgcccgcaacaatacgaagattttttctctggaagagctcaagaaggctacaaatgactttgatacatcacgcatacttggacgtggaggccatggaatggtttacaaaggaatcttgtcggatcagcgtgtggtagcaataaaaatttccaagatcatggagcaaggtgaaatcgacagttttatcaatgaggtcgccattctttctcagataaaccaccgcaacatagtacgactcttcggatgttgtcttgaaactgaggtcccacttcttgtgtatgatttcgtatctaatggttctttgttcgaaattctccatgccgctgaggcaagcaacgatttccagttgtcttgggacgattgcttaaggattgcattagaggctgcaggggcactttattatctccattcttcagcttcagtctcaatcttccaccgtgatgtcaagtcctcgaatatacttttggatggaaactacactgcaaaagtttcagattttggtgcgtcaaggttggttcctattgaccaaacccatgttgttacgaatatttcaaggcacttttggctacttagatcctga

SEQ ID NO: 57922 - DNA, 2250 bp, Zea Mays
atgagccgccactgtgtgactctccctgtgatcatctttggattactgcagatggctgtggctctctactctaatccaagttcaacgcatccgaactgcacggagagatgtggcaacgtcagtatccaatatcctttcggcatcggatccggctgcttccggcagcccgatttcagcctcacctgcgacgacggcggcggcggcggcggcaaccagccgcccaagatctttctgcatgacggcatcaccgaggtcttgcccgattccggtggcacggtgggtctgtcaaggcttattgatgtagccatttcccacaccatctttatggcacctggtattcctagttacaacttctcgtggaatctcagttctttcactatgtttgacggctcattcaacgtaactgggtgtgacttcgatatatatattcaagaaccgggcacgaatggttccttatggccatgtacaaatcgctgcccccaaagcatcaccaccgagacggtggccagacatgactgcaatggaactggctgctgcattgtttaccttggaattagtgttcgtgatttccagctcaaatttgtgcgccacgataatggcgctagaggtgatcatgatgctctctctaatggaagcgccctgtgggatacaattaacattaccagcaactgggcccaaatatactgggatatagatgatcaaccgacatgcgccagagcgaaggaaaagaatataaactacgcatgtgtcagcaaccacagccaatgctttgacgatgaagtgtttgatgttggttatagatgtgcttgtaacagcggttacgtaggcaatccctttgtagttgatggctgcaagcgtgacgaagcttcgagtcagctagcaaacttttacaacctccgagcaggggtgaagctaggatatagtccaaatcaactgaaggagaactgctcgaggtcctgtggtaatatcagtgttccatatccctttggtttagaggaaggctgctctgcaaggaagctatttaaactcaactgcacaaatgcgacagcgtctatgctccaattcgatgacgaccgtgttgtggcgtttataaatgttacagggagtctcgtgggcatcaggtttacctcacaattcgaagatggtcagcttgggatatatgtatcaggtgaacccgatctctttatgggtcttggggaatcagtggtctcaatgcactgggcagctgccaatcttacatgcgacgaggccctgaaaaataaatcacaatatgcatgttgttcaaacagcaaatgtttaggagtcaattcaaaggatggttatattggatacagatgcaaatgcttagatggtttccaaggaaatccatatagcatcagtgatggttgtgaagatatcgatgaatgtaaaacacaacacatttgcaaagagaacgaggtatgcaacaatgttgcagggagctactactgcaccaaaacaacaaaacagcagggtcttgttttgggtgtgattattgggctttgtgttggctttggcattctagtatcttgcttgggcgggatgcttgtcatccgtagatggaaaagggacattcaaaagcaactacggagaaaatactttagaaaaaaccaaggacttctcctagaacaactaatatcatctgatgagaatgcccgcaacaatacgaagattttttctctggaagagctcaagaaggctacaaatgactttgatacatcacgcatacttggacgtggaggccatggaatggtttacaaaggaatcttgtcggatcagcgtgtggtagcaataaaaatttccaagatcatggagcaaggtgaaatcgacagttttatcaatgaggtcgccattctttctcagataaaccaccgcaacatagtacgactcttcggatgttgtcttgaaactgaggtcccacttcttgtgtatgatttcgtatctaatggttctttgttcgaaattctccatgccgctgaggcaagcaacgatttccagttgtcttgggacgattgcttaaggattgcattagaggctgcaggggcactttattatctccattcttcagcttcagtctcaatcttccaccgtgatgtcaagtcctcgaatatacttttggatggaaactacactgcaaaagtttcagattttggtgcgtcaaggttggttcctattgaccaaacccatgttgttacgaatatttcaaggcacttttggctacttagatcctga

SEQ ID NO: 57923 - DNA, 5659 bp, Zea Mays
atggcagccatcaatggctttaacgtcggcaacagtttccttcaattaatggcgaggagacgtggggaggcggggagaggaggagacggcggggtcgctggcacggggctgggtcgactgggcgcgggcacatccagggcgcggacgccgaggaaaggaacgggcgcggcgtgcgcaagctcacgaaacagcggcgcggagcagcgaatcgatgcctggaagatgaacggtttgctggggaagaagctctgacaactagggaccatttgttacaaagagagaggacgagtgggaaattggagtgtgagtgcgtgctgggctgttaggggccaacgacttggctaggccgatcggctttttttcatttttattatttcttttcttttctagtttttttttctatttttaggtggccggtcgcgattccctttttgtttactttcaaatttccaaatcctctaaacaattaattcagaatctacatatatacactctaaaaattaagttaacgttaatgttattattaacaacatatatatgattttcaaaaaaatatttagaaacttattgttttataaaataaaattcacacaagaataaattcaaaaaaatatataagtatatatattttcaaaatcataataatctcatatttattattaacaaatcaacacacgtacttaccaaatttattattttaatatattattactttaacaaatgtggttcttctcaggaaactaaatctaaaaattggattttgcaaattaagtcaaacaaaatttgtgcttcagcatgtatgcatcaaacacttggtaaaattttatctattgaagaaattattctatttatttatatcatcattttattatttgaaaacataaatattttcatttttattgagaattaataaactatactaggttgcttataatcaatggatttagggtgttacatgccgccggtgcaagttttgttcctccgatgaggtcctgagctcgtaaggtcggcctcccaaaacaactgctcggaggtagtcggtgccttctgcaatattgtcaggacgaaggccgggtcattagatccccggtagaagtcttcgatcgccgctgcttctgccacctcagggatacaatttctcatggtctgaaaccttttgaggtatgaccggagagtttcatcccctcggcgcttgatggatttgaggtcccatggctgcgccggcttgtcggagagggattggaagttggcggtgaagcaccgactgaagtcgctccaatcgtcgatgcagtgtcgtggtaggtgtcatagtcattgcagagcatcctgcccgaggacgatgggcaggtatgcggtcatcacatctttagtcgccccagcggctcgtgcggcggtggtgtagacggccagccagcctcccgaatcctgcttaggctcgtacttgtcgacgttggagaccttgaagttagggggccattgaatggccctaagacgtggagtgagtgctgacaccccacacgcgtcctcctgtcagcgatgatgatgtctgccccagggaggggagttgtcgtcgtggtgcctcgaccgtccccgggtcgtgccgccggttgaagctgtcgctgactcaattctggtggcctgactccatgcagggacatcgtggtcccgatcatactcttttcggcgtcggatctctttctcgtgccgtcattcgcgcgaggcgttgatggagctctgcgcgtcccaacgaccgttgatggtgtgccgctgaacgctcggcgggtgggcgagaggtacaagatgattagtcgcccgagtgagcagttgcctatagccctcagcgtccggagttcagggaagaccatcggctatctgagccaacacccccaccgacatcactcggcgtgttcatggctcaggcaaagtcggggtttaggttccgcccgagaagaggattctcccggcgctgccttgctttctgttcagcttgctcttgagctcatcgacggtcgcatcgtcgggagttccttctttccctgaagaaccgttcttctggagtttctcccatctccgagacctcgtctcgcgatacgggctgcaccgggtcccgctctccggcctcgtgatgtcgccgaatatttcggtgttggttccttcgttggcgggattcccggttgaggaggttcctccccgggcgtggttggttcgtcgtcggagacggggggcgactccactctcccgatgaagaggacgtcggggtagaatggagccatcattgtgatgagcttctttctgttctcctttgagggcagaggcaccagaagagcagtttgacaatgcttcaccttgtttgcttcctttctccttatgatccgtgtccattttcccataggagaggtggacaacggagttctctgggtagacggaccctcagctcctagcttgctgaaagtggtctttgctcggagcaccggaggttgcgcttttccctgcttggctttgactttcccgtagattgttgaggaagatttttttctttggtcgatctgcgatgcggtgtagattttcttcttcatctgccacagatatgatggttctgaagaagaacatggaccgggggcggaggacgatcttgcgctagaaagtgacggccattgagctagcttggatcagtgacacacccctacctggcgcgccagctgtcggtgttttgggtctgaccgcgcacccggagttccccctcaaggtgctttttggagtaggacggtgtcaccgactatagctcaatggttcgtgccagatgcacgagaaacagtagacaatcttgtacaggttcgggccgctttgagatgcgtaataccctacgtcctggggtggatcttttgcatggtagattatgagagggttctctagtatgagggataccagagagtcgagtgaatggctaaaggggtgagatttctcttgagggggtgctccctaggccttatatattcgaccgtggggcgttacatgtggatatgataacagcgtgttcctaagtaatagtgaatcgactgagcttatcttcctataattctgccgacctatccctattcagttccgctgtaggagggcactgcgtgggaaggtcggatcaatgttgcggttgttgttcaaatccatcggtccgtctgggctcgtgttgatccaatcttgtgtcaatctatcccgccagacgtccctccccaggcccacgaagggatgtccttgcgaactattgggcccaaggcctttcgcaaggccttttaaccttctggtggacccgggggatatctgtcccccacactgtccgaagtgacccatactttgaatgccttgaagtagtggcgcagcttgcgcgatgccatgatgactgcgtatgagattttttctagttcagtcttgttgcacttagaagtcgcgaggacatcggagacatagtacactgggcactactgacttgtgccctctctgccctgctcttggactaacgctgcgctaactgcacgtggtgaggccgcaatgtatagaagaagaggcaacgaagggtcggggctagcaagggttgctaagttggacaggtgttgtttgagcgactcgaaggccgccgcctgctctggtccccaagcaaagtcttttgcaccatgcaatgtcttgaggaaaggtagactgcgctctacggacttggagatgaatctgttcagggcggccagtctacctgtcagtcgatggacatccctggctgactgctggggtgtcatgttgatgatcgcttggatcttagttgggttggcctcgatccctcggtgcaacactaggtaaccaagtatcttcccctagggaactccgaagacacacttctcggggttgagccaaagtcgtgcatcgcgcatattagcgaatgtttctgcgaggtcagccaggtgatcctctttgtttttgctcgcgatgacgatgtcgtctacgtaggtgaaaatgttgcggcctacttgactttcgaggaccctcttggtgaggcgagaaaaggttgacccagcattttttagtccttctggcatcctgatgaagcagtacgtgccgaagggtgtgattaagcttgtgctggccttgtcttcctctttcatgtaaatctggtggtaacttgagaagcaatcgaggagggacatgacttcgcatcctgctgtgctatcaactattttgtcgatccatggcagggggaagttgtccttggtacaagccttattgaggctggtgaagtctatgcacatgcgccacttgccgcttttcttttgcaccatgaccacgttggcgagccatgtaggataagcaattggctcgatgaagttggcttccaataggtggtgcaccttggccttggcggcttcagtcttctcgtcggacattttgtgcagtcgttgcttttttgggcgcaccgaaggatcgatgccctggttgtgctctatgatggtgcggctgaccccgaccagatcgagtgcggaccaagcgaagatgtccttatttcgggagagacaagagatgagtttttcctcgtctcgcgaggtcaggtcttcgcttattacgaccatttgtttaggcgttgccgggtcgaggggtaccgccttcgttccgtcgttgctttggagctgtgccatgactttttcgtcggtgactgggcgggtcccttcaaaaccttcgcgctatgctctgaggcagtgtacattccgtttccctggaacaaagtccttctcaatgttgcacgctgtctactggttgccataaactgtgatcacgccttgcggacctagaattttcatgcagaggtagagtccgtgaatggccgcctcaaacttgttgatggagccctagcccaaatgggtataccatgtcgacgatattgaaagtgacctgctcacttcgtgcattgggtgctacaccaaatgataggggtagctctatcttgccgacggggaaggtgcccttgccgccgaagccatatagggggttgttcgaaggtttgagtaagctgtggcttatgcccatgcgatcgacggcgtgcaggaagatgatatcagcttgactgtcgttgttgactaggactttatgtaggtcccagcctgctacactgcagttgatcaccatggcgtcgatgtgaggggcgctgcgcaaatcaacatctctggcatcgaaggtgagtggtacatgagaccaccttgtttgcactactgggccagtgagagcgacgtggttcacactttggtagtggtcccttttctgtcgcttcgtttcgaagtccacgctggaccctccggtgatcatgtggatgactccgtgatatggtggttcggcgaagtcttcctgcttgggtgcttgtggggggtggttatggtgttgtggatttgggtgatgcggaggcggtgctggtagaacctgcacttcttgacggtgctggtacgcgtggtttggtggatgctggacttgctcattgttgtagggttgatggtggtggtggtggtatgtgtgcgcgacgaccctctggttgtcggctggctgtgctctggacattctgtccctgatggcctttgtttctggacaatcccttgttgggtgcgcgcagtcctcgccatgaaacagatagtag

SEQ ID NO: 57924 - DNA, 8010 bp, Zea Mays
gattggctatgttgtgcacctattggtgaatacggctgtcccgtccggagtctggttgcgacggtctggtccaggttctgctggactgcggagggtccttaggtttcctctgagattcaaccttgcgttgatgtagctcttcggacctggcatacttctcaaaatagctgatatagctcctgtagatttttgggtgggtccctgatgcaatgactgtacaggacgccagcccgaagactgttgatggtgtaatggatcgcgatgtggtcatcaactgatggcagttatggcttgagcgtaaggaattttctgtagtattcgcgaagggtttccttctcttgctgcttgcagagggataactcggccagggcgtcagtatcaggtcggtacccttgaaagttgagcaggaacttgtcgcggagccctttccaggagtcaatggatagtggcggtagcctggtgtagcaagtcaaggccgggccttcgagcgtgatgatgaaggatttggccattatggcgtcgtcccctccggacgatgcgacgacaacctggtagctcatgatgtattgtgccgagtcggtactgccattgtatttggggtaggtgccagctctgaagttggcgggccaaggcgatgcttggagttgcggagccaaggggcttcgctcatcgaggtagttgatcccttggaaagttgtggcgtgcggaataaagggggcgcactatggtatgaatgggtcaccagcgtggacgcgctcctggaggggtgcttgcggtgcaaacagtccatgctgcagattgtactagccctcgccctgcatgagctcaatctcttgctctagctcccaagctctctgctcctcatcttgtatcatctgacgcaccttggtgtgcatggtgacacgttggcacttggcttcgaggatttatttctgcttttggaggttgtggttcttgatgcgcagggcccgcagctgtagttggtcttcggttgagataccgataacctctccgtcttcaattgtgtcttcgccctctggtggagtgaagcctggtggtggtgcttgcggtacgcctccggagttgcaggtgcgtagggtgccttcggaggtgggatggtcttggcgctgtcttttgctcacatcttcatcttcaaaggcctcttgggggtactgtccgcgagggccttgcctcttttctccgctagtagctgccttcgctgcttcatcgatggatgggactgccttcgaactagctcgcttgggggccatcgcgggttgtttttcgcagcacaaacggtgggcgccaaatgttggaacttgctctcctgggcaagttgatccaacgggaaagtggaaagagtatttgcaaagtttgtcgagggatggcaaaaccttccttcctccccctgtgagggcactgtacgggggtatttataggcactcgagtggccacctgtcccttgtcaaagtcatttatgccctcaagtacctggtttatccctagaatattcccacgaggggaggttacagatggtcattacggtaaaggctattatagacgcggcccgtaacgcgcttgctcttgcggggcctgttaccatgggtcgaatcccgcatgggtctcccggggcggtgacgacgtgggagacccatagacttcgacaaagccttcgtcttgcaacagcgagggcaaagtggaccgtgccggtctccgtccagtcgacgccttcggcttgttcagacgcgttctgtggatgtagccttcgtcggagtaatgaggagacgaaggcaccgagcgaagggtagagtattcgccttcgccccaacacttgacaacgaggaaatggtgctcatcatcaagagcttccgccaaatcctcaaacattggaggaggaaggactacaaaccccactccaaaagggtgtgttgcaaatgtggtaagctcgatcatttttattgctaaatgtccaatttcaagtgatagtgacaggggcgacgacaagaaggggaagaaaaaggagaaaaagaggtactacaaaatgaagggcggcgatacacacgtgtgtcgggaatgggactctgacgagagctccaccgactcttcctccgacgaggacgtcgccaacatcgccatcaacaagggcctcctcttccccaacgttggccacaagtgtttcatggcgaaggacggcaagaaaaagaaggtacaatctagagccacccctaaatatacaacaactagtgatgagggtagctctagtcaagatgaagatgatttacttacgctttttgccgaccttaacatgaaacaaaaggaaaaactaaatgaattaatagaagctattcatgagaaggatgatctcttggaaagccaagaggacttccttattaaagaaaacaaaacgcatgttaaggtaaaaaatgcttatgctcaggaagtagaaaatgtgaaaacttgactaaggagcttagcatttgccatgattcaattacgagtcttagaaatgaaaatgctagttcaaatgtaagattgataaattgaatgaatcaatttctagccttaggacagaaaatgctagtttaatttccaaggctaaagagttaaacgtttgcaatgattctatttcctgtcttagaaatgagaatgccatattacatgctaagatagatgtagagatgttaatgttgatgctataaatgatcaactgaaaatgatcatatagccaatgtttctataaatgatcaatgtttggaaaccctctacatctacagttgagcatgttactatttgtactagatgtagagatgttaatgttgatgctataaatgatcaccttgcaatgattaaacaacaaaatgatcatatagccaaattaactgcaaaaattaatgagcgtgaacttgaaaatgaaaagtttaattaaatttgctagaaacatgctctataatgggagacaccctggcattaaggatggcattggtttccaacagggaagcaatgtcaagcttaatgcccctaagagattgtctaattttgtaaaaggtcaaagctcccatggtttaggataatgaaggctacattttatatcctgctaattatcccaaacataaaattaggagaattcatgctagaaaacctcatactgtttcacatcatgcttttatgtataaaaatgaggcttctagctctaggcattccactcatattaaaatgcctaaaaataaaactcctgctgcatcaaatgataataacatttcattcaaaacttttgatgtttcatatgtgcttactaacaaatcaggcaaggtagttgccaaatatgttgggggcaaacacaagaggtcaaagacttgtgtttgggtacccaaggtgcttgtttctaacatcaaaggacccaagactgtttgggtacgtaagaacaaggcctaaattgttttgcaggtttatgcatccgggggctcaacttggataatagatagcggatgccagtggtggacccagctgctatgtttagggtgtgccaagaaaaaaataaaaaaacaaacaaaaaacaaggatcaacaagactcgaaccttgaccaccaagtttaaaatatagcacttacaccactatgctaactacacttatgtaatcttagggtgtgtcgtggaccatatggaccacccgccgggtccgcccctagcggatgcacaaaccacatgacaggggagaaaaggatgttctcctcctacgagaaaaaaagatccccaacgagctatcacattcagggatggaaatcaaggtttggtcaaaggacttggtaaaattgctatatcacctgagcattctatttccaatgtttttcttgtagattctttatattacaatttgctttctgtttctcaattatgcaaaatgggttacaactgtctttttacagatttaggtgttactatatttagaagaagtgacgattcaatagcatttaagggagtgttagagggtcagctatatttagttgattttaatgataacacagctgaactcaacacttgtttaattgctaagactaatatgggttggctctggcatcgccgactagcccatgttggaatgaagaatcttcacaagcttctaaagggagaacacattttgggactaacaaatgttcattttgagaaagaaagggtttgtagcgcatgtcaagcaggaaagcaagttggcgcccttcatccacacaaaaacataatggcgactgacaggccgctcgagctactccacatggatttattcggcccgatcgcttacataagcgtcggtgggagtaagtactgtgtggttattgtggatgattattctcgcttcacttgggtattctttttgcaggaaaaatcacaaacccaagataccttaaagggattcttaagacaggctcaaaacaagttcggattaaggatcaaaaagataagaagcgataatgggacggagttcaagaactcccaaatcgaaggctatcttgaggatgagggcatcaagcatgagttctcttctccctacacaccacaacaaaatggtgtagtggagaggaagaatagaactctactagacctgacaagaaccatgcttgatgagtacaagacgccggaccggttttgggccgaggcgattaacaccgcttgctactccatcaaccggctctaccttcactgaatcctcaagaagacatcatatgaactcctcaccggtaaaaagcccaacgtttcatattttggagtctttggtagcaaatgtttcattcttattaaaagaggtagaaaatctaaatttgctcctaaggctgtagaaggctttttactaggttgtgactcaaacacaagtgcatatagagtcttcaataaatccattggattagttgaggtttcttgtgacattgtgtttgatgagactaacggctcgcaagtggagcaagttgatcttgatgaattagagatgaagaggctccgtgtgtcgcgctaaggaacatatccattggggatgtgtgtcctaaggaatccgaagagcctacacaagcacaagatcaaccatcatcttcatgcaagcatctccaccaactcaagatgaggaacaggctcaagatgatgaaaatgaagatcaagaggatgagccacctcaagaggaggacaatgatcaagggggagatggcaatgataaagacaaggaagatgagcaggaaattcagggtcaaagactgccacacccaagagtccaccaagcaattcaacgagatcaccccgtcaactccatccttggtgacattcataagggggtaaccactagatcttgagttgcacatttttgtgaacattactcttttgtgtcctctattgagccatatagggtggaggagcactaagagattcggattgggtgctggctatgcaagaggaactcaacaacttcacaaggaatgaggtatggcatttagttccacatcctaaccaaaatgttgtaggtaccaagtgggtattccgcaacaagcaatatgagcatggtgtggtgacaaggaacaaagcccgacttgtggccaaaggttattcacaagtcgaaggtttggactttggtgaaacttatgcacccgtagctaggcttgagtcaattcgtatattacttgcctatgctacttaccatggctttaagctttatcaaatggacgtgaaaaagtgccttcctcaatggaccaatcaaggaagggtctatgtagagcaacctcccggctttgaagatagtgagtaccctaaccatgtgtataaactctcaaaggcgctttatgggctcaagcaagccccaagagcatggtatgaatgcctgcgagatttccttatcactaatggcttcaaagtcagaaaagccgatcctacactctttactaaaactattgcaaaagatttgtttgtatgccaaatttatgttgatgatattatatttgggtctactaacaaatctacttgtgaagaatttagttggatcatgatacaaaaattcgagatgtctatgatgggggagttgaagtatttcctaggatttcaagtcaagcaactccaagatggcaccttcatcagccaaataaagtacattcaagacatacttaacatgtttggaatgaaggatgccaagcccatcaagatacccatgggaacaagtgggcatctcgacctcgacacgggaggtaagtccgtagatcaaaaggtataccggtcgatgataggatctttactctacttatgtgcatctcgaccggatattatgctttctgtatgcatgtgtgcaaggttccaagccgatcctaaggaagttcaccttagggccgtgaaaagaatcataagatatttagtttacactcctaattttggactttggtaccccaagggatctacttttgacttaataggatatttcgatgccgattgggcagggtgtaaaattgataggaagagcacatcaggaacttgtcagtttctgggaagatccctagtgtcttgggcttcaaagaaacaaaacccagtagctctttccaccgtcgaagccgagtacattaccgcaggccattgctgtgcgcaattactttggatgaggcaaaccctcagggactatggctacaaattgagcaaagtccctctcctatgtgataatgagagtgcaatcctcatggcggataattccgttgaacacagccgcactaagcacatagacatttggtatcactttttgagagatcaccaacaaagggggatattgaaattgcttatgttagcaccaaagaacaattatccgatatctttaccaaacctttagatgagaaaacctttagcaaacttaggaatgagctaaatattcttgattctcggaattttgattgaaacattgcacacatagctattttatatacctttgatcatgtctatttcatttggcacatatacatatttcttattcttcttgtgcctaagctaagactaatatggttcaatgagcatcttttgtattaagtcttagattgaaagggaaatggagtattcggcaaagacatcgcttccactcaactccattggtattatctaccctttgccggtattccatcatctctctgattggtatactctttcactcacacttcttttatcaatgggggagaaaatataagaagggctctcaaagtctccatttttggcgattaatgccaaagggggagaaagtactaagcccaaagcaaaaggaccgccgcaccaccacctaattttaaaattgtgtttcaaaaatttcaaattggtatttaaaaagaagactttcaaaattagtattaaaaccctcttgaaaactaaaaggagaatttcattcagggggagttttgtttagtcaaaggaaaagcatttcaaacagggggagaaatttcaaatcttgaaaatgcttcttgcaatcttattcatataactttgactacttgcaaaaaggattttgtaaaagattttccacaagaatttgcaaaaacaaaacaagtggtgcaaacgtggtccaaaatgttaaataaaagaaagcaatccattcatatctagtgaaattatcaaattggtttaattctaagtaacctatgcacttaccttatgcaaactagttcatttctgcactttatatatttgctttagtttgtgttggcatcaatcaccaaaaagggggagattgaaagggaaatagggctaaacttttccaataattaattttggtggttgaatgcccaacacaaatatatggactaactagtttgctctagaatacatgttctacaggtgcacaaaggttcaacacaaaccaataaatattcaagttagggatccaaattcaaaggatcaaagaaaccaagtgtgctatggtccggcgcaccggactgtccggtgtgccaccggacagtgtccggtgcactaggtccgtacagggccaaaccagccgctctcaagttttagaaggtgcactcc

SEQ ID NO: 57925 - DNA, 5357 bp, Zea Mays
agccctctaattttgatataaagatcggctgctaaaagttcatggatcgaaagttatagaggtcaaaatcatctctaaggtcactgtttttaacaaaagtcaaaacacaacttcaccccaaagcatacataagcattacaagttatattattttaaagtgaatgcaacacatgattaaccttttcggaacaatcacatgggatgctgatgctcaagatgatgtcatgcttaaattttagtgacgcttaacacctagggtgttacagctcaacccctctaaaaagaaatctcgtcccgagatttaagaacaactaaaggcttaggttaagacgagaaagacaaggtagtactcacaaccacttcaaacttctgtacccatcgaaaggatggtttacaaactacagtagttgacttaaaaagttatagatcaacgctataaattttacactgaagcaaggaaatctggaaaattttcagcaagataatcttcagattcccaagtagcttcatcttcggaatgtttgttccattgtaccttataaaacttaacaattctccttcgagtgacgcgatccttccgatctaacactcgtattggacattctgaataagtcagatctggttcaagattgacctctgagacatccatagcttgctcgggcactcgaagacatttcttcagttgtgatacatgaaacacgttatgaacggcggacatatgctctggcaactgaagacgataagctacaggtccacactgttgtatgatgcggaagggaccaatatagcgaggtgcgagttttcctttgacgccaaagcgattaacacctttcattggtgatacctttagatagacataatcaccaaccttgaacaccaagggccgacgctttctatcagcataactcttctgacgagactgtgctatcttcaggttgcgttggataagttgaaccttttcctcggcttcatttactaggtcaggtccaaagaaatatctttctcccggttcagaccaatttaaaggagtcctgcatcttctaccatacagagcttcaaagggtgccatcttgatactctcttgatgactgttattataagaaaattcagcaagagggagacattcatcccatttttctgaaaaggccaaaacacatgccctcaacatgtcttccagtatctgattgactctttctgtttgcccactcgtttgaggatgataggcggaactgcgaatcagtttagtgcccaaggacttatgcaactcctcccaaaacttggagacaaactgtggacctctatctgacacaattgtcttaggtactccatgcaaacttaggacacgggcgatgtacagttgagcataagtgagaataggataattgcttttggcagggatgaaatgggctgacttggtaagacgatccacgatgacccaaatagaaccataccctcttgatgtcttgggcaaaccgacaatgaagtccatactgatgtcttcccacttccaagctgggataggcaatggttgtagtggtccggcagattttaagtgcacagccttcaccctttgacaaatatcgcacttggcgacatagcgagcaatttcaatcttcattttggtccaccaaaatctttgtttcagatcctgatacatcttgttactccccgggtgaatggagtatcgggacaagtgagcttcatcaagtatctgttgacgtaactcaggaacttttgggactaccaaacggttttggaaccaaaggacaccattttcgtcaattctaaaacatgtagcccttcctgctacaactcgctccttgatatgagttattcccttgttcaccttttgagcatcaataatttgactttggagagttgattcaagaatgagattagctatggttccttgatgaactatttccaaattcaacctttccatttcttgacacaaggtaacagttaaaggttttgccgaaagacaattacactgagatttacggctaagagcatgtgccacaacattagccttgccaggatgataatgaacttcaaggtcataatctttaatcaactctagccaccttctctgtctcatgttcaattcagactgggtaaaaatgtacttcagactcttatggtcagtgtaaatgtgacatgtattacctagcagataatggcgccaaatcttgagcgcatgaacaacagcagccaactcaagatcatgggttggataattctcttcatgacgcttgagttgccgagaagcataggcaatcacacggccttcttgcatcaatacacatccaatgccaatgccagaagcatcacaatagacatcaaatggtttcgcgatatctggttgagctagcactggtgctgtagtcaatagcttctttagcttctcaaaagctttgtcacactcaagtgaccaaacaaacttgatatggtttttgagcagttcggtgataggcttggctattctagagaaatctggaataaagcgacgataatagcccgccattccaagaaaacttctgacctgatgtacagtagtgggaggtttccaatcgaggatatccttgaccttgctcgggtcgacagcaacaccctcggcagacaaggcatggccaagaaactgaactttatccaaccaaaactcacatttgctaaatttagcatataattggtgttccctaagccgcgtcagaacaatacgtaagtggtctgcatgttcctccttgctcttggagtatatcaggatatcgtcaatgaacacaaccacaaacttgtcgagctccggcatgaacacagagttcattaaatacatgaagtgagctggagcattagtcagaccaaaggacatcaccaaatattcgtaaagaccatatcgagtagtgaaagcagtcttgggaacatcttcaggacgaattcttatctggtgataacctgacctaaggtcaaccttggagaacacttttgctcctgtgagctggtcaaacagcagatcaatgcgagggagaggatatttgtttttgatagtcacctaattgagcggtcggtaatcaacacataacctgagtgtttgatctttcttcttcacaaatagggcaggacaaccccaaggtgatgaacttggccgaatgaaacctttgtcaagcaagtcttgcaactgagtcttcagctctgctaactccttaggtggcattctgtatgaccttctagatatgggtgcggtacctggctgcaattcaattacaaattccacatctctttctggaggtaaaccaggcaaatcttcgggaaacacgtccggaaactctctgactaccggtatatcctttatctctttaatggtgacagcacatactctttctactgctctcttaggagtcggtaaccggattagcaatttagagctgtcattgggtgaatccaactgaactgtccgttgcaacgtatcaataatagctccatgttgacgtaaccagttcatgccaaggatcacatctatgtcctgcttctggaggacaagcaagttggtaggaaaaatgtgaccctccagatttatgggcaccttctccaccatttccttagtatagatacgtcctccaggggattgtatacaaaaagtatctttcccttcttctattggtaattgatacttcacaacaaaagctctattgatgaaggtatgagatgcgcccgaatcaaatagaatcactgcaggatggttggcgacataaaacacactcatcataacaggggcaccttcagaaattccatgagtatgagtgagattgacctgccccatcctaggaacagtcctgtttttctttctagtattctgtcggatactctgagatggagtcgttagcgactgttgctccgccactggtttaggcaaacgacaatcttgggtagtgtttcctgacttcctgcagatatcacatgggattctgttgaccaaatggtttttggaacaaatgcctggggcatccgactgatgtgggagaaaaggaacaacggcgtgtcggacacataactgtgaactgggtaactgggatggaggatcaagagaacaaatgataggtttataaacaatcctctgacgtcgactactgctacttgaggattcttcagcaaatttctttctcttagactcttgatgaaggcgaatcttatcatcacccagaatggcctgactgactacatcattataactttcagccacattgggtgccatcaagcgttggagcttcatattaaggccacgcatgaaaaagaacttcttcgtggcttcagtattgacataatctgcagcatactgagataactgattaaacctctctaaatactccataacactctccccttcaccttgcattaggttaaaaaactcatcaacttttatactcatgatacccttcggaatataatgtgcccgaaatgcctcacagaactcaacccaaggaacttgatatccctctggctgggttgcacaataatttgcccaccaggctccagcttgaccctggagttgttgagcggcaaaccgggctttctgaacgccatcacaatggatgagtccaaacttctgctcaatagttcgaagccaatcctcagcttcaagaggatcttcagctctagtgaaaactggtggttgcgtgtccaaaaattccttgtaagtactggcagcatttggatcccgctgaccacgctgaaccaactcatggagaaggtgagtatgatcaatgcctacactaatgacttgtgcaactgcattctcaagcgcggatgttgactgtggattagatgtgttagccatattctaggaagtgccctcaccatgaaccaatccagaacgagtcctcattctgtcaataaaagagaacttagctcccaatctcacggatttaaaaagacaagacagaaaagcaaggacgggtagcatgaatagggtggatgagacactctcaaatagctacatgggggttgaatttaaggttatatgtcatgatgcatgcttgtcctaaacgtttcccacgttgtgggttagtaatttgttctatgatagtccttaattttagggcttaatagaggatgtcgctagcattatagttttttttaaaccaaacaatatgtttgatgaaaatagactttttaaaatcaaaactttattttagaagtaagtatgtgatcatattatacttaatcctgctccgataccagctgtggctgaacctcccaaattataggacccacatgcacttgtccttgtctcaaagacatcaaacagctatgcatgtgtgcccgataacttaacaggatctgtccgagtatcccaggggacctcg

SEQ ID NO: 57926 - DNA, 2651 bp, Zea Mays
gcggctttcttgttaaaaaaaaaatctcgagaatatattcactagctagagggactagtagtaggtagtagtagaggagaacagccactcagccagccccctttacttgcacacaatagacaacctcgaacagaaaagaagcagttttgccgtccgagatgagccgccactgtgtgactctccttgtgatcatctttggattactgcagatggctgtggctctctactctaatccaagttcaacgcacccgaactgcacggagagatgtggcaacgtcagcatccaatatcctttcggcttcggatccggctgcttccggcagcccgatttcagcctcacctgcgacggcggcggcggcggcaaccagccgcccaagacctttctgcatgacggcatcaccgaggtcttgcccgattccggtgtcacggtgggtctgtcaaggcttattgatgtagccatttcccacaccatctttatggcacctggtattcctagttacaacttctcgtggaatctcagttctttcactatgttggatggctcattcaacgtaactgggtgtgacttcgatatatatcgtcaagaaccgggcaagaatggttccataccgcggtgtacaaatagctgcccccaaaacatcaccgagacggtggccagacagaactgcaatggaaccgggtgctgccgtctttacgttggagaagttgttcctgatttccagctgaaatttgtgctccacaataatgacactagaggtgatcatgatgctctttctaatggaagcaccctgtggaatacaataaacattaccagcaactgggcccaaatcttatgggatatagatgatcaaccgacatgctccagagcgaaggacaaaaatataaactacgcatgtgtcagcaactacagccattgctttgacgctgaactgtttgatattggttatagatgtggttgtaacagcggttacgtaggcaatccctatgtagttgatggctgcaagcgtgacgaaggatatagtccaaatcaactgaaggaaaactgctcgaggtcctgtggtaatatcagtgttccatatccctttggtttagaggaaggttgctctgcaaggaagctatttaaactcaactgcagaaatgcgacagcgtctatgctccaattcgatgacgaccgtgttgtggcgtttataaatgttgcagagagtctcgtgggcatcaggtttacctcacatttcgaagatgatcagcttgggatatatgtaccaggtgaacccgatctctttatgggtcttggggaatcagtggtctcaatgcactgggcagctgccaatcttacatgcgacgaggccctgaaaaataaatcacaatatgcatgtgtcagttcaaacagcaaatgtttaggagtcaattcaaaggatggttatattggatacagatgcaaatgcttagatggtttccaaggaaatccatataccatcagtgatggttgtgaagaggttttgctgctgtgctaaagcttgatccttttgatggtaaaaacttcttgatttggaaagctaaaatggaattgtggctaactgcaatgttatgttattatgtcgctgagggcaagcctgccaacttacctcctgaggatgaagctaagtttaaggctgatgacaacctcttttgaggagcagtgattagcgcacttgacacaaaattccagaaaagctatatcatccttcccacagggaaagagctgtgggatgcacttgttggaaagtttggagttactgatgctggtagtgagttgtatctcatagagcagttgtatgactacaagatggttgagaaccgatctgtagtggaacaggctcatgagtttcaggcactagctaaggaactcgagctttttccttgtcctttgcctgacaagtttgtggctggcggtataatcgccaagttgccaccttcttggaaggattttgctacctctctcaaacataagagaaaagagttcaatgtggaagagcttattggtactcttgatgttgaggaaagagctagaacaaaggacaatggaaaaggtgttgagacctctactgctaatgtggtgcagaagagaaactttcgcaagtttaacaagaagaaaaaccagaacaaacaagagaatacaaataaacctgttcaaacagcacaatttaaaaagaagaagaacaacaacaagggaaagggaggatgctttgtctgtggcagtgatcaacactgggctagagagtgccctgatcgcaagttcacacaggacaagaaatcagctaatgttgtaaccactgaaactggagatggaacatctgggtcgggaggtctgatgccttgttaatggaaaatgggtcgcgtgctcatgttcttggtgttggtacggtcattcttaagtttacctcgggaaagacagtgccattgaagagcgtgtagcatgtgccctctatcaagaagaatctcgttagcgtttctatgctatgttgagatggatacaaagttgttcttgagtctaataaatgtgttgtgtctaaacatggtatttttgttggtaaaggatatgactgtggaggtttgttccgcttatcactgcatgatgtgtgtaataaactggtgaattctgttaatttttc

SEQ ID NO: 57927 - DNA, 3956 bp, Zea Mays
ctagtagtaggtagtagtagaggagaacagccactcagccagccccctttacttgcacacaatagacaacctcgaacagaaaagaagcagttttgccgtccgagatgagccgccactgtgtgactctccttgtgatcatctttggattactgcagatggctgtggctctctactctaatccaagttcaacgcacccgaactgcacggagagatgtggcaacgtcagcatccaatatcctttcggcttcggatccggctgcttccggcagcccgatttcagcctcacctgcgacggcggcggcggcggcaaccagccgcccaagacctttctgcatgacggcatcaccgaggtcttgcccgattccggtgtcacggtgggtctgtcaaggcttattgatgtagccatttcccacaccatctttatggcacctggtattcctagttacaacttctcgtggaatctcagttctttcactatgttggatggctcattcaacgtaactgggtgtgacttcgatatatatcgtcaagaaccgggcaagaatggttccataccgcggtgtacaaatagctgcccccaaaacatcaccgagacggtggccagacagaactgcaatggaaccgggtgctgccgtctttacgttggagaagttgttcctgatttccagctgaaatttgtgctccacaataatgacactagaggtgatcatgatgctctttctaatggaagcaccctgtggaatacaataaacattaccagcaactgggcccaaatcttatgggatatagatgatcaaccgacatgctccagagcgaaggacaaaaatataaactacgcatgtgtcagcaactacagccattgctttgacgctgaactgtttgatattggttatagatgtggttgtaacagcggttacgtaggcaatccctatgtagttgatggctgcaagcgtgacgaaggatatagtccaaatcaactgaaggaaaactgctcgaggtcctgtggtaatatcagtgttccatatccctttggtttagaggaaggttgctctgcaaggaagctatttaaactcaactgcagaaatgcgacagcgtctatgctccaattcgatgacgaccgtgttgtggcgtttataaatgttgcagagagtctcgtgggcatcaggtttacctcacatttcgaagatgatcagcttgggatatatgtaccaggtgaacccgatctctttatgggtcttggggaatcagtggtctcaatgcactgggcagctgccaatcttacatgcgacgaggccctgaaaaataaatcacaatatgcatgtgtcagttcaaacagcaaatgtttaggagtcaattcaaaggatggttatattggatacagatgcaaatgcttagatggtttccaaggaaatccatataccatcagtgatggttgtgaaggtacaacttaactgtgattctcacccctatccaatttccatttaattttagtgtatctgctggatctattccgtcacatgcatatccactttatttcatcaccatgtatttacgctaacatcttctcaagatgggtcaaaaaaatatttttaatatttatcttgttacaagttgacacattttctttaggacttagaccttttatgagataatcagctagttggctatgagacttaatggaatagccttacacttccactatctgttggatcttttatgggtctggccaatttattgaataaactctatggtgtgtaatggtggagaatactaatagtaccatattggaaatccaagggtcttttggcttaacttatatggtgggaattattccacttaatttgagaagtcaagaaatgaacagggcgtaccacacgcgcgcgcgcgccgccgctgcccgggcgtggcgtggcgaggcaggcggcgagcgggcgtggtgtggttttgttaatttttagcactcattaacagcgggagtttcaactccgggttaaacctttcagttgtccgtctcttcgtcagccgcgcgagaccctttgtcctttagctgcccgtctcctggcgtgccgcatgcgacccttctcctttagcttccctctgcgagaggttaaatagaggagaacccctggcacttggtacacgagaacagaaccattttcagtcacagtccagccgcaagtgagagtattcccatctcgtgactctgcgcgcacagagcagcgagaggacaggtgcctccgaagcccttgccgttcgagaccttgcacaggggatcggcaattaggtttttggggagcgtctacgcgactgcccaaaacatcttcttcctggcgacatgacaagggaagctgaacaaggatctagatcatcagagcgcatgggagggtatgatcagtttattttcttactgttttacgttctgcagattatatatgtttcatatattcatctatgttgttttatatgtagcaatgattttatcttatctgtcctgtcttattataatatgctatatctgtttgttttaattttacagtcatgttgtttatattgctatctgtttagtttcaattgttcagttagtttatatgcttatcgtatttatatgatttatatgattcatatgctttatgttctcatgatccatattgttatggatctgtttgagatcacgatttctatgattaattatttgttaatgtcgtcatcataatattaatttatggaattaaaatgatatggaaaatgcctatatatctaacaatccaaaaacctaatgttaggcattttttctgtcagaggttttgctgctgtgctaaagcttgatccttttgatggtaaaaacttcttgatttggaaagctaaaatggaattgtggctaactgcaatgttatgttattatgtcgctgagggcaagcctgccaacttacctcctgaggatgaagctaagtttaaggctgatgacaacctcttttgaggagcagtgattagcgcacttgacacaaaattccagaaaagctatatcatccttcccacagggaaagagctgtgggatgcacttgttggaaagtttggagttactgatgctggtagtgagttgtatctcatagagcagttgtatgactacaagatggttgagaaccgatctgtagtggaacaggctcatgagtttcaggcactagctaaggaactcgagctttttccttgtcctttgcctgacaagtttgtggctggcggtataatcgccaagttgccaccttcttggaaggattttgctacctctctcaaacataagagaaaagagttcaatgtggaagagcttattggtactcttgatgttgaggaaagagctagaacaaaggacaatggaaaaggtgttgagacctctactgctaatgtggtgcagaagagaaactttcgcaagtttaacaagaagaaaaaccagaacaaacaagagaatacaaataaacctgttcaaacagcacaatttaaaaagaagaagaacaacaacaagggaaagggaggatgctttgtctgtggcagtgatcaacactgggctagagagtgccctgatcgcaagttcacacaggacaagaaatcagctaatgttgtaaccactgaaactggagatggaacatctgggtcgggaggtctgatgccttgttaatggaaaatgggtcgcgtgctcatgttcttggtgttggtacggtcattcttaagtttacctcgggaaagacagtgccattgaagagcgtgtagcatgtgccctctatcaagaagaatctcgttagcgtttctatgctatgttgagatggatacaaagttgttcttgagtctaataaatgtgttgtgtctaaacatggtatttttgttggtaaaggatatgactgtggaggtttgttccgcttatcactgcatgatgtgtgtaataaactggtgaattctgttaatttttc

SEQ ID NO: 57928 - DNA, 3542 bp, Zea Mays
ctagtagtaggtagtagtagaggagaacagccactcagccagccccctttacttgcacacaatagacaacctcgaacagaaaagaagcagttttgccgtccgagatgagccgccactgtgtgactctccttgtgatcatctttggattactgcagatggctgtggctctctactctaatccaagttcaacgcacccgaactgcacggagagatgtggcaacgtcagcatccaatatcctttcggcttcggatccggctgcttccggcagcccgatttcagcctcacctgcgacggcggcggcggcggcaaccagccgcccaagacctttctgcatgacggcatcaccgaggtcttgcccgattccggtgtcacggtgggtctgtcaaggcttattgatgtagccatttcccacaccatctttatggcacctggtattcctagttacaacttctcgtggaatctcagttctttcactatgttggatggctcattcaacgtaactgggtgtgacttcgatatatatcgtcaagaaccgggcaagaatggttccataccgcggtgtacaaatagctgcccccaaaacatcaccgagacggtggccagacagaactgcaatggaaccgggtgctgccgtctttacgttggagaagttgttcctgatttccagctgaaatttgtgctccacaataatgacactagaggtgatcatgatgctctttctaatggaagcaccctgtggaatacaataaacattaccagcaactgggcccaaatcttatgggatatagatgatcaaccgacatgctccagagcgaaggacaaaaatataaactacgcatgtgtcagcaactacagccattgctttgacgctgaactgtttgatattggttatagatgtggttgtaacagcggttacgtaggcaatccctatgtagttgatggctgcaagcgtgacgaaggatatagtccaaatcaactgaaggaaaactgctcgaggtcctgtggtaatatcagtgttccatatccctttggtttagaggaaggttgctctgcaaggaagctatttaaactcaactgcagaaatgcgacagcgtctatgctccaattcgatgacgaccgtgttgtggcgtttataaatgttgcagagagtctcgtgggcatcaggtttacctcacatttcgaagatgatcagcttgggatatatgtaccaggtgaacccgatctctttatgggtcttggggaatcagtggtctcaatgcactgggcagctgccaatcttacatgcgacgaggccctgaaaaataaatcacaatatgcatgtgtcagttcaaacagcaaatgtttaggagtcaattcaaaggatggttatattggatacagatgcaaatgcttagatggtttccaaggaaatccatataccatcagtgatggttgtgaaggtacaacttaactgtgattctcacccctatccaatttccatttaattttagtgtatctgctggatctattccgtcacatgcatatccactttatttcatcaccatgtatttacgctaacatcttctcaagatgggtcaaaaaaatatttttaatatttatcttgttacaagttgacacattttctttaggacttagaccttttatgagataatcagctagttggctatgagacttaatggaatagccttacacttccactatctgttggatcttttatgggtctggccaatttattgaataaactctatggtgtgtaatggtggagaatactaatagtaccatattggaaatccaagggtcttttggcttaacttatatggtgggaattattccacttaatttgagaagtcaagaaatgaacagggcgtaccacacgcgcgcgcgcgccgccgctgcccgggcgtggcgtggcgaggcaggcggcgagcgggcgtggtgtggttttgttaatttttagcactcattaacagcgggagtttcaactccgggttaaacctttcagttgtccgtctcttcgtcagccgcgcgagaccctttgtcctttagctgcccgtctcctggcgtgccgcatgcgacccttctcctttagcttccctctgcgagaggttaaatagaggagaacccctggcacttggtacacgagaacagaaccattttcagtcacagtccagccgcaagtgagagtattcccatctcgtgactctgcgcgcacagagcagcgagaggacaggtgcctccgaagcccttgccgttcgagaccttgcacaggggatcggcaattaggtttttggggagcgtctacgcgactgcccaaaacatcttcttcctggcgacatgacaagggaagctgaacaaggatctagatcatcagagcgcatgggaggaggttttgctgctgtgctaaagcttgatccttttgatggtaaaaacttcttgatttggaaagctaaaatggaattgtggctaactgcaatgttatgttattatgtcgctgagggcaagcctgccaacttacctcctgaggatgaagctaagtttaaggctgatgacaacctcttttgaggagcagtgattagcgcacttgacacaaaattccagaaaagctatatcatccttcccacagggaaagagctgtgggatgcacttgttggaaagtttggagttactgatgctggtagtgagttgtatctcatagagcagttgtatgactacaagatggttgagaaccgatctgtagtggaacaggctcatgagtttcaggcactagctaaggaactcgagctttttccttgtcctttgcctgacaagtttgtggctggcggtataatcgccaagttgccaccttcttggaaggattttgctacctctctcaaacataagagaaaagagttcaatgtggaagagcttattggtactcttgatgttgaggaaagagctagaacaaaggacaatggaaaaggtgttgagacctctactgctaatgtggtgcagaagagaaactttcgcaagtttaacaagaagaaaaaccagaacaaacaagagaatacaaataaacctgttcaaacagcacaatttaaaaagaagaagaacaacaacaagggaaagggaggatgctttgtctgtggcagtgatcaacactgggctagagagtgccctgatcgcaagttcacacaggacaagaaatcagctaatgttgtaaccactgaaactggagatggaacatctgggtcgggaggtctgatgccttgttaatggaaaatgggtcgcgtgctcatgttcttggtgttggtacggtcattcttaagtttacctcgggaaagacagtgccattgaagagcgtgtagcatgtgccctctatcaagaagaatctcgttagcgtttctatgctatgttgagatggatacaaagttgttcttgagtctaataaatgtgttgtgtctaaacatggtatttttgttggtaaaggatatgactgtggaggtttgttccgcttatcactgcatgatgtgtgtaataaactggtgaattctgttaatttttc

SEQ ID NO: 57929 - DNA, 1666 bp, Zea Mays
ctagtagtaggtagtagtagaggagaacagccactcagccagccccctttacttgcacacaatagacaacctcgaacagaaaagaagcagttttgccgtccgagatgagccgccactgtgtgactctccttgtgatcatctttggattactgcagatggctgtggctctctactctaatccaagttcaacgcacccgaactgcacggagagatgtggcaacgtcagcatccaatatcctttcggcttcggatccggctgcttccggcagcccgatttcagcctcacctgcgacggcggcggcggcggcaaccagccgcccaagacctttctgcatgacggcatcaccgaggtcttgcccgattccggtgtcacggtgggtctgtcaaggcttattgatgtagccatttcccacaccatctttatggcacctggtattcctagttacaacttctcgtggaatctcagttctttcactatgttggatggctcattcaacgtaactgggtgtgacttcgatatatatcgtcaagaaccgggcaagaatggttccataccgcggtgtacaaatagctgcccccaaaacatcaccgagacggtggccagacagaactgcaatggaaccgggtgctgccgtctttacgttggagaagttgttcctgatttccagctgaaatttgtgctccacaataatgacactagaggtgatcatgatgctctttctaatggaagcaccctgtggaatacaataaacattaccagcaactgggcccaaatcttatgggatatagatgatcaaccgacatgctccagagcgaaggacaaaaatataaactacgcatgtgtcagcaactacagccattgctttgacgctgaactgtttgatattggttatagatgtggttgtaacagcggttacgtaggcaatccctatgtagttgatggctgcaagcgtgacgaaggatatagtccaaatcaactgaaggaaaactgctcgaggtcctgtggtaatatcagtgttccatatccctttggtttagaggaaggttgctctgcaaggaagctatttaaactcaactgcagaaatgcgacagcgtctatgctccaattcgatgacgaccgtgttgtggcgtttataaatgttgcagagagtctcgtgggcatcaggtttacctcacatttcgaagatgatcagcttgggatatatgtaccaggtgaacccgatctctttatgggtcttggggaatcagtggtctcaatgcactgggcagctgccaatcttacatgcgacgaggccctgaaaaataaatcacaatatgcatgtgtcagttcaaacagcaaatgtttaggagtcaattcaaaggatggttatattggatacagatgcaaatgcttagatggtttccaaggaaatccatataccatcagtgatggttgtgaaggatgacaaagccgagtccgaagccaaagagtaagaagacgaagccgaagtttagtggatgacgaagtcaaagccgaagccaaagctcaatggacactaatgaagcttgaatagataactataggaaaaactctaaaaacccttgtaataacctttgtaaagaacaatgtaattaattttcactttgtaaactttgtccataccttgtaatatattcttacctttcc

SEQ ID NO: 57930 - DNA, 3124 bp, Zea Mays
ctagtagtaggtagtagtagaggagaacagccactcagccagccccctttacttgcacacaatagacaacctcgaacagaaaagaagcagttttgccgtccgagatgagccgccactgtgtgactctccttgtgatcatctttggattactgcagatggctgtggctctctactctaatccaagttcaacgcacccgaactgcacggagagatgtggcaacgtcagcatccaatatcctttcggcttcggatccggctgcttccggcagcccgatttcagcctcacctgcgacggcggcggcggcggcaaccagccgcccaagacctttctgcatgacggcatcaccgaggtcttgcccgattccggtgtcacggtgggtctgtcaaggcttattgatgtagccatttcccacaccatctttatggcacctggtattcctagttacaacttctcgtggaatctcagttctttcactatgttggatggctcattcaacgtaactgggtgtgacttcgatatatatcgtcaagaaccgggcaagaatggttccataccgcggtgtacaaatagctgcccccaaaacatcaccgagacggtggccagacagaactgcaatggaaccgggtgctgccgtctttacgttggagaagttgttcctgatttccagctgaaatttgtgctccacaataatgacactagaggtgatcatgatgctctttctaatggaagcaccctgtggaatacaataaacattaccagcaactgggcccaaatcttatgggatatagatgatcaaccgacatgctccagagcgaaggacaaaaatataaactacgcatgtgtcagcaactacagccattgctttgacgctgaactgtttgatattggttatagatgtggttgtaacagcggttacgtaggcaatccctatgtagttgatggctgcaagcgtgacgaaggatatagtccaaatcaactgaaggaaaactgctcgaggtcctgtggtaatatcagtgttccatatccctttggtttagaggaaggttgctctgcaaggaagctatttaaactcaactgcagaaatgcgacagcgtctatgctccaattcgatgacgaccgtgttgtggcgtttataaatgttgcagagagtctcgtgggcatcaggtttacctcacatttcgaagatgatcagcttgggatatatgtaccaggtgaacccgatctctttatgggtcttggggaatcagtggtctcaatgcactgggcagctgccaatcttacatgcgacgaggccctgaaaaataaatcacaatatgcatgtgtcagttcaaacagcaaatgtttaggagtcaattcaaaggatggttatattggatacagatgcaaatgcttagatggtttccaaggaaatccatataccatcagtgatggttgtgaagatatcaatgaatgtaaaacacaacacatttgcaaagagaacgaggtatgcaacaatgttgtagggagctactactgcaccaattgccctgataaaacagagtacgatgcagcaacaaaccagtgcaaagcaacaaaacagctgggtcttgttttgggtgtgattattgggctttgtgttggctttggcattctagtatcttgcttgggcgggatgcttgtcatccgtagatggaaaagggacattcaaaagcaactacggagaaaatactttagaaaaaaccaaggacttctcctagaacaactaatatcatctgatgagaatgcccgcaacaatacgaagattttttctctggaagagctcaagaaggctacaaatgactttgatacatcacgcatacttggacgtggaggccatggaatggtttacaaaggaatcttgtcggatcagcgtgtggtagcaataaaaatttccaagatcatggagcaaggtgaaatcgacagttttatcaatgaggtcgccattctttctcagataaaccaccgcaacatagtacgactcttcggatgttgtcttgaaactgaggtcccacttcttgtgtatgatttcgtatctaatggttctttgttcgaaattctccatgccgctgaggcaagcaacgatttccagttgtcttgggacgattgcttaaggattgcattagaggctgcaggggcactttattatctccattcttcagcttcagtctcaatcttccaccgtgatgtcaagtcctcgaatatacttttggatggaaactacactgcaaaagtttcagattttggtgcgtcaaggttggttcctattgaccaaacccatgttgttacgaatattcaaggcacttttggctacttagatcctgagtactaccacactgggcaactaaatgagaaaagtgatgtgtatagctttggagtggtacttgtggagctactccttcgaaagaagccggtttttacaaatgagactgggacaaagcaaaatctgtccaactatttcctttgggaaaagaagatgaaacctgttacagagatagtggcttctcaagttctcgaggaagcaacagaggaagaaattaacatggttgcctcccttgccgagaagtgcttgagactccgtcacgaagaaagacctacaatgaagctagtagaaatgactctacagtttttgcgagcagagcggttgaactcaagtagtgatgttcctgcgagcaagcaagaggtggaagaacttttgggtacaagcacttcctattctgacactttgctggacaataaagctgctacaacatcccaacaatcaaagggatattatagtttggagcaggagtttgcttctactactctaccacgttagatttgtcactcgagtgtgaattattaccgttgtcatttacgttataattcgtgaaccaaacaacacctcggtgcgttgtcatttacttgttattctgtcatgaaaaagtatattgactatggcagcaaacgtagcagcaccttgaaacacattattacagattcttcagttcattcttaataatcttcccagagcactgtctattagatatcatcttcttcatctctattctgcaacaacaagaccatatgttgtagagtagatgctaggatgtcaccaccatcgtctgg

SEQ ID NO: 57931 - DNA, 1223 bp, Zea Mays
atgcgagtccagattccatcgcctaccttgaaataacccgcctcgcctcggcttgcaaccgtcccattgcattgcaaggaaggaacacctgctctgctccgctctcgcccctcgccctccaagcaacaacccgccggctgtctgccgtcgccgccgcgccaccacaacaccagtccaccaccacgcggcggacgccacgacgatggagctctttcctcacgggggcttcgtgcggctgcggagccgagcgcgggacaagtacgtccacgccgacgtggacgcgagcggggtctccctgcgcccgctcggcgccgcaccctctgtgaacgcggtgtggaaaccggagcgttggcccagcgaaggggacttcttaatcctccagatcgtcgcctacggccggtacctcgctgtctcggacaaggacgcgccgcccggccaccgcggcgtccgcgccgtccagcgcgactacaactcgccgcgcgcggaggctcccttcttgtggacggcctttagggtggatgcccaccagaactacgtccgcttgcacaaccaccagcgctggctccgcgccaacggcaggcatcgctactggaacaacgtcgtcaccatcgataccaggaacgccagcctgaccacgatgatgcagtggagggtcgaggaaatcccagtgagcccggagccgctaccccttccgcctccacctcaacaacctacgattcatgtaagccgtggcctattcaagcggcgggccaaggtgcatccatcgggccggatgatacagcacgtgcggatggacgatgatgggtttattcttgacaattggcctgatttcaacttcgacgactactccgtgtccaacctgagggccgaggtggcgctccgtcaggatgacgagaacatcacgttgtgcctgcgggccggcaagcatgcgctcttaatcccgcttatcacagacctgcctcataacacagatcccctggacatcatcgtgatgcccgccggatcaccagttgtgcttgaggtaatgctctacttggtggttagttaatctgaaccctagttcggatacattcagttgttctgcttgatagccaatagtgttttttacataagcagacaatatttgtcaatctttgtggggctaactgtctactgttatctattatgtgtactcttgattaggtcccattgctgttattatagcatccctaagggctagtttg

SEQ ID NO: 57932 - DNA, 4342 bp, Zea Mays
agtaagagctctgagcaaccatggcggagatagtcaccggggcgatgggcactctcctgcccaagctggccaacctcatcaaggaggagtataacctacagaagaaagtgaggggtgagatcatgttcctggagactgagctcaagagcatggaggctgctctcatcaaggtctccgaggcacccatcgaccacccacctgacgtccaagtcaagctctggacaagggaggtgagagagctgtcctacgacctcgaggacagcatcgacagattcatggtgcgagttggcgatggcaagccacatagtttcaagggattcattgatagaagcctccacctgctgacaaggggcaggattcaacacagcatcggcatagacatcaaggagatcaggagccgcataaaggatgtgagtgaacggcgtgacaggtacaaggttgatctggttccttccaagcctgttggcagaagcattgacaacctgcggctgtcggctctttacagaaaggcgacagaacttgttggcgccgaagagaagagcagtgaccttgtgaaaaggctcatggagggcgacaaggaggcatccaagcagccagttgtactgtctattgttggctttggagggttaggcaagactactcttgctaatcttgtgtatgagaagattaaagggcaatttgtctgtggggcatttgtttatgtgtctcataatcctgatgtcgtcaaggttttcaaaaacatgctctaccagcttgatggagacaaatacagggacatcaatcaaggaacatggagtgaagaacaactaatctgggaactgaggaagttccttctacacaagaggtactttattgtcattgatgacatatggaatacttctgtgtgggaaacaatccaatgttctttgatgcacaatgaatgtggaagtataataatcatcacaactcgtaatattgatgttgcaaaacaagctggaagtgtttatcaaatggaacctctttctctcagcgactcaacaaagttattctgccaaataatttttggcagtgaagacaaatgtcctccagctaatttagctgaagtggctggtaaaatcttacagaaatgtggtggtgtaccattagctatcattaccatggcaagtatgctagccaataaaactggaaaggaaataaacacacatagctattggtcacatgtgtaccaatccatgggttatggtctagatggcagtactaatgtgaagaatatgagaaggatactatcagttagttactatgacctaccttcacatctaaagacttgcttgttatacctaagtttgtatccagaggactacaggattagaacaagaggtctgatatggaaatggattggtgaaggttttgtccatgaagaacaagggaagagcctatatgaagtaggtaaggattatattgaagagttagttaacacaagtatgttagaacctgtcgggattggccatgatggtaagaccgtatcttgtcggatacatgatatggtccttgatcttatcagtttcttgtcaaatgaggagcattttctaacaaaagtaggtgggcaacaacccgtatctcttgatctgcctaaaaaggtccgccggttatccctccaaattagccaggaagaggaagccaagcagctagctacaatgagcttctcccacgtaaggtcacttactgtgtccactgaagttttccagttgacgccaaaactttcggcctttctggtcttacgtgtattgaatttaaagaaatgtaatggagtgaacaatcaccactttaaagatatttgcaatatgtttcagctgagatatttgagtctcaatgcgaaatttattactgagatcccaagggagattcggaatctgcaatttttgcaagtacttgacataactaatcttgggcacaaagtaaagatgacaaccattattcacttgcgacagctgttgcggctttgttctaggtctgggtggagcataaaacagctagacggatttggaaaactaacctctctacaagaagttaaagggaccataactatcgagtcaccaagcatgctgcatgatctggggtgtctgaccaatctcaggaccttgggcatcaactttcgtgattgggatgagagctatgaggaacctttcatccaatgtctatctaaccttgtcagcctcaaatccatgaaaataaaaggtaccatgatgagcagcctatgttccgaatgtgacaaattgtaccctggtcctcaacaactttgctccattgatatgaagtcacttgcaagaactgtcatcatgactagagtaccaagatggatgtcatcactctgctccctgtctagcataaagatcacattattagctctgggagtacaagatatccatgtccttgggagcataccatctctacgttgtctcagtgtacatgtgaaggaaaccagagatgaaaggttggtcattgacaagtgttatccattccggtgcctaactgagatgcaaatcgattatgaatccatggcggtggtgttcgcaccagggagtatgcaaaacctcaaagaactccatttattgttcggggtgaaagagaggaagattaggtctcaagcacaagcaataagagcagcaattttgttcgctaatgcaggccgcatccctgctactgactgaaggattataaacattctctatcgccttgctaataaactgcatattcccttctctaattggcactgcattctcaacgtcgcatgggtactagtggcaaataagctctctgaagtcatgaattttctacagataatccaaagccacgtccgtgacgacgatgtacgatacgacgatgtccgcggaagaagccagagtcgatgctgtgatctgggggcgacgtcgcagtccatcctgccagcacagcacatcacattgctccgcctcggggaggaagtagggcggcggttacttgtcccgctccaactacaaagcccagactgcccagtccgcatccccagcagccgtgacaccgccacagcagcctcggcgctgcgtttctgccttcccgtgcctctcacggtggagcaagggagtccggtgaaggacccgatgtaccagaatcctccgtcgaccatggaggcaaatccgatggagtcgtgccccagtaaagaggtggagaacttgagggagaagctggttgaagaaaatttctaccttatcactgagctaggtgaacaaggacgagtacctgtacttctgctgaagcttgacgaccccgtccctagaagaaaaccagctatcgtgttcctgcacagctcttacaagtgcaaagagtggctgcgcccactgcttgaggcatatgcttccaagggctacgtctgtgtggctattgactcgcgctatcacggcgaaagggccagcaatgaaaccacttacatagatgcactgaaatcggcttggcggaatggggatacaatgcctttcgtttttgacacggtgtgggacttggtaaagcttggagactacctcggcgagagggaggacgtggatccctgtagggttgggatcaccggcgaatcgctgggagggatgcacgcgtggtttgctgcttttgtggacacacggtacagtgtcgtcgttcctatcatcggtgttcagggattcaggtgggccattgacaacaacatgtggctggctagggtgaatagcataaggcctttatttgaagaagcaagaattgacttaggaaagagcgaattagatacagaagttgttgaaagggtttgggaaaagatagcaccaggcctggactcgcaatttgatgccccctattcacttcctttgcttgcaccacggccgttgctacttctaaatggcgctgaagatcctcgttgcccaataagtggtttaggagaagctatttcaaaaactgctaaagcttacgaagaatctggttgcgcggagaagttcatgtattatagtcttaaagaagaatttggagagttgtagcatatcaaatctgggccctttttaaaagccacccaagataagatcatggacttttggagttttctccaagtagagggtctaggcatgcaaattattataatcctcatcactttacaatgcaatgaggaatgtaggttgttattcaaccaaaaatatcatatatttagatatcttcgtactcactctgttcttttttatttatcgtgttttagttcaataatgaactatcgaacgataatattcgagaatgaagttagcatattttatggacgcaaactagaactgattattgctggtgagtgacagaaaagtagcactgactacca

SEQ ID NO: 57933 - DNA, 4350 bp, Zea Mays
atggcggagatagtcaccggggcgatgggcactctcctgcccaagctggccaacctcatcaaggaggagtataacctacagaagaaagtgaggggtgagatcatgttcctggagactgagctcaagagcatggaggctgctctcatcaaggtctccgaggcacccatcgaccacccacctgacgtccaagtcaagctctggacaagggaggtgagagagctgtcctacgacctcgaggacagcatcgacagattcatggtgcgagttggcgatggcaagccacatagtttcaagggattcattgatagaagcctccacctgctgacaaggggcaggattcaacacagcatcggcatagacatcaaggagatcaggagccgcataaaggatgtgagtgaacggcgtgacaggtacaaggttgatctggttccttccaagcctgttggcagaagcattgacaacctgcggctgtcggctctttacagaaaggcgacagaacttgttggcgccgaagagaagagcagtgaccttgtgaaaaggctcatggagggcgacaaggaggcatccaagcagccagttgtactgtctattgttggctttggagggttaggcaagactactcttgctaatcttgtgtatgagaagattaaagggcaatttgtctgtggggcatttgtttatgtgtctcataatcctgatgtcgtcaaggttttcaaaaacatgctctaccagcttgatggagacaaatacagggacatcaatcaaggaacatggagtgaagaacaactaatctgggaactgaggaagttccttctacacaagaggtactttattgtcattgatgacatatggaatacttctgtgtgggaaacaatccaatgttctttgatgcacaatgaatgtggaagtataataatcatcacaactcgtaatattgatgttgcaaaacaagctggaagtgtttatcaaatggaacctctttctctcagcgactcaacaaagttattctgccaaataatttttggcagtgaagacaaatgtcctccagctaatttagctgaagtggctggtaaaatcttacagaaatgtggtggtgtaccattagctatcattaccatggcaagtatgctagccaataaaactggaaaggaaataaacacacatagctattggtcacatgtgtaccaatccatgggttatggtctagatggcagtactaatgtgaagaatatgagaaggatactatcagttagttactatgacctaccttcacatctaaagacttgcttgttatacctaagtttgtatccagaggactacaggattagaacaagaggtctgatatggaaatggattggtgaaggttttgtccatgaagaacaagggaagagcctatatgaagtaggtaaggattatattgaagagttagttaacacaagtatgttagaacctgtcgggattggccatgatggtaagaccgtatcttgtcggatacatgatatggtccttgatcttatcagtttcttgtcaaatgaggagcattttctaacaaaagtaggtgggcaacaacccgtatctcttgatctgcctaaaaaggtccgccggttatccctccaaattagccaggaagaggaagccaagcagctagctacaatgagcttctcccacctgagatatttgagtctcaatgcgaaatttattactgagatcccaagggagattcggaatctgcaatttttgcaagtacttgacataactaatcttgggcacaaagtaaagatgacaaccattattcacttgcgacagctgttgcggctttgttctaggtctgggtggagcataaaacagctagacggatttggaaaactaacctctctacaagaagttaaagggaccataactatcgagtcaccaagcatgctgcatgatctggggtgtctgaccaatctcaggaccttgggcatcaactttcgtgattgggatgagagctatgaggaacctttcatccaatgtctatctaaccttgtcagcctcaaatccatgaaaataaaaggtaccatgatgagcagcctatgttccgaatgtgacaaattgtaccctggtcctcaacaactttgctccattgatatgaagtcacttgcaagaactgtcatcatgactagagtaccaagatggatgtcatcactctgctccctgtctagcataaagatcacattattagctctgggagtacaagatatccatgtccttgggagcataccatctctacgttgtctcagtgtacatgtgaaggaaaccagagatgaaaggttggtcattgacaagtgttatccattccggtgcctaactgagatgcaaatcgattatgaatccatggcggtggtgttcgcaccagggagtatgcaaaacctcaaagaactccatttattgttcggggtgaaagaggtaatgcataagtacggtgattgtaactttggtttggagcacctcatgtcacttgagcatgtctctgttaaaacaatgtacactatcatgcccgaggaggtggaggccgtaaaagatgaattccagaaatccctggacatgaatcctggcaagcccacgttgatagtagattatttgtatccgaaagaacatattcccttctctaattggcactgcattctcaacgtcgcatgggtactagtggcaaataagctctctgaagtcatgaattttctacagataatccaaagccacgtccgtgacgacgatgtacgatacgacgatgtccgcggaagaagccagagtcgatgctgtgatctgggggcgacgtcgcagtccatcctgccagcacagcacatcacattgctccgcctcggggaggaagtagggcggcggttacttgtcccgctccaactacaaagcccagactgcccagtccgcatccccagcagccgtgacaccgccacagcagcctcggcgctgcgtttctgccttcccggtgagacaaatggccgccagcgccaccgacgccgacgccggcgccgggctcagatcggagttcctgcaggtcctgctcagccgccgccgcgatctcctagtgcctctcacggtggagcaagggagtccggtgaaggacccgatgtaccagaatcctccgtcgaccatggaggcaaatccgatggagtcgtgccccagtaaagaggtggagaacttgagggagaagctggttgaagaaaatttctaccttatcactgagctaggtgaacaaggacgagtacctgtacttctgctgaagcttgacgaccccgtccctagaagaaaaccagctatcgtgttcctgcacagctcttacaagtgcaaagagtggctgcgcccactgcttgaggcatatgcttccaagggctacgtctgtgtggctattgactcgcgctatcacggcgaaagggccagcaatgaaaccacttacatagatgcactgaaatcggcttggcggaatggggatacaatgcctttcgtttttgacacggtgtgggacttggtaaagcttggagactacctcggcgagagggaggacgtggatccctgtagggttgggatcaccggcgaatcgctgggagggatgcacgcgtggtttgctgcttttgtggacacacggtacagtgtcgtcgttcctatcatcggtgttcagggattcaggtgggccattgacaacaacatgtggctggctagggtgaatagcataaggcctttatttgaagaagcaagaattgacttaggaaagagcgaattagatacagaagttgttgaaagggtttgggaaaagatagcaccaggcctggactcgcaatttgatgccccctattcacttcctttgcttgcaccacggccgttgctacttctaaatggcgctgaagatcctcgttgcccaataagtggtttaggagaagctatttcaaaaactgctaaagcttacgaagaatctggttgcgcggagaagttcatgtattatagtcttaaagaagaatttggagagttgtagcatatcaaatctgggccctttttaaaagccacccaagataagatcatggacttttggagttttctccaagtagagggtctaggcatgcaaattattataatcctcatcactttacaatgcaatgaggaatgtaggttgttattcaaccaaaaatatcatatatttagatatcttcgtactcactctgttcttttttatttatcgtgttttagttcaataatgaactatcgaacgataatattcgagaatgaagttagcatattttatggacgcaaactagaactgattattgctggtgagtgacagaaaagtagcactgactacca

SEQ ID NO: 57934 - DNA, 1685 bp, Zea Mays
attttgttcgctaatgcaggccgcatccctgctactgactgaaggattataaacattctctatcgccttgctaataaactgctaggtgaacaaggacgagtacctgtacttctgctgaagcttgacgaccccgtccctagaagaaaaccagctatcgtgttcctgcacagctcttacaagtgcaaagagtggctgcgcccactgcttgaggcatatgcttccaagggctacgtctgtgtggctattgactcgcgctatcacggcgaaagggccagcaatgaaaccacttacatagatgcactgaaatcggcttggcggaatggggatacaatgcctttcgtttttgacacggtgtgggacttggtaaagcttggagactacctcggcgagagggaggacgtggatccctgtagggttgggatcaccggcgaatcgctgggagggatgcacgcgtggtttgctgcttttgtggacacacggtacagtgtcgtcgttcctatcatcggtgttcagggattcaggtgggccattgacaacaacatgtggctggctagggtgaatagcataaggcctttatttgaagaagcaagaattgacttaggaaagagcgaattagatacagaagttgttgaaagggtttgggaaaagatagcaccaggcctggactcgcaatttgatgccccctattcacttcctttgcttgcaccacggccgttgctacttctaaatggcgctgaagatcctcgttgcccaataagtggtttaggagaagctatttcaaaaactgctaaagcttacgaagaatctggttgcgcggagaagttcatgttcattgcagagcctggagtcggccataaaatcacaatcgacatggtgaaggcagcaagcgaatggttcgatcgcttcctgcatgcatgaatgcaaaagttattgtcgcccatcatttgttctatatcgattgtgatttgtcaacagcatcccttagttgaagtatttatgtcctcgtctgtgtaccttggtaattgccggtcggacaaacatctctatctctatttattatattaggatacgtttggttgctggacaaatgagggcagaatagaatggctcctaagttgggaatggaatgattcctcatattatttggttggaaggatgagatgatccttgttttttgtttggttagagatataactggggatagattgttcatgtcctttgtttggttcgagaacagagcacaaaaaaatgtttgccgccattgcccccatctcatgatatgttacaactaatattaagtcgacaaaacacacatattattaatttcacacaatacataataatgtgtcctagcattacacataatatcaagtttaaggcttccacaaaatctgcatgttcaagcaaaatccgctgacgtacttagaccacatttcattgtttgatgtggttcaagcaaaagaactgtccaagcctatctactataactaccctcacactcctgggtacacataaatcacaattcattgttcgatgtggttcaagcaaaagaacccctaccacctaccctcacactcttgggaacttcactgacgaaattgcgagcccagattaacttgtggtcgaatggcaacttgttgaaggctctagcaatgtgagggtgcgccaccagataattgaaataa

SEQ ID NO: 57935 - DNA, 1771 bp, Zea Mays
cttcccggtgagacaaatggccgccagcgccaccgacgccgacgccggcgccgggctcagatcggagttcctgcaggtcctgctcagccgccgccgcgatctcctagtgcctctcacggtggagcaagggagtccggtgaaggacccgatgtaccagaatcctccgtcgaccatggaggcaaatccgatggagtcgtgccccagtaaagaggtggagaacttgagggagaagctggttgaagaaaatttctaccttatcactgagctaggtgaacaaggacgagtacctgtacttctgctgaagcttgacgaccccgtccctagaagaaaaccagctatcgtgttcctgcacagctcttacaagtgcaaagagtggctgcgcccactgcttgaggcatatgcttccaagggctacgtctgtgtggctattgactcgcgctatcacggcgaaagggccagcaatgaaaccacttacatagatgcactgaaatcggcttggcggaatggggatacaatgcctttcgtttttgacacggtgtgggacttggtaaagcttggagactacctcggcgagagggaggacgtggatccctgtagggttgggatcaccggcgaatcgctgggagggatgcacgcgtggtttgctgcttttgtggacacacggtacagtgtcgtcgttcctatcatcggtgttcagggattcaggtgggccattgacaacaacatgtggctggctagggtgaatagcataaggcctttatttgaagaagcaagaattgacttaggaaagagcgaattagatacagaagttgttgaaagggtttgggaaaagatagcaccaggcctggactcgcaatttgatgccccctattcacttcctttgcttgcaccacggccgttgctacttctaaatgttcattgcagagcctggagtcggccataaaatcacaatcgacatggtgaaggcagcaagcgaatggttcgatcgcttcctgcatgcatgaatgcaaaagttattgtcgcccatcatttgttctatatcgattgtgatttgtcaacagcatcccttagttgaagtatttatgtcctcgtctgtgtaccttggtaattgccggtcggacaaacatctctatctctatttattatattaggatacgtttggttgctggacaaatgagggcagaatagaatggctcctaagttgggaatggaatgattcctcatattatttggttggaaggatgagatgatccttgttttttgtttggttagagatataactggggatagattgttcatgtcctttgtttggttcgagaacagagcacaaaaaaatgtttgccgccattgcccccatctcatgatatgttacaactaatattaagtcgacaaaacacacatattattaatttcacacaatacataataatgtgtcctagcattacacataatatcaagtttaaggcttccacaaaatctgcatgttcaagcaaaatccgctgacgtacttagaccacatttcattgtttgatgtggttcaagcaaaagaactgtccaagcctatctactataactaccctcacactcctgggtacacataaatcacaattcattgttcgatgtggttcaagcaaaagaacccctaccacctaccctcacactcttgggaacttcactgacgaaattgcgagcccagattaacttgtggtcgaatggcaacttgttgaaggctctagcaatgtgagggtgcgccaccagataattgaaataa

SEQ ID NO: 57936 - DNA, 752 bp, Zea Mays
aatggccgccagcgccaccgacgccgacgccggcgccgggctcagatcggagttcctgcaggtcctgctcagccgccgccgcgatctcctagctaggtgaacaaggacgagtacctgtacttctgctgaagcttgacgaccccgtccctagaagaaaaccagctatcgtgttcctgcacagctcttacaagtgcaaagagtggctgcgcccactgcttgaggcatatgcttccaagggctacgtctgtgtggctattgactcgcgctatcacggcgaaagggccagcaatgaaaccacttacatagatgcactgaaatcggcttggcggaatggggatacaatgcctttcgtttttgacacggtgtgggacttggtaaagcttggagactacctcggcgagagggaggacgtggatccctgtagggttgggatcaccggcgaatcgctgggagggatgcacgcgtggtttgctgcttttgtggacacacggtacagtgtcgtcgttcctatcatcggtgttcagggattcaggtgggccattgacaacaacatgtggctggctagggtgaatagcataaggcctttatttgaagaagcaagaattgacttaggaaagagcgaattagatacagaagttgttgaaagggtttgggaaaagatagcaccaggcctggactcgcaatttgatgccccctattcacttcctttgcttgcaccacggccgttgctacttctaaatgttcattgcaga

SEQ ID NO: 57937 - DNA, 1180 bp, Zea Mays
ccgacgccggcgccgggctcagatcggagttcctgcaggtcctgctcagccgccgccgcgatctcctaggacgagtacctgtacttctgctgaagcttgacgaccccgtccctagaagaaaaccagctatcgtgttcctgcacagctcttacaagtgcaaagagtggctgcgcccactgcttgaggcatatgcttccaagggctacgtctgtgtggctattgactcgcgctatcacggcgaaagggccagcaatgaaaccacttacatagatatagatttttacgacgcgcgcgacgaggaatctcagccaaattttgtttggacgtcgacttttctgcaggtgtgggacttggtaaagcttggagactacctcggcgagagggaggacgtggatccctgtagggttgggatcaccggcgaatcgctgggagggatgcacgcgtggtttgctgcttttgtggacacacggtacagtgtcgtcgttcctatcatcggtgttcagggattcaggtgggccattgacaacaacatgtggctggctagggtgaatagcataaggcctttatttgaagaagcaagaattgacttaggaaagagcgaattagatacagaagttgttgaaagggtttgggaaaagatagcaccaggcctggactcgcaatttgatgccccctattcacttcctttgcttgcaccacggccgttgctacttctaaatggcgctgaagatcctcgttgcccaataagtggtttaggagaagctatttcaaaaactgctaaagcttacgaagaatctggttgcgcggagaagttcatgtattatagtcttaaagaagaatttggagagttgtagcatatcaaatctgggccctttttaaaagccacccaagataagatcatggacttttggagttttctccaagtagagggtctaggcatgcaaattattataatcctcatcactttacaatgcaatgaggaatgtaggttgttattcaaccaaaaatatcatatatttagatatcttcgtactcactctgttcttttttatttatcgtgttttagttcaataatgaactatcgaacgataatattcgagaatgaagttagcatattttatggacgcaaactagaactgattattgctggtgagtgacagaaaagtagcactgactacca

SEQ ID NO: 57938 - DNA, 1683 bp, Zea Mays
gccggcgccgggctcagatcggagttcctgcaggtcctgctcagccgccgccgcgatctcctagctaggtgaacaaggacgagtacctgtacttctgctgaagcttgacgaccccgtccctagaagaaaaccagctatcgtgttcctgcacagctcttacaagtgcaaagagtggctgcgcccactgcttgaggcatatgcttccaagggctacgtctgtgtggctattgactcgcgctatcacggcgaaagggccagcaatgaaaccacttacatagatatagatttttacgacgcgcgcgacgaggaatctcagccaaattttgtttggacgtcgacttttctgcaggtgtgggacttggtaaagcttggagactacctcggcgagagggaggacgtggatccctgtagggttgggatcaccggcgaatcgctgggagggatgcacgcgtggtttgctgcttttgtggacacacggtacagtgtcgtcgttcctatcatcggtgttcagggattcaggtgggccattgacaacaacatgtggctggctagggtgaatagcataaggcctttatttgaagaagcaagaattgacttaggaaagagcgaattagatacagaagttgttgaaagggtttgggaaaagatagcaccaggcctggactcgcaatttgatgccccctattcacttcctttgcttgcaccacggccgttgctacttctaaatggcgctgaagatcctcgttgcccaataagtggtttaggagaagctatttcaaaaactgctaaagcttacgaagaatctggttgcgcggagaagttcatgttcattgcagagcctggagtcggccataaaatcacaatcgacatggtgaaggcagcaagcgaatggttcgatcgcttcctgcatgcatgaatgcaaaagttattgtcgcccatcatttgttctatatcgattgtgatttgtcaacagcatcccttagttgaagtatttatgtcctcgtctgtgtaccttggtaattgccggtcggacaaacatctctatctctatttattatattaggatacgtttggttgctggacaaatgagggcagaatagaatggctcctaagttgggaatggaatgattcctcatattatttggttggaaggatgagatgatccttgttttttgtttggttagagatataactggggatagattgttcatgtcctttgtttggttcgagaacagagcacaaaaaaatgtttgccgccattgcccccatctcatgatatgttacaactaatattaagtcgacaaaacacacatattattaatttcacacaatacataataatgtgtcctagcattacacataatatcaagtttaaggcttccacaaaatctgcatgttcaagcaaaatccgctgacgtacttagaccacatttcattgtttgatgtggttcaagcaaaagaactgtccaagcctatctactataactaccctcacactcctgggtacacataaatcacaattcattgttcgatgtggttcaagcaaaagaacccctaccacctaccctcacactcttgggaacttcactgacgaaattgcgagcccagattaacttgtggtcgaatggcaacttgttgaaggctctagcaatgtgagggtgcgccaccagataattgaaataa

SEQ ID NO: 57939 - DNA, 1185 bp, Zea Mays
ggcggccagatgatcaggacaagtccagcagtcctagtctatctctctgtctcttttgacgctaggtgaacaaggacgagtacctgtacttctgctgaagcttgacgaccccgtccctagaagaaaaccagctatcgtgttcctgcacagctcttacaagtgcaaagagtggctgcgcccactgcttgaggcatatgcttccaagggctacgtctgtgtggctattgactcgcgctatcacggcgaaagggccagcaatgaaaccacttacatagatatagatttttacgacgcgcgcgacgaggaatctcagccaaattttgtttggacgtcgacttttctgcaggtgtgggacttggtaaagcttggagactacctcggcgagagggaggacgtggatccctgtagggttgggatcaccggcgaatcgctgggagggatgcacgcgtggtttgctgcttttgtggacacacggtacagtgtcgtcgttcctatcatcggtgttcagggattcaggtgggccattgacaacaacatgtggctggctagggtgaatagcataaggcctttatttgaagaagcaagaattgacttaggaaagagcgaattagatacagaagttgttgaaagggtttgggaaaagatagcaccaggcctggactcgcaatttgatgccccctattcacttcctttgcttgcaccacggccgttgctacttctaaatggcgctgaagatcctcgttgcccaataagtggtttaggagaagctatttcaaaaactgctaaagcttacgaagaatctggttgcgcggagaagttcatgtattatagtcttaaagaagaatttggagagttgtagcatatcaaatctgggccctttttaaaagccacccaagataagatcatggacttttggagttttctccaagtagagggtctaggcatgcaaattattataatcctcatcactttacaatgcaatgaggaatgtaggttgttattcaaccaaaaatatcatatatttagatatcttcgtactcactctgttcttttttatttatcgtgttttagttcaataatgaactatcgaacgataatattcgagaatgaagttagcatattttatggacgcaaactagaactgattattgctggtgagtgacagaaaagtagcactgactacca

SEQ ID NO: 57940 - DNA, 1244 bp, Zea Mays
ctctaagcagcctcacgagatcgaagagcaacaatataatagtgcactcgatcttactccacatacatgcagactgcattgcatccctctgctgaatacttgggtgcaccttgatagtcggcatcttttttttagctaggtgaacaaggacgagtacctgtacttctgctgaagcttgacgaccccgtccctagaagaaaaccagctatcgtgttcctgcacagctcttacaagtgcaaagagtggctgcgcccactgcttgaggcatatgcttccaagggctacgtctgtgtggctattgactcgcgctatcacggcgaaagggccagcaatgaaaccacttacatagatgcactgaaatcggcttggcggaatggggatacaatgcctttcgtttttgacacggtgtgggacttggtaaagcttggagactacctcggcgagagggaggacgtggatccctgtagggttgggatcaccggcgaatcgctgggagggatgcacgcgtggtttgctgcttttgtggacacacggtacagtgtcgtcgttcctatcatcggtgttcagggattcaggtgggccattgacaacaacatgtggctggctagggtgaatagcataaggcctttatttgaagaagcaagaattgacttaggaaagagcgaattagatacagaagttgttgaaagggtttgggaaaagatagcaccaggcctggactcgcaatttgatgccccctattcacttcctttgcttgcaccacggccgttgctacttctaaatggcgctgaagatcctcgttgcccaataagtggtttaggagaagctatttcaaaaactgctaaagcttacgaagaatctggttgcgcggagaagttcatgtattatagtcttaaagaagaatttggagagttgtagcatatcaaatctgggccctttttaaaagccacccaagataagatcatggacttttggagttttctccaagtagagggtctaggcatgcaaattattataatcctcatcactttacaatgcaatgaggaatgtaggttgttattcaaccaaaaatatcatatatttagatatcttcgtactcactctgttcttttttatttatcgtgttttagttcaataatgaactatcgaacgataatattcgagaatgaagttagcatattttatggacgcaaactagaactgattattgctggtgagtgacagaaaagtagcactgactacca

SEQ ID NO: 57941 - DNA, 1001 bp, Zea Mays
atatctttttcgcagatattgttcacaattccgctcatcaccagatgcgtcgggagacttctaggctgtctttacattctatatattaaagcggggaggattcctgcaaagctacgatgtccacgtcaacttataaaacgtcagccgttcgatggtgcctcaacgacaagggaagcacaacactgaagggactcaaagcgcagcgaccagaatatctttttcgcagatattgttcacaattccgctcatcaccagatgcgtcgggagacttctaggctgtctttacatacgaatggactctagcgaacagaagtgcctgtgagcattgtcgtttctccaaaaaggatgacaccttcaatgttcgcgacaatccaacagcgacggcgaggaacctttggccctccggaaaggacccggagtctgaagttgtttaggtcgggtttggatctcctctgtcttcctcggttggctttttcctgtatcatatttatcaagtctttacattttagtatcctttgtttccgatttcccaaaggtgcgtagatcctaccccactactttttaattcaaaattcgtatttttttggttattagcgcttccatggcgactgttttcctctaaacccctgcttttccagaagcaatcaggcctgccttccttttccactgcctcatcggattaaagtttttttgagctacaggctacagccatgtacatgaaacgaaaatcctgctgagctgaattaaaaaaaatgttattaatgtatctatgaatctgaaaaccctaatgaatttgtagtattctgtttgatcgtctacgcatatttattggctttagcagatagcgatgtacattattatactcttccccgtagatacaaattgtactgattttatctacgtatatacatatagcttcagtttaaggttattaattttatgctccatactttacgccactgcctcattcgactaatgattgtttgcgcaaccaggaaaac

SEQ ID NO: 57942 - DNA, 541 bp, Zea Mays
cgttacgttacggcggtatcggcatatagcgatagctcaactatcttcaagctcgccagacggttctggctggagagccgagcgagcgagcgagcgagcggtcgacggggggaggaggcgttggcacgtcggcctcaccgacgacccgtctctcctcgccctgcactgcaccgcaccgcacctgcagtaggcggcgtgtcaatttgaagcttgagcgacgtcctcccctcccggccaacgcccggccggcgtatcaaccgcagggataagactctatggcgaggtcgcttatgtgacatgggtgataaccaacggaggattgatgtagtgtttgcgatgatctatttgcttgttgcattggatcatcaatgttcagatatccacccaatcaagttatcctacctcacgaaagatcggtctcgtccatctatcatatattgcatttgcatgaggattaacaacaattccgatacaagaaataaaatcttttcaaaaagcgttttgaaaaagaggctaggtgtttgtggcgcggacagtctag

SEQ ID NO: 57943 - DNA, 652 bp, Zea Mays
cctcgccctgcactgcaccgcaccgcacctgcagtaggcggcgtgtcaatttgaagcttgagcgacgtcctcccctcccggccaacgcccggccggcgtatcaaccgcaggttcgttgccaggtcattttcgggcagaaaggctttagtttccatgggggcacaagcgtcgacgcagtgtcgagtgtgttgtctctcctcgctcgcctcgtctcggagtttccatagacggaacgaaattcctggattcactgacagaagcaggccagagaggaaccaaccggtcgctggcatggcactccgtccagctcgatcgatcgcctaggcccccacaggaacctgcaggttgtgttcccctctagctgagcttgcccatgactctcgtggtggtccatgaacttggcctcctgctgtgacgtccactggaataggttccgcgacgccctgcatgcacgcaagcaaattcgtgtcttgtgcaatgcgttttgcacacgggtgaggctcaattattgtgggtgggcgcagctctcctgattttgatcgcgtccaccggttgccttaggtcatacctggcaaacgcaaaataaataaataaataaataaataaatggagatgagggattaccatgaaggcataaactactacaaaagtg

SEQ ID NO: 57944 - DNA, 989 bp, Zea Mays
atgggtcccctgtgcctgtggcctgcgccacacacacattcctctccaccgtccccactcgctgccgacactccagtgtccagtcgcccacgtacccggcaccccgctgccgtgcccgtgctccatcccgctccgtgtcccaccaccacgcggccttcgctccctactggccacggtgtctcccgccgcagcggatcccaagggaagttccctggcctttccgtgcgtcactgctcgctctccgcctccacctcttttagtgcggccgcctgccagtgcggtgtccactgtccagccagccatccaggcccaggagcgcgagttctgtgcctgtgcctctgctccacctcccctgcccctgcgccccaagtccacgtccaccacttagcactcacgctgctcgctcgctcgctcgtacacgcgcccgcttcgcgcaggaaccgtgggagggaagcggacggacatgatgcacgccaagtcggagtcggacgtgacgagcctggcggcgtcgtcgccgcctcggtcgccgaagcggggcggcggcgccgccggcaacggcggctactacgtgcagagcccgtcgcgggagtcgcacgacggcggctacaagtcctcgtcgatgcagcccacgccggtctacaacagccccaacgagtcgccgtcgcacccctcctacggccgccactcccgctcctcctccgtcagccgcttctccggcaacctccgcaagggcgccgccggggaccgcaaggtgctcaacgacaaggggtggcccgagtgcaacgtcatcgaggaggagggcccgtacgaggacctcgccggcgatagcggcctctcccgccgctgccagatcatactcggcttcctcaccttcgtcctcctcttcaccgtcttctgcctcatcatctggggcgccgcccggccgtacgagcccgaggtcatcgtcaagcggtaggcgagatgggttacatcaccatccaattgattgg

SEQ ID NO: 57945 - DNA, 1972 bp, Zea Mays
atgggtcccctgtgcctgtggcctgcgccacacacacattcctctccaccgtccccactcgctgccgacactccagtgtccagtcgcccacgtacccggcaccccgctgccgtgcccgtgctccatcccgctccgtgtcccaccaccacgcggccttcgctccctactggccacggtgtctcccgccgcagcggatcccaagggaagttccctggcctttccgtgcgtcactgctcgctctccgcctccacctcttttagtgcggccgcctgccagtgcggtgtccactgtccagccagccatccaggcccaggagcgcgagttctgtgcctgtgcctctgctccacctcccctgcccctgcgccccaagtccacgtccaccacttagcactcacgctgctcgctcgctcgctcgtacacgcgcccgcttcgcgcaggaaccgtgggagggaagcggacggacatgatgcacgccaagtcggagtcggacgtgacgagcctggcggcgtcgtcgccgcctcggtcgccgaagcggggcggcggcgccgccggcaacggcggctactacgtgcagagcccgtcgcgggagtcgcacgacggcggctacaagtcctcgtcgatgcagcccacgccggtctacaacagccccaacgagtcgccgtcgcacccctcctacggccgccactcccgctcctcctccgtcagccgcttctccggcaacctccgcaagggcgccgccggggaccgcaaggtgctcaacgacaaggggtggcccgagtgcaacgtcatcgaggaggagggcccgtacgaggacctcgccggcgatagcggcctctcccgccgctgccagatcatactcggcttcctcaccttcgtcctcctcttcaccgtcttctgcctcatcatctggggcgccgcccggccgtacgagcccgaggtcatcgtcaagagcttggtgatggacgacttctacgcgggtgaaggcacggaccacagcggcgttccaacaaaattggtcacaacaaactgctctctgcacatagctgtctacaaccctgccacaatgtttggaattcatgtcacttctggccccatccacctgatgtattcagagatcccaatagcagtcggtcaggttcggaggtattaccagccgaggaagagccaccggatggtgacggcggtcatccacggcgagaaggtgccgctgtacggcgccgggggcagcctgatgctgtcgacaagcacgggcggggcggtgcccctgacgctggacttggacctgacctcgcggggctacgtgatcggcaagctcgtgcgggtgacgcacaaggtgcacgtgacgtgccccgtcgtcgtggacgccaagaagaccaagcccgtcaggttctccaagaaggcctgcgccgtgtacagggcctgaacttcaaatgcgttttcgtaggctgcgatccgacggcgcattagcaacgcgcgtaggatgccgtgcctgtatttagttatcgtattggtggtgaagaacaataagctgcacacacatatggtctgtttgagccttttggttctgccgataaatcgcgctgtacggcgggtgtcctcttgttcttgctcttgcctgtgtgtatctttctttttttcagggcgcaatcctagagacgggacggatggctgtaaactggtcctatctgcagattcacacctgggtgccattgtttattttttatttttgagagagaacatcaagcaagcagcgccatgaaccaggaactgtcggttgcgacctgcggcgtggtcaccgcaggcctactgctagtgctacttcccggcttgcgcccaccaggctgcagcgcgcgccgcggcggccaaagcttgtttttttctcatcagcttttctgaaaatctagctgtggagagaatctgcctgtgtagaaaatttaagtatcattagaattacgtgcggaggaaaataaag

SEQ ID NO: 57946 - DNA, 2667 bp, Zea Mays
atgggtcccctgtgcctgtggcctgcgccacacacacattcctctccaccgtccccactcgctgccgacactccagtgtccagtcgcccacgtacccggcaccccgctgccgtgcccgtgctccatcccgctccgtgtcccaccaccacgcggccttcgctccctactggccacggtgtctcccgccgcagcggatcccaagggaagttccctggcctttccgtgcgtcactgctcgctctccgcctccacctcttttagtgcggccgcctgccagtgcggtgtccactgtccagccagccatccaggcccaggagcgcgagttctgtgcctgtgcctctgctccacctcccctgcccctgcgccccaagtccacgtccaccacttagcactcacgctgctcgctcgctcgctcgtacacgcgcccgcttcgcgcaggtgcgtgtagaacgacggaggcattccatttccgactgagccgtgtgtgtttggatcggatcggacaacccctgccaaaaccgcgtgtgccggcgctgttctgcctctgatcgtgtgtgctgctgttggttttggttttggtttggctagggaaggaaccgtgggagggaagcggacggacatgatgcacgccaagtcggagtcggacgtgacgagcctggcggcgtcgtcgccgcctcggtcgccgaagcggggcggcggcgccgccggcaacggcggctactacgtgcagagcccgtcgcgggagtcgcacgacggcggctacaagtcctcgtcgatgcagcccacgccggtctacaacagccccaacgagtcgccgtcgcacccctcctacggccgccactcccgctcctcctccgtcagccgcttctccggcaacctccgcaagggcgccgccggggaccgcaaggtgctcaacgacaaggggtggcccgagtgcaacgtcatcgaggaggagggcccgtacgaggacctcgccggcgatagcggcctctcccgccgctgccagatcatactcggcttcctcaccttcgtcctcctcttcaccgtcttctgcctcatcatctggggcgccgcccggccgtacgagcccgaggtcatcgtcaagagcttggtgatggacgacttctacgcgggtgaaggcacggaccacagcggcgttccaacaaaattggtcacaacaaactgctctctgcacatagctgtctacaaccctgccacaatgtttggaattcatgtcacttctggccccatccacctgatgtattcagagatcccaatagcagtcggtcaggtatatccatcctccgtccttggcctatttaatagccgcttttaagtgctgtcctcgcattgactgatgatactgctctgcctcgtgtcgagagagtaaactgcgcgaggagccgaatctcttcctttttacctctctattaacttcgccattcatttaagagaaactccactagcgaaacatttctcatgtgcttcacctttctatccataattccatccatatttgtcccatccatcgcatcaaagcctcaaaggtcgtcaaagatctgactaacggatgcgtaattccttgtcaagttaatcgtacaaaatgcatgatcgagttgaaaagttttgtttgtggggacaaaagaataaagacagtatgtatactagggctgcttcagcaatagacagtgctaatagtccagcaaatgttgttgcatgaatccttcctttcatttctggacatctgtttgcatcagttgagtcaaaagccagaattgctggtaatagtcattgaatctgacgtggctactgtgactgcgatcactctcaggttcggaggtattaccagccgaggaagagccaccggatggtgacggcggtcatccacggcgagaaggtgccgctgtacggcgccgggggcagcctgatgctgtcgacaagcacgggcggggcggtgcccctgacgctggacttggacctgacctcgcggggctacgtgatcggcaagctcgtgcgggtgacgcacaaggtgcacgtgacgtgccccgtcgtcgtggacgccaagaagaccaagcccgtcaggttctccaagaaggcctgcgccgtgtacagggcctgaacttcaaatgcgttttcgtaggctgcgatccgacggcgcattagcaacgcgcgtaggatgccgtgcctgtatttagttatcgtattggtggtgaagaacaataagctgcacacacatatggtctgtttgagccttttggttctgccgataaatcgcgctgtacggcgggtgtcctcttgttcttgctcttgcctgtgtgtatctttctttttttcagggcgcaatcctagagacgggacggatggctgtaaactggtcctatctgcagattcacacctgggtgccattgtttattttttatttttgagagagaacatcaagcaagcagcgccatgaaccaggaactgtcggttgcgacctgcggcgtggtcaccgcaggcctactgctagtgctacttcccggcttgcgcccaccaggctgcagcgcgcgccgcggcggccaaagcttgtttttttctcatcagcttttctgaaaatctagctgtggagagaatctgcctgtgtagaaaatttaagtatcattagaattacgtgcggaggaaaataaag

SEQ ID NO: 57947 - DNA, 1515 bp, Zea Mays
agagtgggttggtgggtgggtccgtccccagcgagccgcggcaggcaccaattggccaccaacaacacgtccccggtcggtcagagtcagccgcgcgcgctgttcttcccacaatccacacccaccaacccctctccccacactcgtcaaccacggccacgctcgctgggcaccatggccaccgggcaaacgggaacgggaggctgaaggcctcttcaccaaacgcacggatcaggtcatcagaccagtggccagcctaccgctgcgcactggcacggcgcacctatgcccgggtccggcaagcctaaccacaccaaccaacccacagggccacacccacaccgaccgtgtccgtccgctgacgcgccgggcccggaccccgtcgctcgcacgaccgactgcttcttcaccttcacgttggccatatttgagtagcgtcacattggccgtcgcgttggcctacttggcagtggatgccaagctctcacatggctcatcttcgccttcgccttgccgccgcgcgttatataagccgccccggcaggcaaggtcggtcaatccagcaatacccgagtacccgacgcgctagctagttctattgccgcaccccagatctccaggagggactcgttcgttcagctaactacactgcacgcaatggccaccacggcgaccgaggcggcgccggcgcaggagcagcaggccaacggcaacggcgagcagaagacgcggcactccgaggtcggccacaagagcctgctcaagagcgacgacctctaccagtacatcctggacacgagcgtgtacccgcgggagccggagagcatgaaggagctccgcgagatcaccgccaagcacccatggaacctgatgacgacctccgccgacgaggggcagttcctgaacatgctcatcaagctcatcggcgccaagaagaccatggagatcggcgtctacaccggctactccccgtcctcgacgacctcatcgcggaggacaactacctcaactaccacgagcggctgctgaagctggtgaagctgggcggcctcatcggctacgacaacacgctgtggaacggctccgtcgtgctccccgacgacgcgcccatgcgcaagtacatccgcttctaccgcgacttcgtgctcgtcctcaacaaggcgctcgccgccgacgaccgcgtcgagatctgccagctccccgtcggcgacggcgtcaccctctgccgccgcgtcaagtgaaaacatggcctggcctggcctgccccaccaccgccaccgacggcgccgccggccgcatcctcattccaatcataatagacgacccgcagcattaattatccaccggctttttttttggctctttcttgcccctgtaatctttctcctcctcttccttcttgggaattgtcgccgccgtttcgatacgtaaatcacgagatcggtaatacagtaatgctcctcaattttacaatatactcctactattactactgctaccgtggatggttttgtt
